United States Patent Application Publication US 2015/0376612 A1 - sequence listing, part 57

SEQ ID NO: 134338 - DNA, 1007 bp, Homo sapiens
tgaaatagactctttttagttagttcagaaacttcctcttttacttttgattttgctgattttggtgagaaaaaatattgctaatttcataatcatagtattattaaatgaagtcaatagatatgagatcaaagcttttaacttaaaatcataattttatagcagatcagtgactaggttagcctcttagggttgctgctcttcgggattgatgaagaagatatgcagagcttatttctcaccttttttttttttcctcggttttggtttcttagaggattaccatctgctgcaaaaacatatgaatgggtcatcgtcatgtccagtgtgtttttgtctctgtccttctctactcccttcccctccacttgctgtcactttttgcacatgtgcccatgtaccatctcataaacatatcaagtttctctctctttgattgggccatgccagcaacttctattttcttcttctgtcagcgtcttcaggagaaatgtgtacacaaaagcaagatggctttcaaagtaggctacatcctcctttcagtacttggtgcagacatgaaattgaaggccattcagctctacctgatgctggttctctcagcggcctggagattaacctcttctaaggctctgagctatttttgaggcagaggctgcaacaacattaaagctagaacccattaggaaatcactttcatcatctcttctttttccaaatcagtgactctttttctgatctcataaccctttaatctcctttgtagcagaacaaggagattgttagtttatgtttgtgtccagtgaagttagcatccttgataatagcttcagaagacaccaagatattagagaactacatagagagatgaatttcatttctaggtggatgacttaatgccgaaggtgccctgctttccttctgcagaaccgtaacttctgttgatgttgtgcaaatcaggctcaaactttccaaaagacacacagcagaaagccttttgttgcatt

SEQ ID NO: 134339 - DNA, 1201 bp, Homo sapiens
ttggaatctggcaagcagagtcggatggtatgtcttctgtgtgtggaaggacgacttccaagaagccaaggcattctggaggtccccccactgcacccctaaatcctgatgtagaacaggatctggcccagggtcatcctgctctgaccagggctctgctgggactaacaaaccagcatatcaatcatggaataaaagaacctttggagatcttggtgaatgacatttgaggaggagaaaggtgctgcttttcagagagaaatgaaaacagttaattctttgttgggaagagaagagcataggaggagcccagcctgctcttctagcattcatttctgattgttagcctagcagactccaggagaagccatgttgtgcacggaggagaagctctgagctaaaatggctgcccctaaagctcagaggactagggcagcttagtgagtcttagagcttcagtgacgcaggagctcatatctcttgaaagtgtgataaacacattcagcagagctgtggcttgtttggctgagatgaaaggactaagcttgggggatggggagtgcacactggatgatctgcttttttctgtgaagtgttctaaatgcaggagttgtctgcaccatggaaaaatttgttttcaggtctaatggactgtgcgaaaggagaagtggggtggggcctcagtgactgctgtaatttgatccagagctgatagcaacctcttccacacaatttgggttggtgcttagacataaaagcttgtgtatctggaatattgagacttagctgaaaagagtctggtgcacagttcaatgtttattgaaaaaggataaattgctgggtgaaagaagaggaggtaaatatctgcggctcactctgcaagctcagtctgtccagaactggacttgccagaagttattttagcaggcgatcaggaggagcattctttgatagaaaatccttgtgtgatggctcctttcactacattgatgtattattactggacttttttgttcctgcagaaataatttatcttttacagtaaaagtatagagtattacatcataaaatacattggctacggtgttagttcttggacatctggttctagattacagtgactcagtagagtttgtgatgatcttactgaagtaacttactcattagataataacagggtatctcaacttaggatatacat

SEQ ID NO: 134340 - DNA, 4429 bp, Homo sapiens
tactaaataaacagctaatgaaggttgaaattttccctttcttctgtgtggacatcctctttacttttgagatggttccaatttaaaaagaaaatgagtccaaggcagaaccaaagccaacattaagttaccaagaaatttggattcagtggagaagctcagaaacttctaaaacttttgaagtattaagcgtttccttgacaaatggcattggaagacatatcatgctagaaaatgtttatctggtatttttccttctttgaagttatgaggtcaaggacatcatctccattatgtctgattgcctctctttagccaatgttccaactggcaaagtccaataagagaaatctactgatactggaattttttcccattaatggatatatagccccatcagctcgaggtatgtgattagtgcattccttaagatgttttgttctgacttctgccacaggttcctaatgtgagaggctagacccagatcatggaggtgcttcagtgtgatggctgtgatttccgagccccgtcttatgaagatctcaaggcacacattcaggatgtccacacggcatttctgcagccaactgatgttgctgaggacaatgtgaatgagctacgatgtgggtccgtgaatgccagtaatcagacagaggtggagttttcttctataaaggatgaatttgccattgcagaagatttatcaggtaaatctatactaaacttggcacggccgatgtattttaattgctcttgtttccttttagcctgtagccatggttcttaatatacgtggcttttgcagagtttcttgtgctttgctagccatttttgtggtttgggcatcatgtatctctccttgagtaccttaggttttatcctttcgaaagcttcctcatatatcctacctttcaatttggagaacaagatagttgcttggaaagttctagaaaaagtagtacaatttatgcaacttgtatttttatagctgtgtggctcatttatggagatgaggagaatacctaaagctatacactgcatctttatccatgagaaggtgcagtacgtatatcttcattgatgctttgtgaatactcttcaaggcctcatcttgagacttcaggccttttgcatgtgatgtttagtaatgaagaataattggaatggtactgatttgcatgattggatattttaattatcttttgctttgtcactttccttatgctttttctttaggtcaaaatgcaacttcattggggaccggaggttactatggccacagtccaggatattatggtcagcatattgccgctaatcccaaaccaacaaacaagttttttcaatgcaagttctgtgtacgctacttcaggtcaaaaaacctcctcatagaacacactagaaaggtccatggagctcaagctgaagggagttcatcaggaccccctgtcccgggatccttaaattataatatcatgatgcacgagggatttggaaaggtcttctcttgccagttttgcacatacaagtcaccaagaagggcaagaataattaagcatcagaagatgtatcacaaaaacaatttgaaggagaccactgctcccccacctgctcctgctccaatgccagaccctgtggttccgcccgtatcactgcaggacccctgcaaggaactgccagcagaggttgtggagcgcagcatcttagagtctatggtcaagcctttgaccaaatctcgaggcaacttttgttgtgagtggtgcagctaccagaccccccgccgagaacgctggtgtgaccacatgatgaagaaacaccgcagtatggtcaagatcctttccagtctcagacagcaacaagaaggaactaatctacctgatgtgccgaacaagagtgcccccagccccacttccaactccacctatctgaccatgaatgctgcaagccgggagatacccaatactaccgtctccaacttcaggggctccatgggcaactccatcatgagacccaattcttcagcttccaagttttcgcccatgtcttaccctcagatgaagccgaagtcacctcacaattctggtctagttaacttgacagagagatcccgttatggaatgactgacatgaccaattcttctgctgacctggaaactaacagcatgctaaatgactctagttctgatgaagagttaaatgaaatagacagtgagaatggtttaagtgctatggatcaccagacatcaggcctgtctgcagagcagctgatgggctcagatggcaacaaattattggagaccaaggggattccatttagaagattcatgaataggttccagtgccccttttgtcctttcctcaccatgcatcgacgtagcatctctcgtcacatagaaaacatccacttatctggaaagacagctgtctacaaatgtgacgaatgtccgtttacttgcaagagctcgttgaaacttggggctcacaaacagtgtcacacgggtacaacgtcagattgggatgctgtgaattcccagagtgaaagcatttcttcctcactgaatgaaggtgtggtgtcttatgagagctcaagcatcaatggtagaaagtcaggagtcatgttggatcccttgcagcagcaacagccaccgcagccaccaccaccgccgccgccaccaccaccatcacagccacagccactgcagcagccacagccaccacagctgcagccaccacatcaggtgccaccccagccacaaacacagccaccaccaacgcagcagccacagccacccacacaagccgcacctctgcacccatacaaatgcaccatgtgtaattactccaccacaactctgaaagggctaagagtccatcagcagcataaacattcattctgtgacaacttgccaaaattcgaggggcagccctcaagcctaccattggaaaatgagacagacagccacccctcttccagcaacactgtgaagaaaagtcagacctcaattcttgggttgtcctccaagaacaattttgtagctaaagcctctaggaagctcgccaatgactttcctctagatttgtcacccgtgaagaagagaaccaggattgacgagatagcaagcaaccttcagagcaaaattaaccaaaccaaacagcaggaagatgcagtgatcaatgttgaggatgatgaagaggaagaggaagacaacgaagtcgagatagaggttgagttggacagggaggaagaaccgacagaacccatcatagaggttcccacttccttttctgcccaacagatatgggtaagagataccagtgagccccagaaagagcccaacttcagaaacatcacccacgattacaatgccaccaatggggctgagattgagctcaccctttctgaagatgaagaggattattatggctcctcaacaaacttgaaagatcaccaagtttccaatactgctctgctgaatacccaaactcccatctatgggactgagcacaatagtgaaaacacagactttggtgactctggaaggctttactattgtaaacactgtgactttaacaacaaatctgcccggagtgttagcacccactaccaacgaatgcacccatacattaaattcagctttaggtacatcttggaccccaatgatcacagtgcagtgtacaggtgcctggaatgctacatcgattacaccaacttcgaagatctccagcagcattatggcgagcaccacccagaagccatgaatgtactcaactttgatcactcggacctgatctaccggtgtcggttttgttcatacacgagcccgaatgttagaagcctgatgccacattaccaaagaatgcatcccacggtgaagatcaacaacgcgatgatattttcaagctatgtcgtggagcagcaggaagggctgaatacagaatcccagaccctgagggagattctgaattcggctcccaagaacatggcgacttccacacctgtggctcgtggtggtggtttgccagctacgttcaacaaaaacactcctaagacctttactcctgaatgtgaaaatcagaaggaccctttggtcaacactgttgttgtttatgattgtgatgtttgttcgtttgcaagccccaacatgcattctgtcttggttcattatcagaagaaacaccccgaagaaaaggcttcctactttaggatccagaaaactatgcgaatggtgtctgtggacaggggctctgccctttctcaattatcatttgaggtgggtgctccaatgtctcccaaaatgtccaacatgggttccccaccccccccacaacccccgccaccagacctcagtactgagctttactactgcaaacactgttcctacagcaatcggtcagttgtgggagtgcttgtccactaccagaaaagacaccc

SEQ ID NO: 134341 - DNA, 2618 bp, Homo sapiens
tggtcttcagtgtttgctacatgaacctaacgtctccaggagtagattttattttatcaagaagttcattaatggcgcaactatgcaacgtttcacctgcctagttgaaactggtttgaaaaccagatgacttagtggcagtgacgatgagcttctgcacagaaatcttctctactcacaagccgtaatgtatttgggtttcaaagactttgcatagtaggcagcgtgccatgatgctgacaaatttgttatataaaaatactcgcctatatctcccttggtttttaacctgctaatcggctttaaaataaagtatgttagtaaactgcaagaataaattctgacaattgagggagggctcggagtactgatggctaccactgtattttaccagccttttggtcacttagaagaggtgccaaagatcaaggagaggaaagtggtgggctacaaatgtaaattctgtgtggaagtgcacccaacgctccgagccatctgcaatcacctccgaaagcacgtccagtatggcaatgtcccagctgtgtcagctgctgtgaaggtgagaactggaaggtctggatgagcattgtgtgtgagcgattcgagttacttattaaccccattgcctaaagcagctcaggaaagagcatctcagaatgcgggcattcctgaattatgcttggattggtttggcttgttttgatttctttgcaggttggaccttcctcatctttctgttcagggaaaggtcgagtttcgatctggtttccttccacgcggatagtttggtggcagcagaaggtccaggattctcggtctaggaggcttcgggtcgtccttctattctgcgtttagtgccattagctcttcgttcttccaagttgcccgagctcttgagaggaatcaagtgggttctgttcccatcatcttctgctcctctttcttcctgacttcttactgttctcatctggctgaggatgcagagagcctaggagaatctctttgtcttcttatcctgggtcctctggggactgcaagagacattaaaactaaaagcgttcaagtcgcaattgaccctgaaagccttggtttgtctcctccatcccctctcccatatgatgctgacaagtgtcttcccttttccctctgacttttattaggccacctgttttgaacatcataatcctaatagcagccaccatgtcagtaaccaagccaccatccccgtcttccaggatattgctaagccctattatttattaaaacagaagtcattttggggttctgccctttctctaagggtacacgcgaacatatttttgtcatctgcccttcttgagcttacatcctattttgccaatttaacatgaagataaagtctctacttttcttcactgaagactgaagctttctgtcttttggcagaacagtggcaacccagggatatcagcagtcactttctttcagacaccactgcggtgtgtcccaggctcgtttcctgggatcatgtgagagagacagaagggcttttcctgtgtaatcagtaacccaaggagctatctcgaaaaacaggtgacttaaaactaggctgctccttaattttttgaattgattatgcagcagtctccagtcatagagtgaagtcaccatctacagggtagggggcagacagcgggatcttttgctttgcttcctttccagataatggcccaaggctcctcaatgaccatactactttgcttttctttctcttcctttcttcctctcctttctgtgagccacaaccctagcccaactttatgtcaacttagatggggttgcagtttgaattttcttttaagatggggaagaagtgagtgaagtgtcttcagagtgggagaagcccttgttcacatttcgcaaacagtagcaacctgtgtccgggtatgttgtcctaaaatcacctccactgcatgaagaatggcagttgggcttgctctccctctaggggtagctggagaggcaggggaggaagctttgacaagaagtgctgttgagtttgggagaatgtagggagaaaaagaaagctggaggcaatgatgatggatatttattttgttggtggggcatgtgtgtgtgtgtggttctcttagcaggaggcggatgaccctgcccacttgttcctggatggattggaagcagccaaagacgccagtggcgccctggtgggccgggtggatggtgaacactgcttgcttgatggaatgttggaggatgaaacccggccggggggataccattgcagtcaatgtgacagagtcctgatgtccatgcaggggctgcgttctcatgagaggagccacctggccctggccatgtttacccgcgaggacaagtacagctgccagtattgctcgtttgtttctgctttcaggcacaagtaagtgctattggggggtcactagtggttactgggagatgatgtcatagtggaaggcactaagctaaagcagaagcttggatgagtaagaaggccccactcatggttcacacctgctgctatgttacctggagcctcagtcaccttttctgtaaaatggggctgagaacaggagattgatcggatggcgttagatttg

SEQ ID NO: 134342 - DNA, 1900 bp, Homo sapiens
tgttcacaatgaaagtagaattagaattcaaaaagaaagtcagctcttttcaaatgctaaatttctctaattcccattctgttatttgaataagttagaggactaattgataggcactctcactggcttggcaggaagcttgaattcacccatattgtaccttctctttagatacactcttccaatgatcagagctctaagaagggacaataaagattcttaccatgacctgttaccactgccatatctctaaatccaaaaaaaactcttgatctcttcctttagcttcctgtcctcttagagtaggtacaactcttgaaaattaattaattaaattgataaatgccattattggaaagtaaacaaaaggactttgaacgacctagaagtaggattcctggaaaaaaagcaatgagcaaatcctctatgcaatttttaattttgtcatttttctttttgttttccttctacatcaagtttggatcgccatatgcaaacccaccacggacaccataaaccattccgatgcaaactctgctccttcaagtcctcctataacagccggctgaaaacacatatactcaaagctcatgctggtgagttgtgcattgatgatgcacaagttctttagcactctctgagtttgaaacctgatgatctttattgagtgaaatactgtcctgccttacacttgagaatgttattcttgggatggatgtatattcagttttatttttacctagtaaagaaaaaataaagaaaaaagtaaaagttaaacaaaatcacctaaatccaaaataatacaaagcctatgtcacccatgttatggttagttcgttcgtcctactgacaagttagaattagactgttggtgatttttacagaaatttctaaactgcctatactttctaattcaattgccaagaattgttatatctattaaaaagactttccagctaaaataaagttaccaacttaaggaagttagaaagggcaaagggaactcaagatgtgtgagatttttcaagagatacccttagatatgtttccgtacataagacagaaatgactttgggttgtgagtgtccagcagctgtgctggtctctatcatattgttgttccatctcattactcattagaaaaaattggaaatgaaagaagaaatacagtcagtcatctataatcttatctgaagaccactgttgttgacgtctgatgtgtcatgacccttacccaccaggctgtgcactaggcgtgttatatgcatcatcttctttagtcctataatcgtcctaaaggggaggcattgtgtcacattccttgtgccttgtataacccttggtcacagtttgaacagtgttgtaagaactgctcagaacctgggtccttcactttcgccagctcctcatgctctgtgtaaacaggaccatgtctcttcattgtcttctgagtgttggattttgttgaactgacttaatgcagtaagattacccaggtctcccagttgcctcaaactccactaggagtaaggaatgggacagggaagttagctataggggcttttctctatctttttgtatttttctgtctctgggaaatttctactaaagtccttgaagtgagtggcttcagggttcaaatcactgttttctaacttgtgtatattgtaaattatccagctgggacactatcctggtgagttttgcccataggccttagccttgtcaaaagcacttttaccagcgagagctgggaagagatgattcggcctgtgggaaagacttgaagagagcatcagagcctgcacactgatgccagcgtattaagctgaagtgtctgctcttggaactgacccaaaaaactggcctccctgtactcactggctggcaggaagagagc

SEQ ID NO: 134343 - DNA, 1063 bp, Homo sapiens
tcttacttttaatccttagaccacacctctgttcattttcactggtccacaaaactttatgattctgttttctcttttttcttctctgagttttaaatgtcaccttaaaaattaattttaaaaatacatgttcattagagaaagtttggaaatgaaagaagaaatacagtcattcataatcttgttatctaaacgccactgttgttaacatttcatatatttcctttcagtcattttctctgtaattatttttaatagttgtaattctaatgcaattgaatatatatatttagcctttgtatttacttttatttttatgttattataaactccaagaatttattttaattgaataaaataaatcatcaataggatatgcccagatttacttaatcttttccttatggttgtaaatttaggttatttcatacctttttcaagcataaatgatgtatatttctaagtaaaactttatatttattaaaggatatcttcttattactctttgaaatggagttactgggttggaaacatgagcatttctaagtctattgttcttaaaagcaaaatggctttctgaattgatcttaccagtgtatatatgtccaacaatttaagcctgcccacttcacactcttagttcttaaaatgtaattaatttaacaggtaatatatggcgaaggtaaatcacactttaacttaatttggtcatggtgatctgtgttgtatttcagtggcataaaattaattttaaaagtagtgcttatttttactgagaggcagtctttattgaagaatattggagataaacacacacactgtaccccctaaacccccatgtttacatatacagctctcttccttagagaaatgacttatttttacccatttctgtgctattgactagataaggaaatggagttctatgctgaggtttatgaactggtccaaaaatatatatatgtgggatgagaatgtgtatagttagcaaggaagtacagaatagaatagcacaacagagcttgcactgaatgactttgtgattaaaaagccactaatagat

SEQ ID NO: 134344 - DNA, 1614 bp, Homo sapiens
aagagtttcaactccaaaggagtactgtggttgtggcaggttgttggtctgtgaggttcgttcatagaacatgaagcttgagatgcgcttctctagcatgagttaactgagttatcttgtttccaccctggccttatacccttctcccctctttttcctgttctatttcttgtcaccatcctcttccaggtgagcatgcctacaagtgttcttggtgctcattctccaccatgacaatcagccagctgaaggaacactccctcaaggtccacggaaaagccctgaccctccccaggccacggatcgtcagtctcctctcctcacactcccaccactcctcccaaaaagctaccccggctgaagaagtggaagactccaatggtaaaaatgggcttccaagctggaattaaccactcagggttgaggtgggctgggattcattgccaatcattttttttagaggaaaatcttatgtgaaaacatgatggttcaagtgaaggaagaaatatgaaaaagttgaaatggtgtggaagttggagtgggaaggggaaatgaacttgttgagcatctgtgtgacgccatgatgaaaatggaattcagtgctcatgggagtgttgctagtggaaagagcctgtcaagtgggatggattagttttggatcgttccactgtggtttcaagcaagaaagcgaatacagtaccaggccaatttgtttgtttttatttatatcctgtcttgttctaaaaatatgtgctgcgaaatgtttggggagacaggtatgtacattaatgacacaaaattcagagtaggagtgcaaagggtgaatgagtggggaagtgtgtctgactgagccacgtgataccttaggggtgacatagggatttcttacagctaaaggatgctaaggaggcatgagttgggaggagagttttactgtttagttttggagtttcagaagaaatacaggaagccagggagagggtctcctcgctagcaatgtgaccaaagctgtaggggagagaaagagtccagaccttagggcctgcagatatggcatagtaagcaaagggatagtttattgtttttataagaccaggaagcagacctgcttgatttctcatctcacctcaaatgattgcagaatcagctgcttagaagagaaggagaggaagtctgcagattcttcgaggtagacctgctctcttccaaccccttctaattcttgaatcccttctgcgggagccagttagctaccatcagcttgagtacttcccaggtcaaggaatgactgtctcccaagatctactgttacattcttgggaggagcttagtggactggaaagaaagcagaacaaaagcttgggtttgaatctcacttctctcgatgatggtcacgtttccctgggcaatcttagcttcttgtagccgtatgtaaaattgtatagtgatatctgcctcaactgattatcttcagagattaatgagaaaagatacgcacctgtaaaatacctaatacagcctctgacacatagtaggaatttaataaaaggccgttttatttctgtacttttcatcctttggttgcaattctggcctttgggaccatttataaca

SEQ ID NO: 134345 - DNA, 1073 bp, Homo sapiens
aggacttctgtttaacaaagaaggcttgttatgatggctacgacttgtaatgaagtgaccacacaatctccttagctactgtgtagtagtttaaaatggggaaggaagcctgtagtgttttttttttctcttctgggaaaattcagagtcacacatctagggctgggtgagagtacctgtggaagggtaaagaaaatgtccccttttcacctgaaatcttctattcaccaggaaaggttggtatattgcaaccagaagggcaaaatctaacttgactcaaattgtaggatctgtattaatgtgatttttaattaattgttttcatctgacatggaagctacatttgtggagctgtttggatgaaacagattcatctcagtgccattgctagcaaaggcttttgctgggacatttttctcaatgtcataccttctttttcctttgtctgtcttccttgaaaggtgggtctcagtcagaggtcaagggaatcctttaaacccacccactgcatgtatcatcatcctctgcatagactgagaagagttgagttcagttatactcttgagcctgtactctcttctgagggctgtactatgcacggaagaatcagaaatgagtatagtatttttctggccctccgacaacttaaaatcaactgtttagatgatactattagcgcttacatttgagctaaccataaccctaagcctcaggcctaatctatttgtggagtgatttcagattcttggaggatggactgtggggaggagtgggtgtcacagaaatatgacaaagtgacgttgagtagctctctctataacatagatattctgtttttgtttagccacagggaaataatttgcaatatataaaagggattcttacttttatccttatgacagaacacagtaactgaaagctctgtgtggtaactatttagtgatccgtacacaaaagtcattgggcctgtactgtttttaatgtatataaatgacctatatcaatggatcagcagtgattaatttgatgacataaaagctgattagatgaggtaaacaaaaagaaggctattc

SEQ ID NO: 134346 - DNA, 1048 bp, Homo sapiens
atgtttcaccagcacacgaatcctctatatattcatgatgatcagttgttggaaagaaaagcaacggctctatggtattggttttgtgtataagataatgggcaatgacatgtaattgctattctaaacaatgcattaagaggaaacaataaggttgtcaacaaagggaaatgctctgctgtgtttgtgtttactgtgttccttctcctgccatatacaacacaggactagcttttatccggctatttccaagtctctgctttcagtacagaaaaatacacatataggcacagctgtaaaataacaaagaaactaggacagcgtagtttagctatgagatttgttttaggtctgagaagctacacaggacatgggcaatggatacgtaacttaaaattcaactatgtgttttataagaagtcaagccagtggtgacattccatctttttcctccctctagtttctcccggggactaataagttattttgtttcatctatctatgcagttatgctatggaattgcctgctttagaaaatagttactatgatgcatttaggacaaaaacaaaaatcagaccaggtgcaaaatgaataaggtgaatgatggtaacatagttttgttttgcgcgcgcgtgtgtgtgtgtgtgtgtgtgtgtgtgtgtgtgtttgctggtgccttagttagcaacccagagaaaacagaaagaacacttggttgtgatacccctccatttataatatagaacttgatatagtcctcccaaaagagaagtctgtgatattgtgaattaatagaaaaatgttgcaaggagcttggcaatttccttttgtaccgatttttaaataaatttcaattggtttttctgctctaaactctagaataatatttgacaaacactatttttatcaagacatttctcatcaaggaaccacatgtacttattgtctgtcatatcaaagtcttcagcattgcatccaaagttcaccatttagtcatgctttctccattgcacagtggcttcactagcaaatactgacattcctacc

SEQ ID NO: 134347 - DNA, 1130 bp, Homo sapiens
atatttgtgcatgaattacatttaagcttaaaaggaaacccttctctaagaattatgttgagtctatcaactcatttaaccttggctgcagcaatgcttgacaactaaaaaattaagatctgggatgctttatttttgaagagaagcttttcagatatctaaataggtcagacataaaattcagcctttaagaggatccagttagttgctagggcatcagcccttccacacaggttccaattgcaatcagattaaaagaaaaaatgaggtggtttctttaaaaacgacaatcatgaaatggagactcccaagtgaataattaattgtaaaatacaaaaatttacatcgtttatagcacatgcgatgtaagacataattttaatggcttgactataatttttaataggttctgctggtctcaaaattatctgaccagatactaactaaccttctctttttgacatcagaatttctccatcaaaatgtggcctaaagttcattttaacacttactatgtttctatatttctactgtaaagacttaagaggtctgcaacttcagtggagcaaagtggcattgaagaccccgaatcttctgttattacctggaaatctacagggattaaatgttaagactctgcctcagtggcaaagagcaaccctccaatattatcaccactctgaactcaaaggtcacgtgatacacgcttcccaagataccaacctgcctgggatttctgtgactttgaattagccatagttttgtggctgctatcatcctttgtgccagagatgaaaacatttcaagtataggctttccatgtcctgggaacttagtcaactaattcatctccctgttcccatgccaacaaaaacattgttcatcagaaatgtaaccatatactactaaacttattcagaactagttcccagcaacactggagtttgcttcataattccacatctgactttcaaatctctgggtgaactgcttggagattacttcaagtcttccagacctcatttgtggaaagtatctaaaagagaagaaatctactttattctttagcagaaaaatatgtcagtcattagctgaatcatctaaagcaattaatctcagttattttttaa

SEQ ID NO: 134348 - DNA, 1971 bp, Homo sapiens
aatttttaccttctgatgacaaaagtaataccaactcgtgactaacgaacagctttatggcaatacataataaaatgtaagggtcacccatcatgccagcctctccctacccagaataatctctattcacagtttgttgaagtcatctagatatttgttctatgagtatacaaacataggttgtcatttagtttagttttttttttttcttcaaaactgaaccgtactacacaaactatttttctttcatgtgtttttgctctcactatataggttccatcaccacatgacttactatagctttgaaatataaggattcatatcgcaaaaataattccttttcaaataataaatattgagtacttaaaggtttcaaatatatttttatgtataataaattatatgtatattatatttaaggtgggattctcagagttatagaaggcctttgagattttgccaatcaaaaattcattaattttatcttaaggctcactcacctcctcaaaaattactcaagtagagtctgtttccccactacttacttgagacttaatacatttacagtattggtgaacagttcttaaaagacaaaaatcaagattacagactgcctagactgttcagagtaatgggctagaaataagactttgtgaaaggataaatacaaaataagttgggtagctgatgacccttggcatttatttccattcctggacttgccaaatattcttataattattagctaccttacctgtgtctccagctaaactgtgtgctctccgaggtcagggaccatttcctattcatttctagagccctagcactgggtaggccattcaatagatatttcttaaattgttttgaattaggacagcaaaagcaaccgcacacaaggaaagccaagagaacaatttatgtgtgaacaagcctgggaatctggaaaaagccaatggaatctggctgtgtgtatagcaagatgtgccatcccatgttactgcacttttcatgcatcattcccttgtccttgagttaactaacttctcccttcctcccaccccagtggcaacaccatagccctttcaactttctgcaaatgaagcaactaattcctttttttccaagcagccacggagacaagtgggtaccttccttactttctgccacctcttcagagtacttctacttcctttgtttaatgatcctttttcaaatgcctgcttcctgcttattttcttcctctcttttggagtattcttttgtcttcctctatgaactcagtgactggctcacagccttgctttccaatccaaatgtaatcttcatgctctggaattacaatagactagactcaatggtaataactcaacagacacttcagtcgcctaagctagggaaatttgtctccttcctgactgtcctccagctgcccacctgtggccaaattcaccataacagctccgtctccagcacctcaaatttgcctttactctgaccactgtgggtggatctccttccccatccaacctagacctgaccagagggttagccgtttcaaaggggctttctccagcatcctggtttctctcgtcccctcgtcctctggtttccaacttaccagactccaaccctgaataaccttcactcctgcccttcctctgatgttagccagtctttctgattctaacctccatcttttccaatctgttttccaggatatctttgttaatcacaaatcaaatttacttttcaaaataaatttgagctgagtcagacttatccctatgtaatgtcagtttacacctaagtatttcaaggtattttcttaagtgaaagagacaggaatagagccacaaccaatgtgctagaagttgcaaatagctgcagtctatcttacttgtcccaaactaaatggagtgagcagctgtgtggttagtagctgtggcaatcacaaattattgtccttgtgag

SEQ ID NO: 134349 - DNA, 1437 bp, Homo sapiens
ggcttggtggcgagcgcctgtaattccagccactccggaggctgaggtgggagaattgcttgaacccaggagacagaggttgcagtgagccgagatcacaccactgcactccagcctgggcaacagagtgaaactccatctcaaaaaaaaaaaaatttaagttcaaggtttaagtaaaatattgataagatttgctttttctgttttaaaatgaaagctttttagttactttttgaatagcttcattattatgtgcctctacccctataacttaacaaaaaggtacatagtacttttcactgtacttctttctcttctgattttttggggtattttctaaatcacggcatgcctaggagagaacgttgagtaaatagatatcatccactatgtgttgccaagagcagaataagagttggagaacttgaggtcggagaagtaattctgtgcaagtgtaggtttaagatttatttatttatttattatctttttccaaattgagagaaagcaaaaaacaagggtaagaaagaagctttcaaaactatactgtgctgcacacgttggtggttgtttttatattaattatcataatcccaatgaacagaggtgactctactgggactggccatataaagccactgttaataaagtactgagagcagcccagccgcacagcactagcccaggcagagcagctttcactgtgctcctgggcttcctgtatccaaaaggggaaggagggttgttgacagcaacggatctgcaacatttgagggtaccataagcctgtccaagttccaccccaggccttcttgcttgcctcagccccaatccggcactctcaccctggggaagcatccagatgttccatggaacctcttctccaagtcataacagtgttgtgtttttttttttttttccagtggaattttggagtcgcggtgctgtagcggcatcaagtgtgactctttcggtgtattgctgggctcattttgattgagcacataccaggagggattgttttcacccaactggagctagtgaacattaggggcaaatgatctttttgaacccacttctccgtatagatcatctttacttaatggtgtacagatcacacgggagatgctggaaccatgagtttgagatttggcttgaaagctgctgcaggctcaagtccaggaagtaccattcacattgttgttaatgaaatgtacagccttaggtagaggtcctgtctagctccctatcacacatgcatgtccttagttaaagcatttaccctctctgagccttggagtttctaatatgcaaaataatgatgccgactttatggggttatttcaaggatcaaatgagataacacaatggaagtactttcatattctaaattactgtagaaatagtagctattattaaaatactatagtagaagca

SEQ ID NO: 134350 - DNA, 1035 bp, Homo sapiens
actgattgagtactttgtaaacattgtttcattttatttaagccatacaacaatcccatgagacaggaacctccatgactagctccttgctgtttaggaaggaggaaaataggcttaagcaagttaagtggtgtgccctgggtcatagttaaatccagcagagttgaggttagggggcacatcagcctgactccaaagtctgtttactgtgccactgcttccctaagcctcagttcttagatgtactgtttttccccaggcaaatcttaaaaaggttatacatgaaccccaggaaagtgctctgtgtttgaaatattaaaaccattcttggatgtgaccttctgcgatcttatcttccaaatctcttggaaggaaaaaaccaataatcccaacttctactttctcaccactcactctttgcttttcgtaaactgctagactcagtgttctgccttcagcattttattgaaaccactttcatgaagtgatctaatacgggctaactgcagtggcattttctctgggaaggagtcattccttcttgctgtttacacctgctgcctccttggctccccctccctctctctggaattccttgcagcatgaccttgatccctatgactataatgaaatagctttcacaaggatcatcagtgacttcagacaaacaaggtcacggcctctgctcttgcctcatccttctttttttgtctgtggcatttaaaactgctgaccttcctcctggggaaattctcttcccttggttttggtcttgctatgtgtttcaggctctcctccagcctctctgatcatgccttccctttaccttgtttttgccatgtttctcctgctccccttacatgtacttggttctcgtcctcagttctctttgcactctctctctctctttacagatatatgaagtcaacttgccctcttctgatgccaccaatacttccagtgctaacctctcatgttaagtctgagaccctctgttctaactgctccctaccttctccacctgcgggtctcatt

SEQ ID NO: 134351 - DNA, 1045 bp, Homo sapiens
ttccatcatcactagggaatgtgctgccagttggtttttctcacagtgggaatgcatttctaccaagcctcctttcccatctgagaggtcaggactgtgggtacaatttacagacacagtaaaggtaaaactgggaggccactatctcacctgctccctgcttaaagcccttccgtggctgtctacgttgccttcagaataaattctgagcttagcatggaaagctgttcattgggccctgcatttctcactgggatcattcctcaccacttcttcccttgcactgtagctacactgaataccctgtctttaaaagggtcctactatctcacactttagcccttgctattccttcttcctggaatccctttctccacttattttctcttcaaattattttgtagatctatagtgggaagaaagcacctctcagcacagagcctaagatttctcaaaatgagtagtaagcaaacacccctaaagagtaacccatacttagctgtgccagaagttcctaaggaagctgagatgcccttatcaatcatgaaataaaatccaaacatccatgcacactaagaaattcgcgataacattcctcgtgggtagcagggagaaccagacagtcaaccaatacatccactgtagatgacgtggcaagaagtgctatcaagagaaagaaagccatggtgaagggtagaaaggatgggagttggagtgtcaggtaaggtggttggggagggcatcattgatgacaggaatgattgaggccaagcctatcaattggatgccaagaaccttgctcaaagctgcaggtaatcttgaagaatattgaaaaggaaatagaccccagaatcattgccaggaaagcctgtccagtttgggaattgaatttgccctgagatgactttttgaagcaagttgatttgtgaccattccatgtgcattgttaactaacaaaataggagtgaatcattctgtctgtggtattactcaggttgagccctgcctttgagctgaatccaagtcccacaatcaatcccctccc

SEQ ID NO: 134352 - DNA, 1463 bp, Homo sapiens
attcttgttcttgatcaaccatagcctttctcacctgatttccgtgtagcatcacttagagctctacgtgtatctaaatatatatatgcttatacccagatgtgctctttcctcttgattatcgaatcttttaagaaatctccacagttgttccctccgggctctcacagcactgttcatagcaagccatcaattgtgaccaactccttgaagtcagtaggcatcttccctccagtcaggtcttgaggaggaagcactgtggccttgcccacggcctgtgagctctaaataccatctgaggttgctcacaagctctctacggttgaggccaagtcatttatataaagaggcttttgtgctcaacactttttgttggattttttcagtgtggtaaagacatctatatgatctaaacgaacagcaggaaaccttacttcctcatcacacaattcaaaagagtcacaggtgaattatgcattcggtattgtgagagcttctcaattaacaatggcagatgccacccagagtttcctccaaaaaacattagaaaaaggatccttcaccacacattcatttccctacaagtttcctgcctgtttcaaggagggtttttaagaacacacactttgaattacaaatatcatttaatgaagaaggaatagctacagtggcagaaaaaacaaacacacacatttttgggactgggcattcaggatccccaagttatgcttctgtttcttcattggttacctgggcaacataaacccatatctgcttttctgagccactacaagtctttaggcaaaatggatagtctgtatgctacatatctgggatgagtgcatttctaatggaggaaaataggtaaaacagtgtatacagtgaaaatatagttctaaacacctgaaggtaatccatgaataccttctcacagattgcaaagggctctatttgtatggtctcaggtgttgattgtttatcaaaaagctatgatgtatttaaatacatggtacccattacacctgagcatctcacaaacatcgatgcctactgatgggtgaaaaaaatgagggatagagagctgcatactgaataatctcaagtggcttccagatgtgctgatagcatgtgttttgagttttggcttatagctgatttaggggcaagactagaaattaatgcctttggtttcttgagacagccatggattctgaattacattgcattcaagttcttaaatgttcagaagccattgtccgtgtaattaaaaaagacccaggcttatttcagcaaacatggttcagtgtttcagtgggaagactcttaaacctcagtatccaaagagagagtagcatttggtcagttgcattttctttttaaatctgggttttccagaacagtattttcagtttgtactctttttttttttggatgtttgtagcatgtttgttgagcacttgctt

SEQ ID NO: 134353 - DNA, 1484 bp, Homo sapiens
atgcacacatggatacatgaatggatagatggatggatggcctaatttcaaagagatcatagtctggtaggggtaaaataaattaaccttaatacagcatgatatgtagtagtaggggagtctaaggggggaatttaatatgtgtatctagaagggtcaaggaaaatcttcgtggtgatggcagatttggactgagttcagttttgaaagatgagtaagagtttgtcagactgaaaagtataagaaggatattgcaagaatatacaacaatgcagggggaaaaggcataaaaagtgaatattagaagccttgtatgtgactggcattaagcacagcatggaaacagtgtgggcaagggagtgaggatcggcctggaaagatgaaggagagtgtgagccccatggttcagagtttgggcttttttctgtaagaaagtgagtgtcatgatcacatttgcattttagaaaagaaaggaatcatagggggagaagaaactggaaaatggaatgccagttaggaacatgttgcagtagaagttcacacagcaaccacgagggcctgaacaaaagccatggcagtgggctagtgagtggatcacagagatagagtttctcaggaggctgaaccaacagagcttttgactcattgaatgtgtggaatgaaagagagaaatgaatcaaggatttattctgatttcattgactgggtgaatgaatggtgatgtcattgacaaaaaatatagaaagacaaatgaatatgttcccaagtatacgatctagtgaattgaaaagtccaggaatcctccttggcctcaggtcagacctgcctggattcctcaaaaatataaagaaaaaacatgaggcttcacacaaaataaggtctttgagaaaccttttcagtgaatgtaagtatgatgggaaactagatctcaaaaaagagaaagcttgcccattttttgccatgtttgtatcattttgcaggctaatattttgttttgttttgttttctcaatctattccctgatcatatttcaaggttttgtttttactcatcagaatgacaggaagttttcagtgtgtgtttccttcaagtttggcctcaaccttattttcaggattaggcgtttgtttttccgtttgcctccatgacaacggagtccagaattcctatatatagtcatccagcatccattgtccccctggccattgtatcataatcttgtgcgtccaggccagagagctccactgatgacagtagacaaggaggtgccagagtccttggcctggagattttcaaggcataatcaaaagaaggaaataaaataatgtgactgcctttagaggcgtatgttcccccttagacactatggaatggaaatggtttgtattctaaagcttagtttcgaatataattttcttttggaatagcccatagataaagaacatttttgaggctcttcagaggaaatacttggaaagttgcat

SEQ ID NO: 134354 - DNA, 2180 bp, Homo sapiens
gttctccctcaacctcctcactttgggcatttacaatatcttaagttatccacagataatattctgtttctaatggcccatgctaccaaccattagttgctaaatagtctgcttttcagaagaaaattacaatccatgtattattttgaacttcctatgctattttagaacttggcgattttaaattgtcccttacacaacctaccccaccctctgatgtacatgtttttctgttcagactcatcatttctttaccctagggaaattaagtcattttttttcattgtgataataatgtagttgttgaatttctgtttagtttctccaaaatgtacgacttaaggtggaggtgtagtgagttgaacgtttaggtagctgcgtgtctagtgttgatttcattaattagcacactaattaatactagttatatttattaatggacactcatagttctcttgacatcccctctccatctctctcactcccacattctgtgaggcacaaagtgctgctgatttttccttccttcccctgcctgtttataaatacctctattaaaacattttgtttgcattgtatcacgatcaattatttacatctttgtctgagaaagtgagttgcttgaggtcaaggctcaagtcttactgtcccagaacagggtctcctatttacttaaatgctcagtaaatatttgctgaatgaatgggtgtaattgaatcatttgccccttggccacctctaaaatttgcttgcctaaaattccttgtcttttattttttcttggtacttgattcacactgaccaacaagcctgtcttccaagtctgcacaaaaatctagctcaaatataattaaatgtactcgctggcaccaaggtacttctgttccctttcaccttcactcatattctctatgcagggctgcagaaaattgagaattgatcctctggtatagcttcctctttgtatcacttagagcatgcaagggggctgtcctctgcggctcctacaatttgctgcccaattgactcttattcttccttgtgtcttccttaaacttacaatagctgaactctcctgttactgttcatttgttctctttgcctcttttattccttcaatcagtggagtaagtttactagacatggagaggcctgtattttcataagtcaactgctcaactgtctcccctaataaatatgagtttctagaaggcatctctcatgtcttctttgactttggatccccagagccagcacgtgacctggcactagcacaatgttaactaaatgttgtggaattggaactgtgaatactcaagaaagtctcattctctcaggcttatggtccatttatttgtcgtttgcctttataaagtcaaatttcttgtgattgtttcatttttttctctaagttttggagaaaaaaaggaaaaaaatcaaaacaactcaaactgttattctagagagctggaattagcaaaaaaaaaagtccaatttctccaggaacatgaaaaatgagagggttaggacatcccatttagaattcagcccttacctggtttgaaatcctgagctgttcaagagccacgaaaaagcacccatctctcatttgcatttgtgtatctttcttttcccagccaaaccccacttgaggaatgttagagtgttattatttgaggacaatttatcaagcatctaactaaagcatgacatttagacagataggtttccagttctgggtatttgcagggcttatcttcacaacatgcttctagaaatgtctcctgtgtggtcccttattttgtttatataagcattttgaaatttcagatattctttctctttttgagtcttgctttattttttttcataatgcttcaaaatgttagtgttttcttccctattcattttagtgttattttctgtctattctattatcatttgcatctgttctaatgttattttcttaactatttcaacctttctatcactttctctctttcctctctactatgtgtttattgctgaagcaacgttcatgttctttttggctcctctgatttgtatcacagaaccctagaggtcaccattgagaacagatgcctaagacacaagactcagactttataatcagacaggtctttgttcaaatcctacctctgcttcttcgtgtctatgtg

SEQ ID NO: 134355 - DNA, 2062 bp, Homo sapiens
tggtctctgggtggattgtggatggtagacagatcacaggccagcaggacctggctttggccttgctggttatagaatttctattctgcagagctaagagtgcaaactaggaccaacattaccaagaggacagaagctatctggggatcctggctggcagtgctcaacttacagctcaagcctgtgataacaggagaggtggagtgtgttttgtgcttcattgtgcatgtgtttcaagcagaaactagacttgagggcttaaatagaaaacatctcaaacaatccatgaaatggtaaacaaacctgctattgaatgagaagaatgaaaagttgacaattgcattattgtgatccagagtgggttcatcagctagggtagaggaataaagaaaaaggagataaaagaactgggtaaaatgaattcagttgtcattcctttcttcctttgtcttccatttacacctggtaatgaacctatggaggcttggagacattgttcaggtttccttttgttttatttttgtgtgtgtggcaggtttgtttacaatttccaaaggggtttttctcaatcttgaggaatatgaattgaggaggcggggaggagaacaagaaggggaagatatttgagtgttttgcagacaggcggtggcccagcaatcagggaggctgctctgcttttgttttcctgttcgaagaggctgacgggatggatggtgctggtttcatcaaatatgggttttagagaattcctccatgtcctgccttagggaattatgctttggaaaattaagtgtccatcaaatcaggaggaggcttgtacagtttctatcccctttcccccctgctttttgaaaggcttaagaaaagagccctttgttttcttttcaaggaaagttacactgaaattcatctgtgtggtattcatggacttcatttgtgtcattcataggcagctgtaggttatataggacaatgtttttgaatttctaacctccacattgcaagcagcatgttgggaaaaggttcaagaccttttacttttcctctcccccaacccctttatttatttatttttacttttttttctcttctttttttttaattcaaagaagaaacgctgagatttcccctcctccctcctagatcagatttctccaccgcatgccattgaagcttctcggggttaagatttgtgcctgtcatttccgacattttcctcagaatcgcaaactttaaaatacctttcagggaaacttgtttggaatttcattttaatgggatttatgaataaatctccatcttaatgctgactaagctttaaacatccattccaggagaacgctattggatttttatattttaaaatttaaatcacttgagtgtgaaggcataaaacatttttatatttgtgtgagtgccttgtgcttgagcatttctgttaaagactgattttttttttaaatttggttgcttgaataaatctgggctgcaaaggaggagatgttgcatcatgtcctttcctttctcgtgtagacgcctgtgtacattatgcaggtttattttctcacctacagggaagggtattctgtggcaacctgttgccatgctgcgatttcctttaaaaaaaaaaacaacaacaacaaaataaaacaaaaaaacggtttactttcttcctacactttgaaacctttaacctcaaaattttatttttaaataccatgagccctcaaagtcagattaaaagaggtgatagttcctcccggcatgcattccccaaatctgtgttgtagaatgtaaatgaagataaaagatggaatcataatcatccctcttaaaaaaaaaaaaaaaagaactctcaaaactaacattggtcaaaagatgcaaacattccgttataaaattagtaagttctagggatccaatgtgcagcatagtgactataatttataatacttgaaatttgtgtggtgtacttgaaatttgctgggggagtaggtcttaggtgtgttccctgcacattacaaatggtaactgtgaggtgatggatacgttcattaaattg

SEQ ID NO: 134356 - DNA, 1053 bp, Homo sapiens
actcatcatattcagagcccccagatgttcagcagcagttgaaccactatcagtcagctgccctggcaaggaacaacagccgtgttagccctgtgcctctttctggggctgctgctggcactgagcagaaaactgaagccgtgcttcactgcgaattctgtgaattctcctccggctacatccagagcatcaggcgtcattaccgggacaagcatggtgggaagaagcttttcaagtgcaaagactgctccttttacacaggctttaagtaagtgacgtaatgaacagctatggaaaacaaggcggccgcccctgctccacccctcactgcaggcttcccttacactttcctacttggagcttatgggaggccctgcccatgtgatgatgtaggggttgggtccaggcttcatggaaggagggtagtttcagaagactgctttgggatttgggaagggatgaagagctatatcagaacaaatgagttttaaaattggagcaaatgggctctcaagtagtgtaagattgaagcaaatgatttcctcccatgcgtggagtggtgtttcccttcagagaactgtctcctctcctttttttagctttggaaaaaaaagtatgttcttggaagcaaagtcaaagtcaagagaaaacatccggcagtagtgtcttccctgctcccctgatagaaaattctttaattcttaagatcgtagtattgaaagacacatagagaatcaagaccctggcacttccaacactacacttgagcaatcatagggagattgctccagtctagaaaaagagaatccatagtcacccttgcccctgtggatgacagaattgatggactcaattattaagaatggaatgcttcctatgatgtaatctaagcttctgcatttgaatctcatcctgtgagatagcgtttaggttagtggttacaagtgtagagtgtggagcctgactacctgggtgattctggacaagtcactaagacactatctgtgtccctattttgttaacctataaaataaagataataatagtacctac

SEQ ID NO: 134357 - DNA, 1653 bp, Homo sapiens
ccccttacctgtgaagaattatacaggcagtttctaagtcaacctagctttaaaatagtctctctcctcccaagcatgatgaaaaatagttccttttttgggattttgttttgatactcttaacagacaatttttaagaataaggtgtttggggaatttgtttcttttcaaactaagctctgaacccagcccagggcacagtttccagaaagaagttactaccatttgacagtgttcagattcggttgagtgaccaagtttctgggtggtcaacaaacatgatgaacagatttttttttagccccacaagcaggagagccgcacttggacatatataacgggtttgccagcaggaaatgtgaaaatgcaatgatccctggttacacgcatcacctctcctcccaaactctctcctagatctgcttttactatgcacgtggaagctgggcactcagcagttcccgaggagggccccaaagatcttcgctgtcctctctgcctctatcacaccaaatacaagcgcaacatgattgaccacatcgtgctgcaccgaggtaacctttctaacttggttttcttggatgcagcggggggcaggcagcagagatggccttctagggatgctctctcagagtggcagtagcacctgtgccttgttcctcaccttatcttcaggcaagaaaccacagtgataaccacagtgacagccaaaagggcaaaaacaccttcctgctgggagtatttcctccacctggagggaggcaaaggtgatggattctgcagtgaacatttccgtagggcttcccagcatgggggatttgtacattctgacaattctgccacccacagccttgcgtagactgcatagaaggaatgaacaagaaacaaaatgggtgggtgaaagcaaatgtgaaatgtggagagctctatggctgtgagagattctttcaagaagaccaaaatgatttccaaagcagaacatggaacttcccttgaaatggttgaagggagagagaattctttaaaataatgtatattatacattctaataatagtctctattatatattctaataataattagaaaatccatgggctttggatttaaattctggttttagagcccactgtgtttaacctctccatccattaaaagagatgattgtacctatgagataatgggtaaagtgtccagtggtttttcataatggatgcataatgactgctcaataaatgttggttcctgctgataaacagtgatacttcttttaagtccacttcggtctttctttgagttgcatttacccttggccaattaaaacactgttaaacaacagccttcctctgcattggaaggaaaaatatgtagaatctgtttcgtcctgaaaagattcaagctacaggtggatagaaaaagattactggagtactcattgccagtcttgattggtgtttctactgatctttccatctacttcattctttctctccatcccttcttttcatcctcttccctcctatcttcattccttcgcctctgaccttagaaagccttccaatatttgtcacatatgcctcaaaagcaatgagtgtcatctgttgtcttgctgggatgtcactcactctgaaatgctgagtatttgggggccattg

SEQ ID NO: 134358 - DNA, 1129 bp, Homo sapiens
actctcatgtttgtctccatcttcatatgggctttttctctatgtgtatctctttgtgccctcttttcttcttataagaacactagtcattgggtttagggcacaccctaatctagtctggccttaactgattgccatctgcaaagaacctatgtcccaataaagtctggggttccaggtagacttaagtttatgggggacactcttcaacccactacacgagggaagagacaatttaataaaccactgaggtcggtggaagcaagacatgtttgcagaatgttattagacatttccggggtcctgaagagaataggaagcataccagagaagtatgttctggccaaagtatgaagcgcctggatactaatatagaagttggaactttagtcagtagacagatgggaagccaggacaaattctgatcaggttactgatgagacacttattgaatactaatttagcaaaggttgaagcaaaggattggtagacccatctcattcaggaactgtgaacttaggtcagatcaacgtttggtgagattgaccatgatttgatgagtttaactagggaaaaattaagccctgaacttctctttcaaggatgaagtcagtggtaggacttttggtaggttttcattcatgcaacaaatatttattgaacacccactatatgccagccttattttgtttttggctttttgaaggagactttttattatttttatatacagaaaactgaacagtgtacatttaacccagtttagtggcaagtcttttagcttctgcctcttacagcttggcaacacaagccacagattttggaccaaggaccttgcctcctcagtgatgtgggatctcatcatatctgtcattataattggtcctgatggcttctaccagcttagccaaagcgcctttgtcttccaagttaatgtgtgtgaaggcaacagtagtgcagatctccctgtggactagacaccccaatttggccatctccttgataatacaataggggactcccttcttaggactcagggcaagcgggaagacagccagctccatgggatccacatcatgtgcagtcaccatcggctgagctttcttgttctctactgaggtggtaagag

SEQ ID NO: 134359 - DNA, 2369 bp, Homo sapiens
gagtcattctgagctgcttatagggtagccctttactactatagccagaagtagtgggaatatttgacaaaaggactaaggtccctttggggctggaggtcctgtcttatgccaacattcttaagccttttctcgaacaggggattcaccaccctcttggcctcctactttttaatgacagcaggagccaaggccgtcttcttccccttggcctttttttcttttgacatcttgggcagctggaggagaaagctctagcattgttttaagctgtagggatacagccatgaagagtcaggcaaggtttctgcactgaaggaatttgaacttgaacgagaagagagactaaaaaacaggtgaataatagttttatgagggtattcctattgagttgatcaccattggaagcacaatgtttcatgcttagctttgcccatgtatatgtatcttgcacatccatagtgagccttaaaaactggccacagattttagggatgaaacacagttttgccacatatttacattgtaattttggaaccatgtaatcactgctatgggtctttaattggcatattaacttaaagtttctgtttcccaatacatagacaaatgccgcatttaactgaaccttgcaagtgggagccttgggaacggaaataatctcccctaatttatctgatcagtgtcatttttcttgagaataaagtctacagtgagattgccaatctttaattttattcagtgaaattacatgtttcctttcaacttctccaaatacctttgcctgatagaattagaggtgccatttccagttccttctagcttgaggatggcagcctggctaacatcaaaacctcatacttcctaccaggaactgttttgcttgtgtttatgtttgtctatttatggctatgttttgggatgatttatataaaaataatgttattttcttcatagctttctctaatactcagactttgtcacttctttgctttggtgcaaagagggactcagtcctctagagtggcaatttgcacgcaaagttttggtggagtgaagaacttccaatctcattgcttcatgtagacttggcatgttctgggaaggaaacccacctatgttgtggtgtgcctttcaggaaggatttttgctagttgaatctgggctctgcagtggtgtggtttctcgccaatttgagcagaagtgaaccctctgtattgcagctgtgcagaattttccactgacctccatggaggcttgaaagcatgctattctcagctcttgttgcaccttagtacacatgtgcttcaatgtgacattactctcgggcccaacctcttcggttttatgtcctgctgcagcaccaagcatcttttgagtaggaggagatgagagacacaatccatcttgtagttgaactggtgaagtcataatatttttgcagccagtgctagaagctgagtcacaatgagtgtgattcaggccttgagttttcacccaaggtaattttgagaggtgtgaagtcaaaaagacccacagttgtcactgcccccatagaaaaagccctgagcactgagcttctgtaaccaaggcagagcccagtctatacctggaaccattccagtttttaacttttatgtctttcatttgcctcaagaatgaatgacctcattcagaaaacactgtcagtcatttgcccaccttttaaagtctgtctttttttatttttatcttggtcatgttaaccatgtttttagaaaggggaaaaagctaactttttttctaaaattaatatctcagtaaaaactcacataattaagagatttggtagactggcattgtcttagtttggaaatgggaagttctagatttcagatttaagttcagcagggatttgaccctttcctcaaatgtagaaggtgcttgaaagacattcagatataaagggttaccttagaaatctgtagcttttgcattttttaaatattatgaatgaaaggcttataagcacacacatacagactggagagttcttatcaggggtccaagaggagggccctggcagagatcagaagacctgtgttcccaggtcacagctttgtgctgaaccagaggtgtgactttgaggaagtagcttaattgatcagttctcggtttccacatcaacaaactgaagaaaatagaactgactttgcagggtgttatgagaacaaaaagttatgtcaagggtagaacacctaacggtgcttgaaccgtagcgagcacttaatagtctgcagtggtgttcacatgaataattacttgaacttcagggtgttattctgactattcatgactttgtgtaaaattcacttagacacacatagtga

SEQ ID NO: 134360 - DNA, 1048 bp, Homo sapiens
ctaatggttgttgtcagtaatcattaatgttggtaaaaattgcagctacttctattcctcccccttgccttaatcacctccattcaggaattagcaagcacctactagcccaccccacctctatttataggtcattctgggtattaagtacacaaagagcttttggtcttaaaaacacccactcattcctgaggaatatgttgtttgggggttaggggaggggcagggtgcatgtgtgtcagttcaaggaaccagatccacgaggagcagcaagattgggtgagtttcttcttgtattccaaagaaagaacttctgttttgccatcagtaaaaattcccatctttccattcaatttgtttccacagaagagcgtgttgtccccattgaagtttgccggtccaaactgtccaaatacttgcagggagtagttttccgctgtgataagtgtaccttcacctgctccagtgatgagagcctccagcaacatatagaaaagcacaatgaactgaaaccttacaaatgccagctctgctactatgagaccaagcacacggaggaactggacagccaccttcgggatgagcataaggtacttaccaggacttcctgctcccgcctcagcacacttgtggggaggggccaagggggagacaccactgcatttagtcacgaccactgtgtaccagatggagatgtggactcaaagagcttttaaagtgaggtctagtttcttctattagaaacgtaaggtcatttttaaaaattgcgaaacacaggttgggtggaagggaaatcacccataattctaccacactagtccaaatgctgaacatttctggtctgttctctagacccactttcatttgttttacgtaattgtgattatactatacataaaacatgataccttacattttttaaagcttattctaaaagaagtattttgctatgttatttgaaatgttaatacattttaaatgacagggtttggcagtttctataaaggaccggagagcaaatattttagcctttgcaggcctaaaatgt

SEQ ID NO: 134361 - DNA, 1075 bp, Homo sapiens
ttcaaacttcctgggcatttcttccccaaacttaagggtaaattactcatctttttcaaacaaagctttctataattattcacatgtatcttatttacgtaactacctcagacctttttattacagtgtttaagcctccgggctgatattttcagacagaacaaatcagaaagaagattcttctctagttgttgcacggtagcttgcaaatcactgaggaaatccagaaaatgttagaaaccatagaaccagagggttcctcagcagtgggcggaaggctgaggctttgaggtatggatcatggaaatgagttgctcaggaacatagggcccaattaagagcttttgaaccaaaaagatctgggttttaatcttgtctccaccatttactgtgcatatttcaacaaattacttaaatttctgggtctgttttccagttcgtaaatgggaattgttatacctttctcagaagttttgtaagattaaatgaagtcctgtatctcctccactttgagacccaatacattccttagagtatttgttaattgaattgtgttcaaatataataatagatgtacctatcataatggcagctgtgttcccaaagacctaaaacatattacaaaaccactaattatactttgcatcttagacacggtcttttttaaaaattatttttccattgagtattgcgatacaagtggcatttggttacatgagtaatttctttagtggtgatttgtgagattttggtgcacccatcaccccagcagtatacactgcaccctatttgtagtcttttatcccttgcccccctccacccttcctcccaagtccccaaagtccattgtattattcttaggctttttttcctgatagcttagctcccacatatcagtgagaacataccatgtttggttttccatccctgagttacttcacttagaatactagtctccagtttcatccaggtcgctgcacatgccattaatacattcctttttatggctgagtagtattccatcatagatagatagatagatagatagatagatagatagatagatagatagata

SEQ ID NO: 134362 - DNA, 1073 bp, Homo sapiens
aagggctttaaccaaaatatttaaagaaatcttacaactcaacaataagaagataagcaattcagttaaaaatgagcacaagatttgaatagacaccttaccaaagaagatatacaaatggcaaataagcacatgaaaaaatgttcagcttgattcaccacttgggaaatataaattaagacaataataagattttactccccaaccactagctagcatggctaaaattaagaaggctgatagtatcaaagtgttggcaagtatgtagacaaactggaatctcatacattgctgattggaatgtaaaataccatagccacttcggagcagtttggcatttgtttataagttaaacgtacacttgccatctgacctatcctaccttcacataaaatggatggataaataaaatacggcgtatccatgcaatggagtactattcagcgatgaaaaagaatgagctattgatacatttaacagcattgaggaatccaaaaaatgttacgtggacagaagctagacacaagagactacgtattttatgattctgtttatatgaaatttctagaaaaggcaacatgatagagacaggaagcagctaagaggttacttgggcctggaagatgggagcagggattgattacaaaggatatgaaggagcttctcagagtgatgagagtgttcttaaacatcattgagttgtttacttataatagataaattttatggtaggtaaattatacctcaatacctaaaacagatgcaagtttcccataacccaacacacagtaggtcttcaataaatgttaatttcctgtagtctttttatgacgttcatcctgagaacagttatatcaacaagatactcaagatccggattaatgtggaatagacttagcaattggttccaaacagggattcactttttttcccagtaaaacagtgcattgctcattatattcttctacaaatagcattaggtgatttgtgtggtggggagaatctacagaataaactataagacacgtagaatgtattttcagttaaaggatttcattaaaaagaactgaaca

SEQ ID NO: 134363 - DNA, 1071 bp, Homo sapiens
ccttggcttcccaaagtacaggaattgcaggtgtgagccactgtgcccagcctaagacaacatctttaggaaccttaaagtcatgaagaaaaacaaaccttgcacttctcacatttaaaaaatacacacactgtttttaaaagaaagtttatatgcaataccttgttagtgttctttatggttctgaactctctttgctagtttaaggaacataaaaatatattatctctaacttggtccgctcgtaaaattgtcatgttcagtatattaaatttagaaggatagtctattcaggcaatacacattcactaattgaatttactttgaaatgtttttaattttttatataaatggagccttaagcagttgaactcttaagaaactcatatcttactttttgccagtttggggaaaacagcaaaacattaagctcagaaggaatcatcaactttttagttattctaataaaattgctgagttttttggactagtgaaatccacagtggccaaaaaagtcacttaggacatttgtttccagaaaaggaaatgagaaataaacgaagaatctttctccaaagattcttcccaaataaatcataagaagaatttttcccaaatcataaaacacacctttggccacatttttttttggattgctttttatttctgaactaaatgctagcagctttagctttatcaacagcaatgatttctgcaagctgaaggcttctctagaagactatgccatttcgtttctgctttccctcatgcagttctgcttcttggtttgttaactatagctctgtctcttccgtgtgttgtagaagacagagaaaccagaattagatgagcaagaggtgtgaccgtttttcagaggggtgtgtctggcaaaaccttaaacagtatttctcaaatagacatttgaagatgttctttacctgtgccttcgaaaccatccactaaactccccagtcaaaattctttgtcccagattcaaagcttccatagaacttttctctttcctttcttaaggcagatttatttatctcacctttctttcaaaatctaacc

SEQ ID NO: 134364 - DNA, 1100 bp, Homo sapiens
ccattttgctgaatagttaaaagccaacaaatagacaagtgtggaagtggttttgcagtgtcctcacttcattgttaaaggataaaacatttgacacctcatctcacttttatttttatttatttatttattttttgagatggagtcttgctctgtcacccaggctggagtgcagtggcatgatcttggctcactgcaacctccacttcccaggtttaagcaattctcctgcctcagcctcccaagtagctgggattacaggtacccgcccaccacacctggctaatttttgtatttttagtagagacggggtttcaccatgttggccaggctggtctcaaactcctgacctcaagtgatcgactcatctcagcctcccaaagtgctgggattacaggcgtgagtcaccgcacccagccctcatctcacattctcattagacagatgacttcaccaaactctgggttagtggccttcacaggggaccttgagtgaatgggcattcacagatagctttcacaggaataaagatctgcatataggtttctagtctgaattattatgtatctgaacaatccacccttcaagaacatatacggcttcttttgcctgcagaaagagcctggaaggagctgggttctaaatctcaaactcttaagcttgctccttctccctttgttgtgggcctttggggaaatgataataaactgcttctcatctttagaggaaacaagtgtgtttctctcaatatgtcatctgcatcatcaaggagttattcaaatacccaccaatctccgggcccaaaaagtagtgtaatcagttcaaaatatatgggaacttttataaagtctataccctttgactttgaccctgtaatttcacatctggaaatttagcctataaaattaaaactaagcatgaaagaaaggcttaaatacaataaggtttattactttttgtgacaaacatgtttaatagtggaaagccagaaatcatctaccgtaaattcatacgggaatgaatagtcaagtaaactatcatatgcctacttgatgaaatgctatgtagtgattaaaaattatgtttattcagagaatgat

SEQ ID NO: 134365 - DNA, 1074 bp, Homo sapiens
acattattcagtctcagtgtctaaggcctggtacgctgaggctctttacatttgtcacagtcgataatgatgttcccatctgccaggcacatggaattggtggcattcagcaaatctttgttccagtctggtcccaaagactattttggaattgtcttgtaaattatctctttcctctcctgtgtcctcatcatctagctgtgtcctcatcatctagctgtgccctactgtggcagctagggaagtcggcctcggaatctaattaatgatgtctgtcttccctcttcaactcaactgtgagcctctggaggccagaaccaggtctcattcatcttgtatgtcccctccccaggcctccaacaaggggagcataacaccttacatagaaggcgtagcccatggcaattttttgactttagccctgcaccagcttgtcatgcctgaacattctatgcatgcaactggagaggttctgaaaatcgattcatgatgaaggtaaattttgtgctgccattgatctgagaacccaaaatggaaaaatcattaaagacttttcttagtgtagatttttgttcccctccaatgatactttgaagaaagcttggattcccacattattctgaccacattttacatgaataaaaaccagccatagttaacacttttaaagagcttttaggggttagtcatctaggtttttctcagataatcccagccttgatacataggctgtggtcagcttcaaaaacagtagtaacactaacagtaataatattatcttccatttaaactagagttaaggatcagatggctgtcatctggcctaagccgggacagcctgcaacaccctggttgatgggatcgtggcaaagaaggttgtattgtgtctcactgctagtggtcggcatgcttgcagaacttcttcacctgcagaagtatttgaaacttgggttgttataagagttacacctttgaattcaactacaaaaaaaatgtgttttggatatttactctatactctagccttcattttacttttggtctcctgcgtactatagctcatgtttcttcaca

SEQ ID NO: 134366 - DNA, 1102 bp, Homo sapiens
ccctgtgcctgtattaacctgaaaaatacatggacaaataaaacatccttaccatataggttgattgttcttataaagttattatttttattagtagaggctgtattaatccatttcttacaaggaaaacggttgtgatcggagaagcatggcttctttcttttttctttttcaaaccatttcatgagtatgttctttacaatgatttcttaacatctctgcactgttaccggagttttctgggagaggatacttttgacagaaagactcctttttcttcatgacgctctgtggccttgccttttctcctctggaaataaactgtttctcattggatattattatggctttttaatctctaaagctgagcatgtgtgatttcaaaggttataagcattataaaggcaaaatacccttctaggcttctgctcccctatgactccttataaaaaagaaaaggaaagaaagaaaactcgaatttaaaacatggtggttgagatgtgtgtggtataccaggcagacctccttattttaccctacttggcagcccccttttacttggcactgtggcattacactggagtggtttggctggaaagaacttcagggtctcctcttctcactggaaaaagtatagtgtccacattcgtgagctttaccacatgggggaacaaaaagccctcagggtggagaagcacgtattcctctcagagggtgggggatttacatgagtaacttccagtcacattaatgggaattacaagcctaaaccttcccttccccctcgccgatccttgaaagagcagcctcctttgtcccatctctcctttgaatagaccaagaatcaactttccaccatctaggtgtattcttggcaggaaaaagaaatacacacaatagcctcgggtgtttctgctagacatcccagcttctaggagcagagggcaggaggtggcttgcgtgcagctctcaggctggtggagagctcttggaagtgtggccagtgcccagtggcctcctcctttgaggatggaacttagtatgtgccattggaaaggacagatgactggtttcctatttacagattaagggtaaagaaaca

SEQ ID NO: 134367 - DNA, 1003 bp, Homo sapiens
atgctgacttacctattctgctgattcccacagcacacaggtaacacttctgctttctctttgcagagctgatgagattttctgaccacggggctgctcttaacactgagaagcgttttccatgtgaattttgtggacgggcgttttcacagggctctgagtgggaaagacatgtgctgagacacggcatgtaagttgggccacttcaaggatgcctttgtccaaagcaagaggtagggagggagggaggggctcttgttttggttcccctgacagtatgtacacccctctgtgtcacatttctgggccgtgggaggagaggcaatggtgaggaaccaagtttctccttttctgttgttttttaaaatggtcacccagccgcaagtcaaatagggaaaaaaatcgtctttatgaatgatcagtcctgctcaagcctgtgtgcagaagtatagtgttttctccagccaatatccctttagtcttcattagcgtgacattctataatagaacgtgaatcgaggtcaaaagatctggcttctgttcctgcctctctgactgatcattccctgagtggccctgaacattcccatgtactgcctcggggacagagccagcttctgcctgcctcccaggtaggtgagagcatacttgtaaaatacttatgagatccctgaacataaaatcagcccctcaacaaggcacgttagtccaccagatgcagagagaacctaggatgtggtcttttcaggaggaaacatggcttgtgtggtgataggaagcctgaagcttggtccctgaagcctcaagggtctagacctcagagaatataaccaagcttcccgagacatgggttccatcttcaggtttttgtttttagtttgttttcgtgatttgtttcgggacctgacaaataaatctttagtacctgagttactcttttagacttcataaatataaccaatctccaagcttctgggttcagccgatgactctgagcataaga

SEQ ID NO: 134368 - DNA, 1078 bp, Homo sapiens
gaaatatatgacttaagcaaaacatagcagggatgcatcacttggtattttgtcatacacccatggcatttgttcaaaggaaaccccaaggctttttgaggatcaggaaaataaagacactcgagggtttttattatttttttgtttaaaaagagaaatatatatactatactcatctgtctcttcgataaatgtttttccagggcattgaatgacaccaagcaggtgagcagagaagaaatccacccaaaagagatcatggagaacagtgttaaaatgccctccatagaggaaaaggaagatgacgaggccattgggatagacttttccctaaagaatgaaacagtagccatctgtgtagtaactgccgacaaatctctcctggagaatgcagaggccaaaaaagaatgagcgtttggtgaaattcttaatcaaaccttacttgaacagtgatgaaaaagtgggagggctggcttgggctgagaagggagggacagaaaagagaagacagaacaaagctgctttttaggactgaacaatctattttcaaagcactggtacctgtgtgagtgagtatgtaaattaaagttatttaaatggttggaatatgtggctccttttccatcactacatcttttcttccggatcttcatcatggaagtttcatttgttgcggaatatggaagcacctcccaatggtacggtgcaccctgtggtggtcttggacagtatgtggaaacagaagctccatgacggtagaagacttctcattggggagcaactttttgacgcacaacttttggtgcgtttttctagttttaataccttaagctttttcaagacctaactgcagccgctttgggaaaaaaaaacaaaaaacaaaaaacagaaaacaaaaaaaaaaaaactgctttgcataaaacagtcacctgtttcctagtacctcaaacttaaccaagggaactctctgcatttgtcagtactacctgtcgtcgttgtggttaaatgtagagagaactgctgggcaagatggtgaatggagaaaaaaaaagagttttaaagaaaggaacacaaattg

SEQ ID NO: 134369 - DNA, 2103 bp, Homo sapiens
tttttttaattattttagtaaaaaacaaaacaaaaaaaagaaacagactttaattattagataactgtttgtgaattgtcatcctttattccaggtaagctgtttattagtgttcaactataatttagaatttggtagattcatgtgagctaattttaaggtgattgtggagttttgtttgccacatgtttattttctatcaatttgagtgttacaaacacagcacaattcagtttttcatatgaattgtttttcgtgtgtgtgttgttattgttgttttaatttcggggcaagggagatttagttttttgtgaataggaatgtttttattttaaacatggaaataacaaagaagttaactttcttttttttttttttttttttttttaatttaactaaagaaccaaactttcggcacagctatgcagcttgtgggccagacgaggaggtcctcctcacccttttgttgcctgtcaaattcacgcattatccgtctcataaataatttctgttaggattggctggcttttgtgtgtgattttaaaatctgtgttttgtttctgctggcattgtgttttgttgggggttttcatttatttaggggacgaggggatgtactagaatcccatccctttcgtgagagtggacaagaaataacatatcctacaaggagcctggagaactactttctttctttctttttttttttttttttttttttttaaatctagctgccagctgctctgtcccccatatcagctttttcaggagggagcagcttagactaaatctaagcctacatttataatatgttctgattgtgaacaaagggtttcgttccaaaaaatagaaaagaacttttcttgaagcctaggttttagaagcccgtgtgtgtgtgtgcttggatgtgtgtgtgcgtgtatgagtgtgtgtgtgcatgtgtgcacgtgtgaatcctttggttttcatgtttttttttttttttttttacttggaagggttgtgggagggtgggagggaagaaagggaaggggaattgctgagatgacagtgtcccacacagcttcaaataaaatccatggaaagatgttgcatttgtggaataagtgcttacttgaaaagcatgttcttcttttattttcttactgttaagaatttttatttgtaggatgtttgttttaatttaatttttttaagggatgggggccatcatgtggaaaccagaaaatggggaaagtgtgaactatccagacaaagattcattttgtgtctatatttgtttttaattggcctcatttcaaatgtattaaacagttccatacctggattgggtgtttgtaatggttaccaaaaaacaaacaaaaaaagaaagaaaaaggaaaaaaaaaaagaaaataattgtgacatgcttttatcactactttatttttcaaataacatgtaaatattgtaatccattggattttgttttgctaacctgttaataaaaatatgggaccattatccttttaacaaggctagaatgtcatttttttctttttcaaacatatacctgatattttgtggccgcacattttggatgcattattataattctgttgactgtaatgacatagaatttacaacattttttgttgttgtttaatttatacagaggacatttttttcagagcttgagagaagaaaataaatagcaaaatgataacctattgactccagtaatcagtgtttcccaatacttcataagagatagggagaccctgagtccttgaagccaagggtttaaaaacaaaacaaaaacaaaaaaaaccacaagtaggttattcaagttgtttgcaacatacattttgtaatgaaatgtgagaaattaataaagaatttttttcacatgtgtctatgtgcatctgttgtaaatcatttacagatatgactacagatatgaaatctagaaatattatagcactacctttcaatgcttgtacacgagatattttaagtcattgaatctacacaggtatggaaagcaaaggtaaagctgaggtgaggttgaggttgagctgggattttcaaatgttaatatttctgcatcaggtattcatcacc

SEQ ID NO: 134370 - DNA, 1017 bp, Homo sapiens
ttgactatataccagcctctggtacaccaggcccagaagctggttctgtgatctcctacaataaaggttcatctctggtcaccaagacccactaggattcaaagtcaagctagataagagctcaactgcttgggatgaaagtaggatgacagagcagcctctgtatttttctaagttctaggatccaagatcggggagccttcagatcttcccaatcttttgactcttactctgttagtccaaaaacgagttcattgctctttatgaattatgatcacctttgccctaaatagagagcagctgtcattccaggccacttctgcctgcaccttttcaacctcaataattcctaatggtttagacttgtgttattaatatgtagccaggattaagtggctaaagagcaaaactgcaatgaggtttcacattgctagaggcgagggaacactgctggcacaacacagaaggtaactgtggagtcaaatgtgaaacacagccatgcagaccctaccctgtaaagggccaggcagacacaaaaaatgctcagttctgagaagagtcaatggcaaattcagtatggattctgggagaatgcctgcccatcctggacatcaactgcagtgggcttgagattgtcttaggaagagagaaaacacatctgctttcagttcttattgtcaactagatgatgaaaagcagctcaattcagtagaaagggcattagcctgggagatgagacacttggttcaaggccagccctgctactgtcccaggacaattaacttggcttctctggcccctgatttttcttcacctccaaatgactagatgatcactcaggttgcttcctgctcacggatttcccattctctgaatgcccaggaaaaaagaacacatcaccccatctggctcctaccatatatgcgatgaactgtggagctgtagttctttggagacagatggtaggcaggtatctgtttccatatttggtatgaagtacgaggaggagggaaagaa

SEQ ID NO: 134371 - DNA, 1186 bp, Homo sapiens
atcatttgaaagacagataatatgaagagtcactttggctggcttaaacttagcaccttgctcttgcctgtaactcattgcaattgcttcttcctttgggtaaatagtcattcagttattttttttttaatttaactgaaaatgtaaaaaaaaaaaaatcaaccctgttgtcaatcagactgtaataaataatgtttctacgcaaacagagtcaaagccacattagagataaaaagttacctctgggagattactattattactttttttaccaacgacatcccagtcccattttgttcttcctgcttcctcaacaagaatttctcagataccaagttgctgaattgtcctcacattctaataacatctaatacaaaactggctcttgtttctctagtttttcccttacagtcacctagcctaaacccaaatccttcaataagcccctccaatgccctcttgttgagaaaccacgtgctcttccttactgcagcaagatcaataaacctacacgtgtttgactataggtgtgttcctcgcagtctttgactagtaggcttcaatacatcaaatatttattgagcatctactatgtgctaggtactgtactaggtgatgagagaaagtaaggagttgattacagataagaaaatggaggaatctgggacaattccagagcaactgatgacaagaatggaaaaaagaaatgaggaactaaccctcatttcttgagccaactgtgtacagggcaactagccttcccttatctcccactgcaggtccccgctgggtagacacagactctgtaccaagtggcacagaataggggtagacagcagccccaggtgggaactgtcttttagactaggagcccttgacttgtgtggcctttatcgaaaaatgatgagttaggcctattatattcctacgtaggatgttgagctaaaattcacataggccagttccagctgacaatgaagtcaaaccgactacgaagcattacccatctgtagagggaactgggtggccattgtgaactatctgcaactgaaggaggagaaaacagatcagcggacagttgagactagaggtcatgtgcagagagcatcagagatgtcttaagtgaggtcatgaagccctcaagagatagagcagcctttttgtgcaatgatattcccattcacat

SEQ ID NO: 134372 - DNA, 1047 bp, Homo sapiens
tgacattgttttccttggaagagcagaacatctattattcaaactctgggtagaagagtgaaatggcctaggtctagagataaggaacaatttactactggccagctgccgcccttgccatctaacaaatataggtttaaaagaaaatatccttggcccgttgctccctcttttccaaaagagaaccagttattttaagctgttttttttcctatctttaatatgttttttgaaaaatgatgtcaatttttatctcactgtgtgattcccccctccctccgagcctgtcccctttctcagaagagtcttacaaccactccttagattatttccaaagcctaccacctcgctcccttgaccctagtttctcccttcattcttcccgttcatcctccacgacacacttttcctcaagttcagccctggcctccttgtcaagagctcccatggttcactgaacaaggcccacatatttgaacatggccttcagggctctctaccttttttctttcctattgtgcttttactgctccagccaatttcaccaacagctgctttgtaaaaatgttttttctttttctagaacttttctgtttcctcccttggaatgtgccttttttccaattctgtatgctctaccttcctcacccttcaaagcccaaaattagaattgccttttccttgatgacttccccagtctctccagctgaaagtgggatgtcactcatcatagggctgtggaaagaattgaacaagatgatgcataggagcagacagtagaatggtggttaccaggagcggggaagagggggaaatggggagttgctgttcaacaggtataaagtttcagtgatgaaacatgaataagttccagagacctgctgtacaacattgtgcctgtagtcaacaatactgtattgtccagttgaaaacttatgaagagggtagagcccatattacgtgttcttacttccataaagaaagattatgcatgtggatatgcaaggtgaaatgcctagcacataccagacacaaaatagttctttc

SEQ ID NO: 134373 - DNA, 1188 bp, Homo sapiens
gatggcgtggagcgcacgcccgcgggcctgggcctaggagctcgtgctagcggggccggagggggatgggaaggtccaggccgtctcagccgtagagcctggctttctggtatgggtgcacaggtgggggagggagacgtaggcgtcgccactacccctgtgtggacctggttagccgcttagttcccagagttggtaacccgagaagatgagccttaagaaaaaaaaaagtatcaggttccgtttgccgccgagaggtgagtggtggtgaaaatgaatttgcccctttcccctcagaattgtttacccttttatttgcaaatgaatcgttctgctgccttcctcccgccaccaaacccacacccttgcgtagattgcactttgaggcctctttggtgatggttttagctgttagagctcttcacagccatccaggctcaaactaaacttcagatttaacgggttttctgtgttagaaatcttggaattgtaggagttggaacgctgcagccaccctcccccgatgccccaaacagtagcagttcaagggggaaaaaagaaaaaaaaaacaaaaaacaacaactttgaatcctttctgcagttaaagccttaaacatttcagaagtccacattatacatttttctgtatttgtgactgcataaagagacactgttgaggtcagtacaactttatgccaagaatctaaaaacgctgtgagtgtaaatttactgcttatgttcggaaatacaccgccaagattgtcataatactaagtttaaaccagcagctttctgcccaactctatttttaaaagtagttgattctattttgggtggagatcaggggctttggtgttaagtagacctgagttccatttgtggttttgtaacttatttgctatgaccttgggcaaattacggttagtttcattctctgtataatagggataatacctgccttgcagagatgtgaagattagatggtatgtatttacttggtggtcagtaaatggaatcgattatttaaacaatggattcctttgagtggagatacagtgttacgttttacttatctcatttaatcttaagttttgtacatctttaattttttaagaaacagcctttttgggattttggtacaaaattatttgatttcagaatatttatatgtgggtgtatgctgtgtga

SEQ ID NO: 134374 - DNA, 1034 bp, Homo sapiens
aatatgttatacgtctggaagtatatttttgaaaagcccattgttagggagcggtttctacagctttcgctgctatttatataaatataattttgttgctgttagtataaaaaaactaatactgttagtccggggcaagaaattaaagcatttcctctgggatatatggaacgtttgcatttaatgacttgtcagtttttattttaatgactttaggaaatatttttcatgacaactgtttcaattctatgtttgtagtgggttttaattagtatgtgtttttgatacgacaccttagaattccagtaagaaaataaacaatgaaaattatgttttctagggcaacgctaagtgtcctgtttctaagttgttgtgagaacgaggtaaccaaggatattagaaatagatctaaaataagataggatcttattgagacctgtttttggtctggtcacagatttgtccttgtttaatttttacctagaaggaaccaaggaaattaagtaacttacgtagccagtatagcaactcttgtgagcttgagatgagcatgagcaaaaatggaagaaaggactgtgagataagtggaatcatgggaatgattcatttgttgaacaagtaaatgtttagtgagctttgctggcaggactggaggagtacagggacctgtagaacgtggtctggggcttctgggagccttattgacttagtcaaagctcattggctatagagtagggggatatacaaaatggaaagagcaagataatttgttttaaggtgtttttatttgccctagttttaacaaaactttcttagacttattaggcattttgtaccatttacttgactattactgtgatacattacatgaccactgcctttagtgttaatctttgcaaagatctttttgtttctacaattgtaatgcaagccttcttataaaatattcaaacaatatagaaacaaaatgagaaggtggtatgtgtggggtagggagaccattgctaggagattttcttcattatgtgcttttt

SEQ ID NO: 134375 - DNA, 1601 bp, Homo sapiens
ctaccgtagctacctacctgctagcctcttcttactgtagatagttctgaattgtgggcggtgctatctaaggcaggtccttccacttttccactgtacctcatcccctgtcatgtgtgaaggacatcactccatcagatcttttctcttcatcactgatttttcccatttctagggtatacaaacatttttccccatcttaatgatacactcccttgtgtccacatccctctttagctgctgccctatttccctgcttctcaagaaaattcaggagtatctcttaattctgtttacttttttccacatcttgctcttttcagatccaccatactgttcctaaaagggagtcctcacaactttgtacttgtgctttgtccttaagcacaatacttttaaaaaagtctttctcctctttattaaaatgagagtaataataattgaactgctttcctaacagttgtgaaaatcaggtgagatcatgggcatggaaatatttagtgaattgtgaaattagaaataaattttgcagtttttaaacaaatcctgctttcatcagtttttatttcgatcatttcactattctttctttaaaaggtttgtatgaatgagatattctcattttcttagattgacataatcagcaattttgaacagtgtgtaaaatcaatgaacaaggtcctgccgcgatagatgccgtataggattccagttaatttctgaaagaaatttgctaaatttaaccctactgtggcacagtgaatcgtacgaaggacactacaccatctgttccctgtaagtttagataaataaatgttttttatagtgtcacgaaagctaattttacaactgaatgagctttataaaacttgtaaacattgtataaacttatttcgaggaggtagaccagctacaaatgactgacaatacatgaacagattctggaggcttaaacaggtagataaagttgttctcaccaattattccccacacacttctggttgaattaggtaggcaccttgtttttgctagtgcactggcgagatccattctttgcctatatagaaacttacaggtatcttgggaattctgcttactcagttttcaaattcctgtgtttcttttggtcttgttgaaatcatactgttaggaatatattttataatagattaaattggcatgaattggttggcttaatttctgtgggacaaatgggttttggatttcaaatcatatatttaaaataatagccttttggatcataaccccagtttgaggattgcctttgttatagtgcctgcctcttctcacataattaatgttatgctatcagttattgtttcaattgtaaaaatctcctgtactaaattattttattccttgggtccagtgaggagatttttcctatttgtactgaagtcagctgacatttttaaaatcaaatttgtatttgtagaaatatcaggaacctaccttgggacagaaattccccaggaaatactctggtgcctgtaccagtttctcaagtggaaggagaagaaccgaagaaccaaaaaagaaaaagcattacctgtagtgtaaacataagaaatcctttagta

SEQ ID NO: 134376 - DNA, 1277 bp, Homo sapiens
taacaccaaagcactgaaaagactgacactgttttacttttttttttgcaaatctgatgtttggctttaaaaaaattttacttgtgttttacctttgaaatggggaacagtggaaaatagtggattgagatttttgtgatggatttctactttggggaacatcagaatagcagtgatgctactgacccatttcaggaagatcagtgcagcaaggaaggtttatatggtatttgcaaaatactctgcttggagtcataaggggtggtaacctctttatttccgtctcctcatctataaaattgagtgggtgacatttccttttgtcccagagttttgaggattgtgtgaaattgtatgttaacatctgaagctaaataagctttttttatctttgaagtacacaccatcactttttaattgtacaaaagaaacctttatttgtatccctttctgtctaaaactcaagagaactgtcaacttagataattttcaagaagtattgaatttttctccttggtttttgtgcctttaaagtaatgaaagtagttctataaaggcaaatgggaaagccatctctgccttttttactcctgtacctccctacttaacaagttaagaagttcattagactcatttttgtaaatactgtataatgagcctaattgtcacacaattttaggaaatgaagagactataaaggtcatggattccagctcctcttacagatgaatgaagctgatgctgagagaagctaagctgcttgtttaagagcattgaagttgtctggaggttttcagcctgggctgaactttggaaacacctgtaaaactttttaaaaatactgatgtcaaggtcccactctcagagattatgttttaattggtgtttgtaaagtccccctggtgattgtaatgaaacataacacttaaaatgaatcatttgccttttaacattcacaatttaacctttaacattgaagtattcttattgttgatgagactgttttatttcttagattttttaggtgatcaagctttactttcttgctccgtgggaaataaacccatgaacagtatataaaccaaaactttgatgttgaaaactttattttaaattatcagttcaactagtaaatttttaaaaatctgtgtgtatcagatggtgttaaagtttatggctatcataactagtaatatgagttaatgttgaatcttttttgatataaattggaaaaacataatatttgaggttttggaaacattaataattatgtatat

SEQ ID NO: 134377 - DNA, 2487 bp, Homo sapiens
atggctctatttccagttcagaaagtgctgagcgtgtggaggtaacttaatttggcctttatttttctgcttaattacatatatgtctgaaagtattgtgaacctttttgtacttggatctgttgatttgtagtcaattttgggattttcctccctcttctaaaaatacagtacaacagaatatttgacatgtttataaataaacatttatactgccatttcaagaacattattttgggctggatgtagtagtttatgcctgtaatcctagcgctttgggagcccgtggtgggaggattgcttcaggcccggagttcaagaccagcctgggcaaggtagcaagaccctgtctttaaaattaaagaaaattattttattaatgcttttaagtggtattaggtaccttaaagttacaacttaggtacataaagtttttttgggaaaatgatacggtttatatctatatatatatatatatatatctatatatctatatatatttcaaattttttattttatattaacttgatatgaagatggaaattgttgggtaaaattaattgtggttgatagttaagattaacatacgctgtcatgagctttgaaagagtaaccatgagtcagattgttaatattgatcatttattgtgtcattttacaaaattattttcaagttataggttgttattagtgctatgtttgtggcatcctgtaacggtacagtctaattagagatcaggcagtatgtagtattttattgtaattattttgtcttttaatgtgtttagcccaaagcagtgtccacaccagcaccagctacaactcagcagtcagctcctgccagcactacagcagttacttcctccaccaccacaactgtggctcaggctccaacccctgtccctgccttggcccccacttccacacctgcatccatcactccagcatcagcgacagcatcttctgaacctgcacctgctagtgcagctaaacaagagaagcctgcagaaaagccagcagagacaccagtggctactagcccaacagcaactgacaggtaggaactggattctaggacattctatctcaaaatccgtgtttaacaggaacttcatgcatttattttgattattgttttgatcaaaccgactatatctattacgttaagctttttttaaatgtttgactaaaacatatgctgcgtctgttttgatagcttactaaggagaatataagtacaaattttcataatcagatttctgtactctgttgatttgggcagggtggggggcagtggaaaggagaaagcaggtgaaagtcatttttttttttttgagtagaaacgttaggaaatacaaataaccaaaatgaataaggattacatcatgacattgccaccctgatcatcatttgtacttgatctgtattctttgtggtcattgtcatatatatcataagcatccttccatgttagtaaatctttcccgtagttatatagcattgtgtttggttctgacatttgttagctcttgtaacctgaacctatggactatttcagtttttcactgttgtatctgtatctttgtgaacttgtgagaaattcaggcttctgcctgtgtggatctttaggggaaaaaaaaggaaaagagtgttgagatatttgaggagcaagaaataatttcttgtgggaagttgacagcagagacacctcaactaagtggctgcttaggcagttaggattattgagcagtttaagacaagacttttgtttttctccccagacgatcaggtaaaatgaccaaagcaaatgcttaagtcagagttctcttggttggaaatcatacagcacaattccttgatctaagagcatgagttatattatgaccagccttcactggcactacagctgtttgtattttgtgacttagtgcaactcaggacctcagaggcagtagttatatgatctttggagtcagaatcagacacagtggaaaactatgcagtgactggaagggtttacagacatggaaaggggttaagatatatatgacaatgatcagaaagatatagttgtgatccttcattttagtgttctgcctttgagtgtggtttctgtgtctgacttagtcaaccatgtttggaggagtctgagccacctggttcattgcttacttgggggtctctttctaaataattgattccctaagaagacaacatgggtttaggcaatagaatatttgccctgttacttgcctagaacactgctttaagcattctatgacaccattgcctaacttgatccatctttcccatgtacaactagaaatgcattcaaccatcttatcctagtggataccacctagagtcaggttaagctgttacatcaaagggctgttgatcaggtctgtatatgagagggaacttacgcatttaaaaaattggtttactaaagcacttaaatattacaaacttaatatgtcttaagtc

SEQ ID NO: 134378 - DNA, 3532 bp, Homo sapiens
aggggagaagtagtgagacagaatcaagattaaagaataatggttaaagtctatgtacatccagtcttatctgtggtgtttaaagagaactttttaaaaacaatgtgtgggccgggcgtggtggctcacgcctgtaatcccagcactttgggaggcagaggcaggcggatcacaaggtcaggagattgagaccatcctggctaacacagtgaaaccccgtctctactaaaaatacaaaaaattagctgggcgtggtggcgggcgcctgtagtcccaggtactcaggaggctgaggcaggagaatggcgtgaacccgggaggtggagcttgcagtgagccgagattgcgccgctgcactccagcctgggcgacagagtgagactccatctcaaaaaaaaaaaaaaaaaaaaccaatgtgtgataatagtgtaaattattctaagggagatgtgtcttaccggattttaaaatgtattatacagtaatgattaaaacagtttggaatggctcatattagaaagattggtcagcgaaatcaacaatagctttgaaatagacccagatagatacaggaacttaatataaaggtacagtttcagaacaatgtggggaaaatgctattgagatctcaccatctagaatgaaaaaagaatgacccctcatactgtacacctgcaaaaataaattatagatggatacggatttaatgtaaaagcaaagccataagctaatggagaacaaggaaacaaaagaatagtcttcactgtgagaagtcattcttaagcaagacaaccaaaaaaaaaattataacaggaaagattgatgaatttgactatagaaagaatttaaatgcaggaaaccaaactacacattgcttaataagagcttgatttggtcttttaaatggaatactgtgcacatttgggaagaaattgaagtagatttgattgtgccgacatagaatgattgttaagttaaaaaaacaccaaagcaagacacaagttgttattcttttaaatagaaattggtgtcatagtggttgtctctgggttaggggtaggaaaaatttagtttttatgtattgtgcgttttgaaattttattttctctgcattagttttacagtatatttaatgaagaacttaaattataccaagggattatattaatcatagtattcttattgggtgttacgatgccagacactttgctaagcactgtactagtgtagccctacccacaacactttggagtatatgatacggtcgttgacattgtactgatgaagaaacaggcttagaaaggttaagtaatttatgcatccaaacttgagttttctgctcttattatgtactaccaagggctttctcagaactgaaatataatgtgtgtgttgtttttaattgagatacaggtctaagtgtgtatgtgtgtctgctttaatttaaacttctaactactacctttaccactgttgtaaacttaagtttatatttctttggcttgctcttggtctttcataattttctgtcttttattgcagacttctctgtagtttcccaacagaaacttaatctctttaaactgattttcattacattcaaacttggatttaacccatatctaccttttttgcatatgctatatttctttatttgaatatcttctttcagtgtcctcattcagaacttacctataagacttcattatgtaaagactttatagcctaatttggtttctccatgtgctattttgtatactgcttttgatatttcttctggtgtgacttgatttataaattatttaacttctcatgtaaattatttcaggtaaataattgtgcattatcttttttgtattcaatagatagctgttaggatattattttatatattttgatatttaaagtgatggagtctcagaatagaaggagtaccaagattgaaaatttttcccaaaccacaaatgttgtagataaagcttttggatttaatctagaagagacagtttaaatactgtagtcagacttttatatttaattaaaatcaaagaatctgtttaccaattggatagttactaaactaatgtaaattaaattttatatactttttaaaatgtgatttttctaaaatccttttgtagtacatcgggtgattcttctcggtcaaacctttttgaagatgcaacgagtgcacttggtaagtatctgcttttccttataaataacctataaagagataggaaagaggtttcacttttctagatcatgataaaagtgttaataatttgcatggttgtttataatcaagctgtaagatgattgatttaggtaattattcaattaatagtgttactaaagacttttaatgtttatgtattgagttctttaaaacttgctctgagttgagcctacttggttaaagcaaataaatttccattttccggatgtgaattttaaatgtgatcctaacatggttgatctgtgtatggatttattacaaagggtctttgaaatgggtatgaaatttttctaagatctgcctcacacttcatgtgtattcaccattagacttaattcaacttgatggcactatacattcccatctacatcttgttgcttgcattggcttgcagcaaaaatgcctttttatcccaacttttaattttacctactgaataatgcctttccatctcccatcaccccaatctgtcaaaatgaagcagcattttttttctcccattgtagcatctctgatacagttcctgctaattactggtttattggctggcaactccattcctagtttgttacttttaaatggcagggagggagaaagcgaggaataggtagaaacagcagctttggtgcagtacaggcttctggattcctgcttagcttctacagcagcagggttccagcagcagtaccacctcctagcatctgagttggttctctgagctagttggactggaactccgtgatgcccttgttgctgtggaaaatggcatgtacatttagtggcaaaacggcagtttaaattatctaagatcgcctgggtgtgacaaccccagattttcatctttgaggagcagtgtcctaaaaccactctgctatcaaatacagtgtgagttagtctctagccaggaaaacagaaaccactctatttcaaagagggaaaggcttaatcttaggaaattgttaggaattggaagggctggaaaataggattacccagagaggcagtaaactgtctgtggcctcggctccagctggagccagctagcacttgcccctgatggtgttgaaggctctggctgtggtcactgctgctgcagctggaatgcattgatgctcctgagttcccgggagcctgggaggccatgctgtagctgctgctactcaagcctctgtgacgatgtcttcccattctcagctttatggtctcgggatccctctacattttcatctttaatttacccaagtctctatgttgattccctgcttttttattttattttatttttctgattta

SEQ ID NO: 134379 - DNA, 2256 bp, Homo sapiens
gtttatccagtttgtttggaattgtggaattaataattgttgtgaatttgtttggtgaggagtgtgtaccctaaacagattgtataaaagtattagcttttatggagtggctttcatttacacctgatttagaattctgtataagttcaacagtatcagttattttgatctaatagatgtggagttttgaggtataaaaatacagaatcattgttaccaaatgctaaaactgctgtagagcatcaaatgcaaataaatagatgatacatgagttcatcaaaaacaatttataactaaaatgttttttatatatttgctctttgtttcatagactgaaggggaaaagttgcttttaactgttactagttaagagataggttaaggtgaacggatggaaagaagaaatgttgagcatttatataagaggctatgtaatgtgtgagaatagaggtcgatctatagcaataaagatgaactttttagtttaataaaagagaatttgatggacgccctggatcctaaatttgtatgtagtttgttagcacttaaataactgcccatctgagttaagggtttgcgttggttaactcattcaaaaacattggttttaatgcctggagtgacatctaatccatgcagccattttcctgctgtgttactcttcatcctttatatgttgttgcttttggcttctggtttattagggaatggaagcatttatcatcttattcaattgtaatacttggttctttattctcttcaaaatctataagaacttgataaagactttttaaaaattttaaatgacaagtctatcaatcatgtgcatcaaaataggtgtcccaaaagagtttagtgcatgcagttttaagctcttaataactttaaaagataagtactataaacttacaaaaggcatcacctaaaaactaaatggtttcaatttcttttatatcgattttatgaattttgaaaaattaaattttttgagatactttatctcattttttgagatactttaagtatctcatttatgagatactttaagtatctcatttatgagatactttgacactttaagaaacacttcactgaaaagtacctcaaatttatgagatactttctgagtgacactttctcagtaccatggatcagtaggggagatcctcctgcctggccactgtgtacctggtctgtatccattagatattttttcccccaggagtcatttcagaactgtcaagtgtgcatcaaaacctctttttggattatcttaagctagagttgcaaactcaatcctttttatcactgagtaacagctgataaagatttctaagaagttaaaaagtcaactgaactaataggtagcacaaaaacctttggttgtgttcagttttaagaaggtacatgtatcaatatttttcaaatttgatgctaattacgtgtgcctggtaggtgtcttattgaacaacacagagaatatttccatcatcatggtaagttctgttggacagtgctgctttgcattattatagcaatgtgggtttttctataatgcacccaggtcatttctaatctaatttgaatccatgcagcttaataatcctttacttttaattgaagcagacatctgtttgatgcttttgaaaatcaaacaagatgttaaatagactataaatcttttactctgtataatatttaattttgcatgatgggatatcttaaagcttggaaattctattacagggaatccctggagatagagaaagtcaggctgtggttgacccccctcaagcagctagtactggggctcctcagtcttcagcagtggctgcagctgcagcaactacgacagcaacaactacaacaacaagttctggaggtaaagcggaatcttctggatggggagggaatggccctgaatttttagtgtaaaataatttaacctgaaatacttcagaaatgacgttcattcccagagcagtcgaataattcgttaagttctctcttcactaatgtttgagaaaggcccaaaagaaactttcccaagtggatgtaaaaggtatccttgctgatattaaacatcagtgttgcagttttgccgaagggcatattctgttttatttgttttaaggaaaagatgctttccagtttgtatttagtgttactttctgatgccattcagaatggtttgctcactttgtctcttactctctccataaatgttacaaagtgtatgtaatttcaaagccagca

SEQ ID NO: 134380 - DNA, 1763 bp, Homo sapiens
gagtaatttttgccgtataaaacttgcaagttggtacagttggaagatttcatcattatttacttcattttattacatctgagaactcaaatcattttttctttgatagtgtttgctgtctaaatgtattatttaaccactgtttgtgtatgtatttactgcttttgtttagaaatgtttatgtgtattttaggacatccccttgaatttttacggaatcagcctcagtttcaacagatgagacaaattattcagcagaatccttccttgcttccagcgttactacagcagataggtcgagagaatcctcaattacttcaggtgactaatcagtgtcagtttcacaagtgatttagagtgtgtcacaatttgaaaaagtccatgaacggtccttcccctcctcaaatacaactctgtatttgagaatgtgaatgttttcttccaagctacacttagatattgtaatctagataggtgtactaaaaaaacagttgggatatggaggttgggttaaattaagttgaccaaatagtagtaagtttgggaaacattttatatttcctttttggagattcccactacacattaatatgttaaagaatttgggaagctgtttaacagagaaactgcctaactttaaatcacttttcacaagcttattactcagttcctttttcttaggaacttttaagcaacaggaacaacttactcttagaaaaaatagctgtggggcttctttagtgatcagatcaccaagtatttgaattttatacagcattttaatgcccactagtgtggaaggtaaaaaatacatgcaagtattaagaataagttctattcttatagtcccacagtagttttttttgtttgttttttgtttgttttgtttttttaagcacaggaggctcagagcacttaagaatttgaatttcttcactgtttactttgcccaaaagtactgaatttctttactattgtataagaaatcacatccttccaaagactgaataatccagaatcactaaattacgtttgcaaaagtgtagccttttctcttagtaatatttagaatttctctgttcctgcagatacttaatatcagtgtattatttttctctgtccttcatatcaccacagcaaattagccaacaccaggagcattttattcagatgttaaatgaaccagttcaagaagctggtggtcaaggaggaggaggtggaggtggcagtggaggaattgcagaagctggaagtggtcatatgaactacattcaagtaacacctcaggaaaaagaagctatagaaagggtgagtttaagtaaaactttaaaaaaattagttcttggctgggctcatgcctgtaattccagcactttgggaggccaaggcaggtggatcacctgaggtcaggagttcaagaccagcctggccaacgtggtgaaaccccatctctactaaaaatacaaaaattagctggcgtggtggcacatacctgtaatctcagctacttgggaggctgaggcaggagaattgcttggacctgggaggtggaggttgctgtgagccgagattgtgccactgcactccagcctgggcaacagagtgagactctgtctcaaaaaaaaaaaaaaaaaaaaaaaaaaaattccttagtcacactagccccatttcaaatgctcagaagtcacatattaataataaggtttttctataatttctttcaatagtgtcctgtagttttcagtgtagaagttgtgtaatac

SEQ ID NO: 134381 - DNA, 1406 bp, Homo sapiens
tctagtttgttcttccttttttaggttaggtttagtttagttctttgtttagttttagtttaagattaaattattatctatctttgttagcatagatgtttatagctataatattccttctgcgtttatgctatagtagcatcccataagttttagtatgttgtatttttgctttctttcatctcaaaatgttttttaatttcccatttggtttctaatttaattcattcgttatttaggattgtgttaatttccacaagtttatgaatttcccacattttctcctttcgatttctaaattcattccattataatcagagaatatactttcaatacttttcaacttattgaggttcgttttgtggcctaacatggtatttctgaagaatgttctatgtatactgaagaagaatatagtgtagttcttattaagtggtctataaatatctgatagatctagtttgtagtcaagtcttcttccttagctgttttatctattattgaaggtggagctgtagttgtctctattattgttaattgccaatttctacctttaattctcagtttttattttatgtattttgtggctctgttatatataattgttgtgtcttcctgaaccctttttatcataaaatgccttttgtctatagtaacaatttttatcttaaatctgtttcctctgatatagccattctagctcttttttggttaccatttgcatagtatatacctttttctatcattttactttcaacctacttgtgtctttgaatctaaattgtgtgttttgtagaagcaggcagttggattgtaccctttacttcacctatcctagctttaatctggataaaacccagataacaaactgattttttagtttcttctgctttcatagatgaatagttattcgtgatgaattgggatttttgcccaaattttaagggttatttccaaatataatctgacacagcagtctttaacctttttggcaccagggaccagttacgtagaagacctttttttctaccaacataggtggggtgggcgcagtgattttgggatgaaactgttccacctccgatcatcaggcgttagttaggttaggaagtggggtggggcggtggttttgggatgaaactgtttcatctcacatcatcaggcatttgttaggctatcatacggagcacagaccctagatccctctcatgcacagttcacagtagggttcatgctcatatgagaatctaatgccgccactgatacaacaggagacggagctcaggtggtaattcgagtgatggggagtggctgtaaatacagatgaagcttcacttgttcgcccactgctcacctcctcccgtgcggcccagttccttgctcacccactgctcacctgctcctgg

SEQ ID NO: 134382 - DNA, 3221 bp, Homo sapiens
tccaaatgaaagacatgagttgacattaataaataaaacataatttgcttttaatttagaaataggtgaggtggttaaactatactgcaggtactctcatccttatcttcactcttaatatactaaaagccatttgatttacatatttctgtagagtcatttatttttaaaccatagcagttagcagctaatttttaattaggccaaagagtatttgcatagtatctattaagctttaactagaaacaaagacttttttaggtgattagtaaaggaaagggtctagattccatctaatcccttgggttgggcagtaaatccatattgatagagatgaattcatgtaaaattctcaagagcttttttgggttgcagtatgtttttgagtaatgatttatctttagtgctatgctggaatctataatatgtaaataaaattaaatgtgccataattggtgtgttggatttatatttttttcctttttcttccagttaaaggcattaggatttcctgaaggacttgtgatacaagcgtattttgcttgtgagaagaatgagaatttggctgccaattttcttctacagcagaactttgatgaagattgaaagggacttttttatatctcacacttcacaccagtgcattacactaacttgttcactggattgtctgggatgacttgggctcatatccacaatacttggtataaggtagtagattgttgggggtggggagggagggatctaggatacagggcagggataaatacagtgcatgtctgcttcaattagcagatgccgcaactccacacagtgtgtaaaatatatacaaccaaaaatcagcttttgcaggtctttatttcttctgtaaaacagtaggtaacttttcctaggtttcactctttttagtgtactagatccagaaacttagtgtaatgccctgctttatatttctttgacttaacattggtttcagaaagaatcttagctacctagaatttacagtctctgtttcatggcaacactggataatggctttgtgaaatttaaaaaatttttgtagcgactgtaaacagaaatgccaaattgatggttaattgttgctgcttcaaaaataagtataaaattaatatgtaaggaagcccattctttcatgttaaatacttggggtgggaggggagaaagggaaccttttcttaaaatgaaaataattactgctattttaaaatttcttgatcattgaatgtgagacccttctaacatgatttgagaagctgtacaagtataggcagagttattttcctgtttacattttttttttgttttggggaaaaaattggtaggtgtctaattactgtttacttcattgttatattgcagtaaaagttttaaaacaaccattgcatgtttgcttttgatgtatccctttgtgaaattagcacttttggggccaatggagaaatgcagcattcactctccctgtcttttccccttccctcagcagaaacgtgtttatcagcaagtcgtgagtcaaactgctgccttttaaaaaacccacaaaatgctgattcagttcaaaattaatgcaaatgtttcaaaactgggtttctgatatttgtaaatgtgtttctttattagataagagtgtattaccattaaagtcattagtataatattgctttcaaaaagaaatggtagacaaaactataatccagcatcttttattgcattggaaagactggcaaagtcttttggatgggttgggagatgtggctggaaagtactttggaaaatatacaatcaagatatctcatggcatattaaaagaaaaatcttaatagcagtgttggcttttatttggattttttcatctcagttttttctgtggaatctccttcattggcattgttatttaatcataaacggggcagatgtctacttgttcagtttttcaaatctgttttcctgagtataaataagagtatttaaagaaataatttggattgcttttgttttttgtttccttttttttaaccatctgatactaagaagatgaatttgcacagatttctctgcataatttctcaatatctttagcacagtatggtgatgatgacttttaagcatttacatcacgtactcataacctattatgaaaataaatgaaactggctgggtatggtggctcatgcctataatcccagcactttgggaggccgaggtgggcagatcacttgaggccaggagattgagaccagcctgaccgtcatggcgaaaccccgtctatactaaaaatacaaaaaatagccaggcatggtggcgcacgcctgtggtcccagctacttgggaggctgaggcatgagaattgcttgaacccgggaagtgaaggttgccgtgagctgagatcacaccactgccataaacatgacaggcttttggactttgtattacctgtatgttttataatggatcatgcataatttctcaggagaataaaatgagaattcatatatacgttcatctttcaagtcagagcaatgagttgggaaaagaggtggcatttctgatcggataatggaatactctcatttattttatgacattctctgtctactcagatcatagtgaaaactggaaacaaaaaaaaaaaacagcctcttcttggaaagtgacagcagaaggtggcatggagcttgtgtccttggacaacaaatctggatatactaggattaattatcagaagacagctcaggccaagttttgatcgttccatacagtaccttgtttatctgcttcttaaagaatcagccgagacaccataaaagaaataggctttttgtgccttttgctgttaatgtttaatttacaaactgttttggtaaatctcttaatgtaagtagctatttgactttggaattttgcattcgaggtatactgtcatttcttgaaatctttttctcgtttagttgctctgtgggaaatgtgaggaagcctaagtttgtatttgtaaatttcttatgccatcctctagtcaaattttttttcattgtttaaaaatacggaagtgttccaatataattttttcctgtactggatggctaggattctagagaattgattataaaatattttcaatacatccaacattgcacttctcattttttaaatgattctgtcacgtagaatcagaattgaaagttgacaatgcttctgtcactgat

SEQ ID NO: 134383 - DNA, 1021 bp, Homo sapiens
aaatcaaggtatctggatccaacagccaaccctgtttccattactcattctttcattcatcgacttgacatgcatttactaagcacttcacacaaggtcaatcttgtgacgggctctaaaatacaaagatgagcaagacatggttcctcccttgagtagctcacagactgatgagttgggagacgagtctgcaaagcattaatggaaacacaagtgctgtgctttgggaagagagaggagaaagcaactaaatcggcctgggagagtgcgggaaatgctcttagagaaacagatgttggagtagggattttcagagcaatagaaagggagagaaacctgccaggaaaaagaacagcatggaaaaggcacagagtcacgggcactgggaagtccagtgggattggagactagggtcatgctggggagtggagggagatgcaatgaaggagttagagggacgtggtaaggaaaggtacaatttctgagtggagttgggcttgacccagcaagtaacaggccactgagtagtcagtgtgtggatgttctagattttcctgtttggttaatggtgtattggctgctgcttgatacacagccacctacacagtccaattgtctcctcctccctgcacaggcctgacttgacctagttattccagagcattgctcaatcaccaaatagcttccataagaggtgagagagagagagagagaagaaggaggagagggggaggaagaggaggaatgcttgagcaatccaggagaccgagccaggatcgggcctctgagaggcccatgtgggtttcacattctcaggacaatatttgccatcctcactggcagagggagagtggagactatgcaccgagcacaggtctaggcctgaatgggaatgagtcagtggccaaagggcagggttgggagggagtgggtggctgatggtggacacaggtggaggaagaactgggagtgtgcccctctgctgggatttccctgctcctgaggctcccttcagccatcc

SEQ ID NO: 134384 - DNA, 1017 bp, Homo sapiens
gttcaagcaattatcctgcctcagcctcccaagtggctgggattacaggtgcctgccaccacacctggttaatttcttgtatttttagtagagacggggtttcaccatattggccaggctggtctcaaactcttgaccacaggtgatccacccacctcagcctcccaaagtgctggggttacaggcgtaagccaccgtgcctggccattctactattttctaaccctgtgctttctactcccccatcctgcctctaatgaatgctcctcgaagaaaatgctcctctgagaaatcccacgagaactgtgacccctcacagcacgacgtcaacctggaaaacataaggctttggaaatgctcacccctgcacatctgcttcctgacctcatactcttcagattagatagctcttggaagaggcttgatgtatcagaaaaacaaaagttactaaaggatgcttggtacagtggagagatcatggactgtggaatcacacagacctggtttccaagagtccccaaacctcacccccaccagctcagccaaggggaaaatcagatgcacccaattggctgagcaggaatcccaattggctgagcatgaatcacagccaggaggaggagcagaacccatagggtcaggggggcagagacatttaaaaatcaaaaacaaaaacatgaggattgtgaggtagaaagaaaaaggggcaaccgaagagaggaagacaatttcaatgtctagcttaggtgggctcagaatgagcagggggctactcaatgaaaagtaaagaactgtttcataccaccgttgagacttagtgtagatgcacaatcgtttactagggcctctgtagcatcaggctgtcccttgccaccctccctttcactaggaggataaagtgttatacttgcttaggcaaactcactcccttgctggaaggatgtacaaccaagtggaattgggaaaagataccttggagtctgcatccaggaacatatttactaattatgcatctgg

SEQ ID NO: 134385 - DNA, 1029 bp, Homo sapiens
tgtgagtcttctgacacaaagcattgattgaaaaaaaccatgcccactaactataccaaaacaattccatcagcaaagtcctctgataatgggttaaatcagatgaagaccaaaggcttacagctccccttgtcctgacagcacccagtcatgactgagccctgcaacctgggtcaggatataatagtgacaatggcaatgggagccagaaaagaaagagagagagagagagagagagagaaaatacagcttccagggcacagaaccagatgggagagcagggaaatcattcggagagacagaacatgcaaagagtgagccacatttaagctgtgaacggtgcttgagttggtgttcttgaatttgatagtttttttttatccaccttcccggctatggcagaggtagcagcttccctggaagcccacttctgtgtgttgttctaggaaccatttccggagactcagcccagagctgcctttcaaccctaacaattattttttaagcatgtaattctccatatcatattgcctttttacttaaaatagctagggtgtttctttctacaactgaactttatggatacaactgcattagacaaaaactgatggacaggactagtttataaactaggatgacatactaagagcttagaagggcccctcttcgcctccccttctcttcccacaaaggctgagattaaaacttctttggagagctcatggctgccacaggatcatgcagcctactggtggcaaataaacttgccacagggttcaggccaaagctggtgcaaaggaataggcttccaggtggcagagaaaggtaccagaaggtacaggcaggctggagtcagttaataagagcagcctctgggggaaagtaagactacctgtaatcttcccactacttattaggagtgtaagtttgtcaaagaatttgtagaagaatccaggctagaatgtagtggcgtgatcatagctcccttgaactcctgggctcaggtgatcttcctgcctcagcctccca

SEQ ID NO: 134386 - DNA, 1055 bp, Homo sapiens
ttcacagtaggctgacgcctgagcagcagcagagacctttgaggtgactctggctttctgagtttcatccttttataaaaaactgtggttccatatagataacatcaaatttaccattttaaccattttaagtgtacaattcagtggcatgaagtacattcacactgttctgcaaccatcaccattatccatttccagaacttttccatcttccccaactgatactctgtacccattaagcagtaactctgaataattccccactcctccacctggcctggagaccccattctaattgctgtcttcctgaatttggctattgttggtacctcatgtaagtggaatcacacacagtatttgcccttttgtgactggcttatttcacttagcaaaatgtcttcaaggttcattcctgtcgtagcatgaataaaaattgtcttcctcttaaggctgagtaatattctattatatgtacataccacattttcttgatctgttcaccagtcgaggtacatttgtgttgcttccacctttcagcccttgtttggaatattggtgtacaaatatctgtttgagtctctgctttcaaatcttctggccaggtacagtggttcacacttgtaaacccagcatttcaggaggctgaggcagatggatcacttgaggtcagtttgagaccagcctggccaacatagcgaaactctgtctctactaaaaatacaaaaattagccagttgtggtggcatatgcctgtaatcccagctactactcgggaagctgaggaaggagaattgcttgaacccaggagacagaagctgcagtgagctcgcaccactgcactccagcctaggcaacagagtgagacttcgtatcaaaaacaaaacaaaacaaaacaaaacaaaaacaaaatcttttggagatatacctggaagtagaattactggatcatagggtaattctgaagttaatttttctttttttttctttttttgagatggagtctggctctgtcgcccaggctggagtgcagtggcacaatctcagcttattgcaac

SEQ ID NO: 134387 - DNA, 1027 bp, Homo sapiens
ttgacccaggccagggctggagaagcagaaaaaaagcatcaagcctacaaatgcatgcttacttgcagcagaaatagactaattgcatgggcgtttccctgggatccctgtctccaggcttctctcatccatgcctttctaggcagcccacatcagcccttgcttaaaactctccaaggtttctcatgccaagctccctgcaggacatcccaggccctctgggacagcagctcacgggcctctccagcctcatttgccactgtgacccattctccagcactgattcatcaattagcccatcacaggcgtagctacaagattagttttgagactctcattctatatatttatgtacatcctccaaaactgataaaacaagaaagccgtcaagttgtaattgataaatatgtaattaaatgtctacaaaatgtaacatgtcaattgtctttgcaactggcctcaaccttaggtagccatatataactcatatttcctgtgtgatgtgggtgaattttaataagcatggtatagtgtgggggtggggccttggaaaataacagtgcctggggcctctaaggtctaaagtcgtccctgcccttcacaacctctgctttagccatcctgaaacactggctgttcctcccacagactctgctttccctagattccgggcctttgcacctgcagttcgcctgttctgaatgtcctctctttcctcctcacccttcactccctcccccttgcctggctgagtcctgtgacagacatttcaggagccactttggaagctttttcttttcttcttcttcttcttcttttatttttttattttttgagacggagtttcactcttgttgtccaggctagagtctggtggcacagtctcagctcactgcaacctccacctcctgggttcaagcgattctcctgcctcagcctcccgaggagctgggatttcaggcatgcaccaccacgcccgactaattttgtatttttagtagagatggggtttctccatgttggtcag

SEQ ID NO: 134388 - DNA, 1032 bp, Homo sapiens
acctttttttgtttcctactaaatcttcaaagtctggtgtgggtaggagcacatttcaagcgctcagtggccacatgcaggtacctagtggctagcattgggcaggccagtgtgggtggtcctaggagccttgggagggttttaagtcaggggtcagaactaatggattctaatgattcagaacatcccagctagttcttggaatctcagaggcgaaagctctccttgtactctttggcgacgctgcctcctggcgcaggtcgctgcacacagaagggaaagcccccagctctccttcccggcggaggcttcttccctccccccagagtctggttcagaggaagccaacgcctgtgcacgtgggaaagcagcgtggctggccctgggcctggagccacctcccgggcccactctgccaggccccattctagatgccagcaggccggccccgccccttggacacggttttggttttcgggtgcaaacagtctacattcctctgaagaggcccgctccggcctcatcagagctggcgaaatcaacgagagaaacaggggacgtcggcccgcagttcccgcgagcgccacgaggggcgcacgcagatgaggctcgcagcgttggctgccgctgaagctcctggaagtcccccttgtcctcttccccgtggagaccccaggcgtaccaccacgatgttccttccaccagcctcaccctgaacccagtaaactctccctcgagcgatgacttaggttctccagggtcccaggccttgtgggaaagtgcccgcagagcaggccagagacaaaggaaagagcgggtagctgagactcgggaagcccatccgcttgatatggggataggtggagactacggtgaatccaaagtctgtgggttccgagactggagccaggaacaaaaaaagattccactgttcggatgttttcatccctgaggctgaaataacagctgaggcctgactactcacgtggtgtctgtggccagaataggacccacataataatggcttagctc

SEQ ID NO: 134389 - DNA, 1056 bp, Homo sapiens
ttcaccatgttggccaggatggtctcaatctcttgacctcatgatctgcccactttggcctcccaaagtgctgggattacaggcgtgagccactgcgcctggcctggcctagagagttttaagtcagggattgtgggcttgtattattcccacttttttttttttttttgagacagggtctcactctgtcacccaggctggagtgtagtggcacaatcacagttcattgcagccttgacctcctgggctcaggtgattctcccacctcagcctcccaagtagctgggagtacaggcatgctccaccatgcccagctaatttttgtatttttttgtagagatggtgtttgccatgttacccaggccagtctcaagctcctgagctcaagtgattagcctgcctcgacctcccaaagtgccaggattacaggtgtgtgccactacacctggcctattattcccactttacaaatgagaaagctgaggctcagtaaggaaagcaacacgtactgggccactgaggtgtcaaatttgatgtcaaagtcgaagactgcagtcctggttcagtttcaaataagggactgtgatgccacgaagcagaacgaagactgagcctggatcacaatgcaatggcctggctggagagaaagttgcatgggtcatttatagctcacagaggcaaaggtaacctacctaagaatggatccagaaggcaaaagggactgccctgccctcaagagatgtcggtatctccagtgtgctgggaatggggctctaggtagggcaagatgcctcggcatggtggctctgagatctgaatccagagatccacagctgtggattagcaagctactctgtttctctatatgttggtttcgccttctacaatatggagctagtaatcatatttgcctcctagagctgacatcaatattaaataaaatatgtttgaaataattgagcatagtgcctggaacatagtgagccttcaatgaacattagctgtcactattattactctcaaagatgagcatgcatacctcttggggagttccaa

SEQ ID NO: 134390 - DNA, 1025 bp, Homo sapiens
cacatcaaagctcagagaagttcaggaaccagaccaaggttaggatgcagccagattcaaacccgggtgaaacccattctctctccagcactccgcatttccccacagtctagattctttaggagcctgccccattatttcaggtgctttgaggctatgtgtgctgtaggcatatgtgttgtgagtgctcagtgtgtgtgttgggtgggtgtgtgttccgggtatgtgtgtgtcgtgtgtgcacgtctaggtgggtgtgagtatgcagtgtctgtgttatgtctgctggatactgctagatagttgcctcccaatcccctcctctccctcttgtcactgaaggtgaaagagtctctttggaaatattcatggggacagagagagccaggaagggaggactttcccatgcattcagtttttcccatgatacatcaggcagtaaagaagaatgtcatcctgaccatcggcttccctgacataacgctgaataattctcagacactcgcaggccagttgaagacagcataaagccagccctgcaaaaatcccggggacaataggaatagtggtgagaacttacttgttaggtagaggtttttttttcatggactcaactcaggaaccagccaaagggagagatgtgaaataatgaaagaggaaaggatggcaggccgggaaggatcactgacttggagtaagaaaagctgagttcggccaggtgcagtggcgcacgcctgtaatcccagcactttgggaggccaaggtaggcagatcatgaggtcaagagatcgagaccatcaccaacatgtgaaaccccatctctactaaaaatacaaaacttagctgggtgtggtggcgtgcgcctgtagtcccagctactcaggaggctgaggcaggagaatcacttgtacctgggaggcagaggttgcagtgaatcaagattgcgccactgcactgcagtctggtgacagagtgagactccatctcaaaaaaaaaaaaagaggccgggcacggtagctcacgcc

SEQ ID NO: 134391 - DNA, 1716 bp, Homo sapiens
aaatgcgaccgagcattttccaggtcggaccacctcgccttacacatgaagaggcatttttaaatcccagacagtggatatgacccacactgccagaagagaattcagtattttttacttttcacactgtcttcccgatgagggaaggagcccagccagaaagcactacaatcatggtcaagttcccaactgagtcatcttgtgagtggataatcaggaaaaatgaggaatccaaaagacaaaaatcaaagaacagatggggtctgtgactggatcttctatcattccaattctaaatccgacttgaatattcctggacttacaaaatgccaagggggtgactggaagttgtggatatcagggtataaattatatccgtgagttgggggagggaagaccagaattcccttgaattgtgtattgatgcaatataagcataaaagatcaccttgtattctctttaccttctaaaagccattattatgatgttagaagaagaggaagaaattcaggtacagaaaacatgtttaaatagcctaaatgatggtgcttggtgagtcttggttctaaaggtaccaaacaaggaagccaaagttttcaaactgctgcatactttgacaaggaaaatctatatttgtcttccgatcaacatttatgacctaagtcaggtaatatacctggtttacttctttagcatttttatgcagacagtctgttatgcactgtggtttcagatgtgcaataatttgtacaatggtttattcccaagtatgccttaagcagaacaaatgtgtttttctatatagttccttgccttaataaatatgtaatataaatttaagcaaacgtctattttgtatatttgtaaactacaaagtaaaatgaacattttgtggagtttgtattttgcatactcaaggtgagaattaagttttaaataaacctataatattttatctgaataatgttttttattgttttgttttcctcctggaaaaatatgaacagtgtttggtttaaacacaccgggttaataaggcatgtaagaagcacgcacaaaaaagccaactttatgtcaacaaattaaaatacctttttttattaaaaaaaaactatttagttttaccataaatactatcaatatagggctgagaactcttgattattgtacgtttaaaaattacaagattaaaaacccagttcaggtttgctctttccaaatgtacgtaaagctacgtgaaagcagtttccttacctatgattttcccagtagaaacagcttaatcatccttaaatttgctcagtttagtatgaaaatatttatgaaatatatacatttcagtttcatatttgaaaaaaatctttatggtttgtcttttaaagtaaataaaaataaaaaagttttctgtggaggcctgtcccagcacccctcacatctgagtaacaaaagaaccttcctacagcagacaaccctaagaacgtagttccacagtgccctcctgaggattaaagggttcatttatgcttggtgtgtgttaaagatacatcacttctactagttacagccttaaagaggtcagaaccaaagtttctggcagattgttttaaagctaaatcagttcccctgactgaaggtgggaaaacaaactgaaataaaataatttaaaaattattcaaattcataaaactaagtgtaaagtaagatggtgttatggt

SEQ ID NO: 134392 - DNA, 3168 bp, Homo sapiens
agagaacgaacgtgtctgcgggcgcgcggggagcagaggcggtggcgggcggcggcggcaccgggagccgccgagtgaccctcccccgcccctctggccccccaccctcccacccgcccgtggcccgcgcccatggccgcgcgcgctccacacaactcaccggagtccgcgccttgcgccgccgaccagttcgcagctccgcgccacggcagccagtctcacctggcggcaccgcccgcccaccgccccggccacagcccctgcgcccacggcagcactcgaggcgaccgcgacagtggtgggggacgctgctgagtggaagagagcgcagcccggccaccggacctacttactcgccttgctgattgtctatttttgcgtttacaacttttctaagaacttttgtatacaaaggaactttttaaaaaagacgcttccaagttatatttaatccaaagaagaaggatctcggccaatttggggttttgggttttggcttcgtttcttctcttcgttgactttggggttcaggtgccccagctgcttcgggctgccgaggaccttctgggcccccacattaatgaggtaggtgaggcgcgcggcgctgggagcagggaggggtgaggaccggtgggacgcgccggaacgacggccgaaagccgcccctgactctcctgtctccgctccctgccttgctcgcaggcagccacctggcgagtctgacatggctgtcagcgacgcgctgctcccatctttctccacgttcgcgtctggcccggcgggaagggagaagacactgcgtcaagcaggtgccccgaataacgtgagtatcgctccgggccgccgggaacgcccggtgggttttcgtgggtgtggtgggggcgggcggagccttggggtcaccaagagccactgaacgagggtaaggagcggccaccgcgcggactccgcaaccttcccgggatagcttccgtgtccttggctcagctgtgtatgcccgtggtgcgagcactgcggagccgcctggggcgcaagccgggtcttcaccagtccccgggcgcgctgtcggtagggcgggcgctctcgggccaccgggcgggaggtggccgcgtccccagacactggctgggccagagtgagtttagcgcgtaggcggccccgtggcgagagcgcaccgagagagcctcggtgtgccaattccggggacgtccacgggacctggagggggagggaccagccgcggcgctcgctcacacgcaattgggcagacaggacataacacccgcaatacagacgcatcacctcttcttcgacccgggagtgggccgagattgcagcgctggcgccctgggttcccgggtgcttcctgcctgaccagtccccatgtctgggcggtgcagtcgcgcgtggcccgccagcacgtcagtatgtcgggtggcaacaggggaccaccactgacaggtctctcccgccctgtccccgcagcgctggcgggaggagctctcccacatgaagcgacttcccccagtgcttcccggccgcccctatgacctggcggcggcgaccgtggccacagacctggagagcggcggagccggtgcggcttgcggcggtagcaacctggcgcccctacctcggagagagaccgaggagttcaacgatctcctggacctggactttattctctccaattcgctgacccatcctccggagtcagtggccgccaccgtgtcctcgtcagcgtcagcctcctcttcgtcgtcgccgtcgagcagcggccctgccagcgcgccctccacctgcagcttcacctatccgatccgggccgggaacgacccgggcgtggcgccgggcggcacgggcggaggcctcctctatggcagggagtccgctccccctccgacggctcccttcaacctggcggacatcaacgacgtgagcccctcgggcggcttcgtggccgagctcctgcggccagaattggacccggtgtacattccgccgcagcagccgcagccgccaggtggcgggctgatgggcaagttcgtgctgaaggcgtcgctgagcgcccctggcagcgagtacggcagcccgtcggtcatcagcgtcagcaaaggcagccctgacggcagccacccggtggtggtggcgccctacaacggcgggccgccgcgcacgtgccccaagatcaagcaggaggcggtctcttcgtgcacccacttgggcgctggaccccctctcagcaatggccaccggccggctgcacacgacttccccctggggcggcagctccccagcaggactaccccgaccctgggtcttgaggaagtgctgagcagcagggactgtcaccctgccctgccgcttcctcccggcttccatccccacccggggcccaattacccatccttcctgcccgatcagatgcagccgcaagtcccgccgctccattaccaaggtcagtcccggggatttgtagctcgggctggggagccctgtgtgtgctggccccacttcgggacacacgggatgatgctcaccccaccttcttcacccctagagctcatgccacccggttcctgcatgccagaggagcccaagccaaagaggggaagacgatcgtggccccggaaaaggaccgccacccacacttgtgattacgcgggctgcggcaaaacctacacaaagagttcccatctcaaggcacacctgcgaacccacacaggtagggggacaaactgcagaagggaggggggttagcttccagccccataggctaccagtggacactcctcagtgcctccttgacttcccaggttagcttccagccccataggctaccagtggacactcctcagtgcctccttggcttcccagggcagtctatcgccttgatctccgggatcactggagagaacagcaaaccggcgcctacttttctgcccaggagccttttgcttgatggatggtatctgtgtttgaatgtgcaattttgttaggcttttaaaaggcaggagattccccgcggtctgtgggcctctcctagcttggcattataatcaagaaattatactttgctatgcaaaagcatgatggcttttttaaaaaaatcgttttttaatgttcccttcccaggttcaccctccctttttgttattttgaattctg

SEQ ID NO: 134393 - DNA, 1561 bp, Homo sapiens
tgggattacaggcgtgagccactgcctgtaatatttgatgactaaattgcactgtagaataataataataatagaagacacccattaaagaagaattaaacactcactgatgacttttcaagccacgcactctcctttccactttatggatgagaaattgagtcataaagaggtgaaatggccagtaaaggtcaaaggacaactcgttccttcggctcaggctccgggtaggtcaggcccccctaaagggacttccctgggaagtgaccatgtgccaggaagtggagcgatgcggtgggatcctagctctcaaaaagtgcacaccgagcccgccgcaggcgtccttgcccaccgggaagggaataggaaacggcgatctttacttcaatcttataacgctgcctcccccacccccactctccccttggtttgtgatcagtaattttccagctgggaaatgttttgctctcatcttcttagcaaacagtatttttttttaaaacgtgaatgtggtgttcggtatcactttctaaacgtaggtttggcgaggtgtttactttggattccggcgttcggcgcgggactccgcccccctctccacggagccccctcaccggcgaacgctggcgcttaggctggtgtcaacctaggaaagagaagagaggggacactggggaaagtggtggaagctcgggcaccgggcagagagtgcgctcacccctttttgagttctagttgccaatgtcctttgtcgttgtcacctgtttgaaccctgcgattctggtacctattaggtttcctcagaatatttgtgatacctgatttttccactcctcgccgaccacagaagcattcttggaatgcatctcgccccgaatgaattgactcggccctccctgccaacgccaggaatccctctaagatccagagtcggacgcccttgagtgtgacttccatcctctagcttggctctggccaagggctgccagggttgcagctgggggatgagagtgttttggcagggaaaccgaggtcctccttcctatgacctcgaggagttcaaccccacccccctatataggatcaggccagttactttaactctgatttttactttaagcccttttcaaacggaggaaccaaaaaaggaagacacctgccacttcctcccctactcctttaattgtgatggcaacatcttgggatgctgtgatttgagggctgcatgggaaactcaccactttttcaggaaagccaaagtccctcaccctggatgaacagtggatgagcccttgattggcagccatctcccttgggatgtaaacgtgggtcaggacttggaatttccaacttaggtaggcagcacactagattatttctgctttacttttatttctctaaggcagtagcccttccccctcaaaaaaaaaactatctgtaaccaccacaatgaaaaaacaatattgcacagaagaattggaaagccaccattattatgtcacataatcaagacaagattctgaaactcgattgaaaaagatgaacttgtttccaaccggcc

SEQ ID NO: 134394 - DNA, 1080 bp, Homo sapiens
ctcccaccttagcctcccgagtagcgagtatcttgtggcactgattcttttttttttttttttattttgatagagatttcgtcatgttggccaggctggtctcaaactcctgtgtttaagccatccacccacctcgacctctcaaagtgctgggattacacacgtaagccactgtgcccagcctcatttacagatttaattatgtctgtacactccaaatagtcctcttgtctcctccctcagagccccactggcattctccagctagatctaatccattttgctaacagaccaccacagttctgtctctactcacctccccaccagccagtctttcaacagctccactttgcctagaggaataaaaccaaactgtttggcttgatgtacccaacacttactactctggccctagacaaactttccagaatcttctctagagactgacctcaccctctctaaactcttaactggatgttctctcaaatccctgaatacaggatgtgtattttcatcagctgtttttcctgtctgaaatgccctttctcccctcagggccctcatcgtacccaaactccaaaaagtccctcttaattgttccttggtctatgagttcccttttaagccagtccttttttctctgagctctaacaaagctgtgtaatgactgctaggatgtttacccagtggacttgcatgatctggttgtttgtagctcctgttcccctatggcatcttcaggacaaatgcccaatgaccattaattgtagaatgaatgaagagagcaaaactgacttggtaaactattaatggggtagaggcagggagggagtcaggggacctggtccttgtcaatagcatttctctctagttgagagggtcattggtttggtacttcattttccatcccttctctttcttcaccacttcatctctttctttgaaaagttctatgaaggaaaacttttcaaagaaagttatgaaggaaataaaatccttcataactctgtactctcaaaaacagttggacaaagtaatagaacagtgctggccaaggcattgtaataaaacaaacttgaa

SEQ ID NO: 134395 - DNA, 1067 bp, Homo sapiens
acttccctatgagcaatgcaaagctgactaaagttcaaaccatgttatcaatgaacatttcctacttcacagagaatatgaaacactttgaacattagtgcctcctcctctgaacttaaatataacagcggtagatatcccagagttcagcgcggcaccagcccttccgccacggccgcctctggagagcagcaaccatggctctaggctaccctatggccatgggcctcttcaagggccacaaggtgaccaagaacgtgagcaaacccaggcacagcagccgccgcaggcgtctgaccaaacacaccaagttcgtgtgggacatgattcgggaggtgtgtggctttgccccgtacaagcggcgtgccatggagctactgaaggtctccaaggacaaacaggccctcaaatttatcaagaaaagggtggggatgcacatccgcgccaagaggaagcaggaggagctgagcaacgtactggccgccatgaggaaagctgctgccaagaaagactgagcccccttcccctgccctctccctgaaataaagaatagcttgacagaaagaaaaaaaaattatatatatataaaacagcacccattccttttgatctccttccctcacatgtccttcctcacttccagagctagcttgtcaccctatggacctgatcctttcccatctgtctttttccaggactgtgttccatcagccatgccctctcattcctgtcatcaattacttccactctggcttcttctcctcagcctgcaaacaagctcaagtattggaaatcctttaaaaaaaaaaaagaaaataaataaaaaccttatgttccccttccagtttttcccttgcaaaatgtatcgaaattacattgaaacgtattgaaaaagtaatctgcacctgttgtcttgactgcctcaattccctttagccctcagcccatcacaatacaaatcccctaagcctccatttaaacatcacactggggtcaccagtagctgataatgaaaactaataccttactagtgatcatgagtaaacttgtcaaacaacacactggcc

SEQ ID NO: 134396 - DNA, 1011 bp, Homo sapiens
tcttactattcttttaatgttggtagatctggtgatgttccttcttatattcttttttcatttttgagataggatcttgctctgtcactgaggttggagtgcagtggcatgatcatggcttattgcaacctccacttcctgggctcaagtgatctttccacctcagcctcccaagtagctgggactacaggcatgtgccaccatgcccagctaatttttgtatttatttatttatttatttatttatttatttattggtagagacagggtttcaccatgttgctcaggttggtcttgaactcctaggctcaagtgatccactcaccttggcctcccaaagtgttgggattacaggcgtgagccactgtccttggccttaaattcttgatattggtcatttgtgtcttttctttcttgatcattctgactaaagatttatttatttattttttcaaagaaaaacctttttgtttcatggaattttttctttttaatttgtttttctgggttttatttcataggtttctgctcatatctttattatgttgctccttatgtttgctttgggtttatattgccttcctttttctagtttcttaaactgaatacttactcactttagatcattcttcttttctcaatatacagttttttctaagtgagcataaccgcatgattttattgttttcagagttaacaaaagttgcagctcagatctggatcattggccttttctcttattatgtcttctcagttcaaaatgcttgtgtctgtattaatagccagcattttcttagatttgcagttggagtttcttagatcaagcattcaagcctcagcataatcttctacatagtttcagcttttcttctggaaattgggcttggtctgtttaccatagccaccctgcctcccattgcaacactgctctccctgggcatacagagtttgtgccctcctgtgctgtgtcattttgtgggctcagtgcttgctactcttcttactgaaagc

SEQ ID NO: 134397 - DNA, 1002 bp, Homo sapiens
gaggcccagctgcatggacttgatgagagatggcttgaagaacatctccgagcagaggaaccgttcctggcacagctgaatctccttcccatccggcagcacgtagcggatcgtatgctcactgagagggactttcttctcctcaatgggatccagggccacaaagcagcatttcttcttgatgtcctccacgatgcccatctggtcctgggtgaattcgttccccgcactgttcagcaggcccagcaggtaggctgtcaggtcagagcccgcgtagtccagccttccggtgatgctgggcaaaggataaccctcgtagatggggaccacgtaggacacgccatggcccacctccaccaccaggccggaggtccttccataggagtacatggacaggcgcgactggtaggcgatgtgcattgcaggggtgttgaaggcttcaaacagcatttcagcatatttctctctgttggtgtgtgggctcagtggcgggtctgaaaccaagaccgcatgctcctccggggcgatcttcatctcttgtcggaagagatattcccagatatcctgcactgtatcccagtccacgatgatgccatgtcgcagagggttaaccagcttgagatgaacgtttgtgttgttgagttcctgccccacgaatgtctccttgcgattatccccagtcttggcggtctccatgtagggcttgcccaccgttgttgagatcttgtgggtgggtcttggcaggccggcaaagccacatttacagtagccagtgcccaggtccacgaccactgctttggtcacctcctgcttgggcctctccttggctgcctttgattcagtaggttcttgtggctctgaactcgtatggcggacccacacggcccgcttcgccgggccatcccttaaagaggcagtctggagggcctgtgtctgcaggggggcctggttgcccaccttcttggtgggcccatcccccatgattgctgctggtggagccca

SEQ ID NO: 134398 - DNA, 1043 bp, Homo sapiens
ttattttcatggtgagtctagaaaacgcccacttcattctgattaaaaattcttccatgttttaaatatcagaaccagacctttcttactgtgtatcttagcccatttgtgtctctataacaacaaccagctttcaaaggaactaatagagtgaaaactcactcattaccacgaggatggcacaagcgattcacgtaggatctgcccctgtgaccaaaacacctcccattgggccccacttccaacactggtgatcacatttcaacatgaggtttagggaaacaaatgcctaaactacagcactgtacataaactaacaggaaatgctgcttttgatcctcaaagaagtgatatagccaaaattgtaatttaagaagcctttcccagtatagcaagatgttaactatagaatcaatctaggagtattcactgtaaaattcaacttttctgtatgtttgaacattttcacaatctcataggagtttttaaaaagaagagaaagaagatatactttgctttggagaaatctactttttgacttacatgggtttgctgtaattaagtgcccaatattgaaaggctgcaagtactttgtaatcactctttggcatgggtaaataagcatggtaacttatattgaaatatagtgctcttgctttggataactgtaaagggacccatgctgatagactggaaatagaagtaaatgtgtttattgataatggtgtgaattttcctggacattcagtttccttaaataatgtattgaagcagcaagaaataatttgtttgaatgcaaattactatcaattactgtttctctcatctgagcaggattggattttgttcctttttagaagaagcaggcaggaggagaccttccaaattgaggcaaagccaagaattgaatattcatgggggaaaattgagtgtatgagaaaaggaggaaactcctctgagtgatgaatgcttaatttgggggaaagagtctgtcaagttttagaaaagagtacataaatttggatcctgtcccaaagcaagtt

SEQ ID NO: 134399 - DNA, 1076 bp, Homo sapiens
ggaagaagcacagcctcaaagaaggcagtccgctggaggacctggccctcctggaggcactgagtgaagtggtgcagaacactgaaaacctgaaaggtatattctcagtcctgatgatgattcctgaccacaaacaatagtgaataggcagtacagacaggcagagttcagtaggtgattaagctaccattttcccaatttgaggaaagatgagaacttttagcaggaagggtcatgtctgcacacattcctgaagcagcccttcttagctggtaactgagaagccttcctccatttggcatccccctaactgaactgggagagatgcttaggccaggataaagaattgtgggacactgctttctgcgtaggccccccagcgtgcttgattttctttttgtagtacatgtgtttaattattccagcatttgggaagaaaaaagataatgtgggagaaaggacctgcagtgggatcatagaaatttttggctttggatagaagctatgtatgattctgtcaatggagctgggaatataacttaccactctttcaaatttcttctctctagatgaagtataccatattttaaaggtactctttctctttgagtttgatgaacaaggaagggaattacagaaggcctttgaagatacgctgcagttgatggaaaggtcacttccagaaatttggactcttacttaccagcagaattcagctaccccggtaagttttctcagagacggtgtgcatttttttcatcattttcatgggttattgtattcacacaatctccaagtcaaaaagttttcctgttcttaaaacataagatgccatagttaaattatcttagatttatgtgtaagctgtcagtaagatttgatatttgcctgtagagtgactagtataccttggcataggttaaatggactgtcattttcctttctggatgaagtagctgtcatggagaaaatgggaaagtcacatgattgctcctggccttcaatgaggttggagtggggagagatgggggaagatggggtcagagacggcctctcactttcctttcagaactcag

SEQ ID NO: 134400 - DNA, 1042 bp, Homo sapiens
acatcattcctcatctataataatctaaccagctcttacttagattttcaccactaatgagaacctttcttagataaatgccgataattcatctacataggcccaaaacctattaataaaatgcatccttggatagtagtattttgcttttttaaaatgtattctactagtgttatttttctcttgtgtatttttccattggacaatatttattagatacattttttccacatccatgggcattttgatggatgtttagccagaaacatttaggtaattttcttcttatttttgttaactgagctcccctcccctaccccccctttttttgtttgtttgttttgtttgtttgtttgttttgccaatcctcccttgctttaggtatcaagtcttcgttcaggtgattttacaagttcagtggtagcgcatattctgggataatgttgatgaactctaagatctggaatctcagtctctaatttgttaatgcttattaaggaaaaagagctcgcttggaaaacctagtaacctctttctttttgctgaattttaaccctccttcactgctccccgcctttagttttttctctttgcttaaacctcatgctcaaactattttccattctgcatctccagcccagaaaaattatatggcatttctggactctcagacagccacattcagtcgccacaagaaacgtttattggtagttcgagagctcaaggagcaagcccagcaggcaggtctgggtgagtatctgcgtgaaggccatcgacgtgcgggggcagtggggttgggtaacgccacacattgtctagattgcttggtgatccgcctgcaatctgattactgtgccatgggcaagtgtgaggcttctgtggagccccttcagggccctctgtgtctgtgtttgtgtgttggtgaagggcaggaccaagcatgaatggggagagctctgccagacattcccacctacccccattcacccagagcagctgaccacttccgtgtctaacaaaatgagtttcctcatttccagaa

SEQ ID NO: 134401 - DNA, 1363 bp, Homo sapiens
catgttgtattcctctctgaatctctggctaacatccagcctggagaatcgaggatttggccagtggctacctctttgcccttgttttctgttctcttccacactctctctgctctagtcacactggccgtcctgttactcctcagacctgctatacacattcctgctgcatggccatggtgccttctctgccctctgcctggtgccccctatctcatcacgtggtttattctcctgacagccattagagctcacactccctgagagctgcaaggagactgtcctctgtccctttactcacgtttgccattatgctatagactatattttgtccctaagtccatcctctgttactataagagcagcaacttggtggtggttcttatatggtttttcatttgtttggttttattttttgccttgctgtagtatccatactgcccagaatggtgcatatgtagttaagagtaattatttgttgagtgaataaatggcacatcctcagtaaggttttgaatgaaaaaatgactgtactaactgatcaactgtaagattttcccaggtaattctttcaagggagttccaagtataggaactaaggcagctacactggagctttagagaaatgattgtcatatttcctcctcagtcctaaatctcctcttgtcacaggatatcagcattgcttatggggagcacctgatgcaggagcacatgtatgagccagcggggctcatgtttgcccgttgcggtgcccacgagaaagctctctcagcctttctgacatgtggcaactggaagcaagccctctgtgtggcagcccagcttaactttaccaaagaccagctggtgggcctcggcagaactctggcaggtaagtacaatcatttatatgtttacatctacaaaggttttaaaaaatttatttcttttgtttggtaattttgcaaataaatttagggcagaatactctgagacagtcttgttctcactgataaaaattaatttagaatgctttaaaggataagctactacagcaagagtcccagaatgcagtggcccaatatggaaagaagtttatttctctctcccatagggatttataggcccttccgttgtgtggctctgcaaccttttaggcagatggttgtagctgggttatctccacagctgtggggaaggaaggagagtggggagaagttagaatcatggtaaaacatttacctttaagttggaaatgacctggatggaagttaaactatcaccttctattccatctcggccacgccatgtagctggatgggctgtgccctgtaagaaggtaaagatgaatttttggatgggtccattctgttatagacag

SEQ ID NO: 134402 - DNA, 1669 bp, Homo sapiens
tttactctagcttactttgtacttaaactaatatgatctgaacgaagatgttttgtcctttttttggtaggtgtttcttggaaatgtggaaaccttcattaaacagatagattctgtgaatcatattaacttgttttttacagaattgaagtaagtattttgaataattcatgtgtatcttttccatagttttctctcttcttgttaaggaaatcaagcataaatagctagagaagaaaaattccttactgttcatttttaaaaattgctataactcttagatgccagttggttttttgctcttttccgttctttttaaaacagcctgtttaaaactatgtccttaaaacatgtcattcagaattattatttcacttgatttttaggtatacatataaaactacttgtttttcctaggagactgaaatcaaatggcatctttctctctgatgatctttcccctcaactttttaatgaaacactttcaaaatagagaaaagttgagagaattgtccagtaagcaacctatatataccccacctggattcgccagtttatatttttctgtatacacattctcattctctataatctgtccatccatcattcatcttgtttgtagacaaattgctaagtgagttgtagacatcagtccactctaccacctgtacttctccttgtatatcattaactagagggcattctttgtgtatgggttggttttgttgtgttttttcaggtcatatttatctacagtgaaatgtccaaatcttaagtgtgccacttagtgagttttggcaaatgtacacttcatgtaacctgaacctctgtcaagttagagggcatttactccttttcagaaagctgcttcagattcctttcaatcagtccctgtcccattccccaggcaactactcttctgaattttttaccataaatcagttttgcctgttcaagaacttcacctaaatggaagcatacagtattactcttctgcataaagctgttttcattcagcatattgtcttgagattcatctgtgtttttatatgtatcactagttcattctttttttattggtcagtagtatgccgttgtgtaaatacaccactatttgcttattcattcccctgttgctggacatgtggattgtactaccctgtttggggctaatgtgactaaaacatctacaaacatttgtataagtcttttgtggacatgttttatttctcaatatttttataattcaactcttttccaaaagtcatttttatttatcatcatcagcatgccaggtgtatgttagtaatttgatcgctgggctacatgttctgttgatgaccattccatacacacctgttcttagagaagaagatgtcacgaagaccatgtaccctgcaccagttaccagcagtgtctacctgtccagggatcctgacgggaataaaatagaccttgtctgcgatgctatgagagcagtcatggagagcataaatcctcataagtatgtatgctgtcaccaggtggcatcctttgaaaaaccgaagtgtgtagttgtccttgtccagcctacttacctttctcattctggtgttcttcacttattacctcagatactgcctatccatacttacatctcatgtaaagaagacaaccccagaactggaaa

SEQ ID NO: 134403 - DNA, 2220 bp, Homo sapiens
agctttcacccatgcctctctggccttctcttgcaggttgcgtcaaatatcacgtcatttgcagtatatgatgagtttttattgttgacaacccattcccatacctgccagtgtttttgcctgagggatgcttcatttaaaagtaagttttcaatgtataaaacagaaatggtcccttctccaatgtcttttggagtcttgatgactttttgaattcttcatttattttggctttttatcaaggagtcctaggctggagaaaatctttagagttattttacttagaccctaatctcaacataatatctcagttaaatcattctgcactttagtaaagacatccaaggaagggagttccttccttaagcagcacattctaaagttaaaaacttttcaggaaattttattatgtaactgatctaatattttatttggaattactatgtagatccccaatgttttaccttctgtgtagtcttttcccactgtgcccaccctccactgtacatctgcgctccatctagtggtttgtaggatattggctgcattttgtcttctgttccatgccctatctatctctgtgtgtgtggcgtgtatgtgtgtgtggcgtgtatgtgtgtgtggcgtgtatgtgtgtgtggcgtgtatgtgtgtgtggcgtgtatgtgtgtgtggcgtgtatgtgtgtgtggcgtgtatgtgtgtgtggcgtgtatgtgtgtgtggcgtgtatgtgtgtgtggcgtgtatgtgtgtgtggcgtgtatgtgtgtgtggcgtgtatgtgtgtgtggcgtgtatgtgtgtgtgtgttccttattctaaaaagccaacttattttctttgcttccaacttggaaatagggaatctttctttcattgatatgattatagtacactgataatgctaagaaatagagaagttgccccaattcttaactgtgtttctccacatcatttgagaagctgtgtatgtgaatgtgcatgagggctctgtaagagagagggcaagttccagggatgagcgtgttcatcagcagggctgatagtcttgaggttcagtgggagagctaaggcacatggttgttatttgttctcttctatttcacataatgtgtgcggtttcaattgcagttaatggagagtggcttgttgtgataattaaggcttattagttaatggtgtgtttagcattacaggccggcctgagcagcaatcatgtgtcccatggggaagttctgcggaaagtggagaggggttcacggattgtcactgttgtgccccaggacacaaagcttgtattacaggtaagctggtttttcagacaagatagatagtctgattgtcattcagccaagtaccaagcataattcttgcaggttgtattttaggctttcttattctttgtatcgtttattgtaaacctttccttgatagttttctgttagctttattcaaaggagtgttgatacaggctgtgaccataaggctcaaagcgaaacttttcttgaaagtcaagataaatatagagaacaacaagattctgctaaaagtgtgctgattttagagagttgtggtaattctctgtgaagagttaggtaaaatggtgtatcctggctatttaaatgttttctacttaattaaaaatgttactgctttaatttatttaagatgccaaggggaaacttagaagttgttcatcatcgagccctggttttagctcagattcggaagtggttggacaagtaagtgccattgtactgtttgcgactagttagcttgtgatttatgtgtgaagacaataagtattttattacaatttcgagaacttaaaattatgaaaagccctcattacctatatcatcaatcagattcttagaggctcttttttttttttttaacttttttactttaatgcagtattttgtagtggagattcctagcagaaagaatcgtgacactcatcatataaaggagggcttctcttaacctgagggaacacatgtgggttttaggtggcctgtgaacccagggagattgtacacaccaaaccttgtctttgtgtatttattcaagtagaaagcccacagctttcaatagatttacagcggggcctatgacccagaaaagcctgagctactcttgtgaaggaaatgactgattttctgaacctatttggaggaaactttgtattggaaagatctatactaatgttttgtt

SEQ ID NO: 134404 - DNA, 1050 bp, Homo sapiens
gcaagtgtattctactcctgtttcctcttttaatgaactaacgtactcttaaaaaagtgattgatgactatcgcagggacaaaaaaccaaacaccgcatgttctcactcataggtgggaactgaacagtgagaacacttggacacaggaaggagaacatcacacacctgggcctgtcgtggggtgggggagggtggagggatagcattaggagatatacctaatgtaaatgacaagttaatgggtgcagcacaccaacatggcacatgtatacatatgtaacaaacctgcacattgtgcacatgtaccctagaacttaaagtataataaaaatatatatataaataaataatgccagcattagagaaaaaaagtgattgaaattgcatgttaagtgttttagcaaatgttgatgttgatggttttttgcaaagagcgcatcagctatttgtgaactagatctgtgaatcttgcagagtcaccttctctggctattaaaccatggaagaactctggtggatttcctgttcggtttccttatccatgcacccagaccgaattggccatgattggagaagaggtaggtgaacacggagcaggaaatttacttaaagtagttacccagggactgatggcattaagtagaaagagcgtgggctttggaggtggacttgggtctccactaaatgcctagacaatagtgggaaatgatctcactttcataagccacaccttattcatctataaaatgggaaaatcagtatctgtctatcagggttcagaagactaaatgagataatatatgtgattagcaaccttttatccctagttgtacaaatcattcaaagttaattttatttaggaggggaaacagaaatgtgatcttgagaatagttttagtagatttttattcaacacatactagaatgcctataattgtggtggatggtagaatgcagtggctggaaaacaaaaccgcttgactaattcctgctcttctggaacttgtgatctattaatttcaatgtaatgattccctttgttgggagtg

SEQ ID NO: 134405 - DNA, 1306 bp, Homo sapiens
tgggcgcctgtagtcctagctactcgagaggctgaggcaggagaatggcatgaacccgggagatggagcttgcagtgagccgagattgcgccactgcactccagcctggccggcagagcgagactctgtgtcaataaaaaaaaaaaaaaaacgaaaataaacatatgaataaaagttaaaaatagaaaaaaaacaagaaaataaacatatatttctgaccttattgattcttgatattttatctgcatggaaagctattttttggcagttattattgttcttattttagagacgaggctgagcaggaagggtcctttgaaaaagaaaagattgcccttgaacccctctggcaagtgggatgaagtctgcttcccagcctctaacggccttcttttcattttcccttgcagttcagctctggactgttggaaactatcactggtatctcaagcaaagtttatccttcagcacctgtgggaagagcaagattgtgtctctgatgtgggaccctgtgaccccataccggctgcatgttctctgtcagggctggcattacctcgcctatgattggcactggacgactgaccggagcgtgggagataattcaagtgacttgtccaatgtggctgtcattgatggaagtaagctcctgggaagtgtgtccatgagcctgcaaggggtcctgagcctagggcctgcagatgtggtggtttgactggaacagtggggaatctttatttgttttggctgtttgggttacttgtttttttattgaatgggatataaggtggggtatgttctctcctgagaaccattgtcccccctcccccaccagtttcctgttatactgcatctgtggccttcacacgtttacttgcctggcctttgaagacactgaaaactttgactctaggtagagaggatgacaacagtacagtcttgtgggattgggtgtgttagctttatctgtttgccctgacacagatttataattgacccttataccaccccacttgtgttgctttgtttcctgatacaaatgcttgctgatatatacctctccagtatgttcagttcatgcataaacgtttgcctaatatgaagattaggtttatattttataatgaggtagaaggtttttttagggggtggggtgggaagggcaagactgaagagtgaagtagtcaccttaatgaatagtttcattgctgatatgaaagggagcactggcttctaagattgtaatgtgaggtggtatattaattcatattctgtgtaatattctacataatactgattttatagt

SEQ ID NO: 134406 - DNA, 1038 bp, Homo sapiens
atttggtgaagtcttaaaaaagacctactggagcatagaatatttgctgaagttgtataatggaaggagaaatagattttgatttttaggacattatacctggaatggtttagataacttattatttttaaagtcatccaaatgcaatgtaaatatgtaaggttttgtgggcaaatggagcctctgtgtaaaacaggaaaaggcactctttcctctgggcaagtacagtcccacagtgggatgaaccgctcgccgagagacaagggacacatgggatttaaaacttccttggataaagatattcattaattcgttcattcattcattcatgtttgctggaaaaaaaactcttctggattttatctattctttagttaggtgagctttcgatattgtaacactctgagtttgctttaagaccctcaggcagtttgattgcatctacacaagataaacccaaccagcaggatattgtgttttttgagaaaaatggactccttcatggacactttacacttcccttccttaaagatgaggttaaggtaagtgcctgagtttgtttcaccctcgaatgtagaggactttccatagctatagagggaattttttttttttttttttgagatggagtttcattcttgttgcccaggttggagtgcgatagtgcaatctcggttcactgcaacctccgcctcctaggttcaagtgattctcctgcctcagcctcccgagtagctgggattacaggcttgcgccaccacagccagctaattttgtatttttagtagagacggggtttctccgtgttggtcaggctggtctcaaacccctgacctcaggtgatccacccgcctctgcctcccaaagtgctgggattacaggcgtgagccaccacgcctggcctatagaggggatttatatttgatatggatatataaatagtagctttagagtaaatagtaataaaaatggtggcttcctagaactgatttttatttaataaaatattgtttttccagtgattttgcaaataatagc

SEQ ID NO: 134407 - DNA, 1254 bp, Homo sapiens
tctagatctgtagctcttttcctcttttgctgttctcagaggccactttttttttttttaatgccgaaaggaggattttgtttgttttacatttttttcttctttttgatgatttctgcgttctaagaaccaacccttggatggtttctgattctagaggcaggctttcaaagtagcttaaacctcttaaaaaacatctgtatctagtggtctgaggcttgtttgattctgggatacttaaggtcccccagtaatattggtgtttgttcccctttttagcatgagtctgctttgccctgggatgaccatagaccacaagttacctggcggggggatggacagttttttgctgtgagtgttgtttgcccagaaacaggtatggaaatatattgcagttaaacaacaataaaaaatttttatcttattaaaattaaggaaaattttctttcttttgctttgagtagggtattaattatacatatgaggcaaggatgtgctgctttaaatgtgaaatgaggttagagttaagaattagaagagtcctttgaggccatttggtccatcctcctacctggtggacacaaatttgtaacaaaattaatctaattggctatgtaaaaccatggcagtttttatttgtaaggaaggtgtttgaatagttctgaattgacaacttttatcataatgttttaagtgtgtatgtgtgtttgactccactcccgcacaggggctcggaaggtcagagtgtggaaccgagagtttgctttgcagtcaaccagtgagcctgtggcaggactgggaccagccctggcttggaagtgagtgggagaagaaaccttagagaaattcttggaaccagagtagaggtggtggtacacatggatacagatgatacagatgtttgtgtaacacaaaaggatttttacgtttcttcatttggttataaggctgtatctatctttgtttcttcttttttttttttcttattccctgaagtctgaattcaactcgaatagtagattttacgcttcttcacagatttcattgttccaaggccgcatatattttgcattcctaactcttaaaaggctgtggttttaaggcagggtatatatgaagccattgtacagagcagaaaatggtgtttagaagggaaggcccagtttgcaaggctctgtggggcaaatggtgcttttgtggaaattagggaaagagcctccttccttggcacaaaattcctacagcagaggatct

SEQ ID NO: 134408 - DNA, 1817 bp, Homo sapiens
ttaaccatcccaacttccctcagcccctcactacccttcccagcctctggtaaccatccttgtactctctgtgtccgtgagttcaattgttttgatttttagatcgcacaaataagtgagaacatgtgatgtttgtctttttgtgtctggtttatttcacttaatgtaatcatctccagttccatctatgttgttgcagatgacaggatcttattctttttttatggctgaatagtactccattgtgtatagtaccacaatttctttatccagtcatccattgatggacacttaggttgcttccaaatcttagctattgtgaacagagctgcaacaaacatgagagtgcagatatctcttccatatactgatgtcttttcgttttgtttttttaattgttttgattgaagttgcagtcagtttttactgagatgctagtgtttgaatctctcttttcaattttctctgtctcagctggagtgtgttgggagtgtagccagtggtatctctgttatgagttggagtcctgaccaagagctggtgcttcttgccacaggtaagcttgttactggtgcctcactggcttttttaaaacattattccagatgtcttacaggcttcatcagctttaggctgcttgaatttcaaaaaatttctttgaaccagtataataccaattatgaaccagtataataccaattatgtatgtgtgtgtgtatatatatataaaacgtagagtgatttttttttggtgactgaagttttgcctcttagtctatcattataaaaagttgtttcatgtaactttttaagtctttgggagtaagaaacaaagtcataaaacttggggaggctgctaagtccccagttagagttaaaaatgtcagcaatatgtattttaacttattctaagagttgctgtatggacacattctaaaagcccttcttgggttctgttgctgtttttcccctttaagtctcatcattccagatgagtttagtaaaccagctccactgatgacatttatatttagaggtatcttggggacaaggagtgttgaagttagtggaggagggctttgtggacttttaagttcaactgtacacacattaatagctgagcataagcaccaggtgacttatctagggaaagctttttggggttttttgtcattgttgtttttttaagtcaaagcattttggatgaattctgtctgctctgttcagactaactccagctccttagcttacagtgccataggtacttaggaatggcaaatttgttacatgaaaacaaaatcatttttgtttgtgtttctctaaggtcaacagaccctgattatgatgacaaaagattttgagccaatcctggagcagcagatccatcaggatgattttggtgaaagtaagtatagctttgtgcaatattttgtgacctacgtttcttcccatttttgaccatttccttgtgcactaatagccatgtcattaggccaaagaactgtgaaagttaaacccccagctattaaatgtctattagcccagttccttcagcccatcccaaatcttaaaaggcctactgatgcctctccaggtctgagggtttaaggtcacttagatagttattacccaaaccctaggaaagtcttaggctgggctttcagtgaaagggactgtacaaggtagtatttctgggatacagttttagggagaagaaaagaagaaagatggaatagaaggctggtttttgttactacgattagatccaatctgcatttccatgggaacaatcagattattttcttgctaaaatctag

SEQ ID NO: 134409 - DNA, 1003 bp, Homo sapiens
tagaaaaaatatttttgaaagcttttatgtaataaaagaagcattaaaaagtatttctggaaatgttatcaattattcttgaaagtagactgggttaatttgcttgtgtttactttggtgaaaggtgaaaaatgaagtttctttggtggcagaaggctttctcccagaggatggaagtggccgcattgttggtgttcaggacttgctggatcaggagtctgtgtgtgtggccacagcctctggagacgtcatactctgcagtctcagcacacaacaggtaagtggaagactccagtgaggggggagtctcaagcatcctcaaataggttacttgctatttgtggaagttttcaaatcagtagccataatagttacacttttgctaattaatttttgcattatatatttctttatttaaaaaattgttaacatggctttatctatatgttaagattcttctaaaactgagttttgtctgctgcatctattaatcagagtgatcagaatgttccaaatgagaatatatttttttaaaagttaaaactggctattcttatgtggtgtagatcacctcttatcagaccctcatcttgagttgcaacctttgtttctcaatttaggaagtctttgtttatctgacttagattttctgttatgaatgttgattggctaaatttagagtccctgaagtctaggcactaaagtaaatacattgtcattacctgcacatgtgatgactgccagtagagctagacttcaagcaattgcttctttctctactttagtgtatagttgagtttctgatttctatcctcaccttcttaacagcaagggtttcaaattacacttggctgattctttaaatcttcttccattacttcattagttgtgatctccttaacattgattatgtcacagaagttagagtattactaatagtaggataatgatagcagcttacatttattaactatcatgtgcctggcactttttaaagtgcttt

SEQ ID NO: 134410 - DNA, 1041 bp, Homo sapiens
aaaataaaatgtttccccattcatttgttctttcaactttcccaaaggaataactgatattacatcttttttgaagaaaacattctaaagttgagaatcttgcctctcctaaaaagaacataaaataggtttcagaattcctaatttgtagaccataactgtatagagtgggtcaggttgctgctataatccatacatgggtgtgtactcagagaggtaagttttttcttttcttggttattctgattctgactaccacttcttcaccccctgaatcatttcatttaaataaatatggtcatttatcactattaagctatttatttttctcttagagattaatgattcatcaagggatagttgtacttgtctcgtgggaatcacttcatcatgcgaaatctgaaattatttcggaccctggagttcagggatattcaaggtccagggaatcctcagtgcttctctctccgaactgaacaggggacggtgctcattggttcagaacatggcctgatagaagtagaccctgtctcaagagaagtaagttactgatgtagaatgccagcatgtgggtatgacccttgatttctcttcttccaaatttctttccccacatggtctttctttatatcttattgaatttatatcctcccaaataaacatcttttgcttcatatatatgccatgttagacatagcttaaatcgtaatccttctttaactctgctgctattttaacctaagtcagtagaactctgaccttactttttgagtgtgtgccgtactttttaccctctttgtcatgcaaattctgtttataagagtggttttttttttttttttttttgagacggagtctcgctctgtcacccaggctggagtgcagtggtgtgatcgtggctcactgcaagctccgcctccccgggttcacaccattctcctgcctcagcctcccgagaagctgggactacaggcgcccgccaccgcgcccggctaattttttgtatttttagtagatgtgcggtttcaccgtgttagccag

SEQ ID NO: 134411 - DNA, 1087 bp, Homo sapiens
ttactacttaattttgtaatttttttttcagagtgaaaccagatactaattgtcttaactctttccagcttcagatggaaaataacggatgggtctcagttacaaataaggacactatggatagtaaaacttgagaagcttttggggtcagatctctggaacatcatgtgatgaagctgacatttttaaaaatcaaatgatcctttatcttttcagaaattcatcaattttataaagaaaacaatattgaaattttgctctattttctgatcatgaaactgattgtaaagctttttgacaactaataaatgtcttggtaattgctagattctaattgtagtgtgatttttaaaatagaacattgcactaatgttctttaaaagtcaaaccaaatatcccaactgtctcaaggacaatttaatccacaagaagctattttgaatatgtgcttagctttggcatattttaccttaactgttttctttatcatctagatcactaatgtcagcagcaaacatacagtagtctgggtgaatgcagggttttccttaaacctgtggactcttcaatccctctgtttaccaagtgtgacaaaaatccccttgatgaccctgtcccagattgtccatgccagcagcaagtttgttccctaataagcattttgtacagcaagggtgggtctgctgtgctgtgtatgtccctcacctactcccaaaagtaaggtaatggaactccacagaatcctggaacaactcctggagagtatgagatgggtttttggttctagttctagcatagctggccagtctgccctgaatattagctgggattctaagcctatcttatagacttaaaagatattttgaactttctcagtattgattgatggaatggaagacaaagacagaataaggaagccaagaatctatttaaattctgaatatcacacatttgaaatgttcactataaaacaaaacaaaaaacatctttctttagtctttttaatttaggagtttaaagcttttcttgtttttgtgggtggggtcatgattgaaggatctggtttataggttttctccttataata

SEQ ID NO: 134412 - DNA, 1032 bp, Homo sapiens
ccctgcattcacccagactactgtatgtttgctgctgacattagtgatctagatgataaagaaaacagttaaggtaaaatatgccaaagctaagcacatattcaaaatagcttcttgtggattaaattgtccttgagacagttgggatatttggtttgacttttaaagaacattagtgcaatgttctattttaaaaatcacactacaattagaatctagcaattaccaagacatttattagttgtcaaaaagctttacaatcagtttcatgatcagaaaatagagcaaaatttcaatattgttttctttataaaattgatgaatttctgaaaagataaaggatcatttgatttttaaaaatgtcagcttcatcacatgatgttccagagatctgaccccaaaagcttctcaagttttactatccatagtgtccttatttgtaactgagacccatccgttattttccatctgaagctggaaagagttaagacaattagtatctggtttcactctgaaaaaaaaattacaaaattaagtagtaactattttcttttaaaccattttttaaagtatgagtctaaaatagaaaaactacctcaccttcttcagcagtttataacaaagtgaaagaagttggactaagagagccatcatggatcttgtcttcgtaatacacttgtcaacctacaatgacaaaaagcatgcaaatgatattctaaaagtagtacttaaaagaccttaccatttatttagttttaacatgataaaatttctccatatggaaatctaagggatcttgaaagagatatggatttaggcacatgagctgactcaaagccccaggacacaggtgcaggggtagctgcctagatttcatgtctatctcatggaaccccagcagaaagagtgggtggaaaattaatcattctactgcaggctgtttaggggcttctcaaaacactccaaatagtggaattaaatcccatcctttgcaattccttgcactctattttgtgggcacaaacccatatt

SEQ ID NO: 134413 - DNA, 1872 bp, Homo sapiens
taaaaatatatgtatgagaagatctttttccttaaagtattagtgatgattttccttcctaagctaagtgtacacatgagtgttttgttttattgtaatttatactgtgtgtgcaggtatgtgaatccatacccaatgtgtgtttgtgagtgtgtatgacttaaatatatgtttccattgtaaaaagttggcccccttttctctacaaaccctagctgttctgggactcctgcctctaccatgggagctttcaccagatctcagagttggaggaatcccctctgtgggctatcatctccagagaacttcggaatatatttttcaaagaaatgttgctattggtggtggtgtgatttgtcctggtactctattcttcaagtatacaggcatcagtggactagcctggtctaactaggatggaatattttctccccttctagggaaaatacactctgagttccagatagtttacatgaaaacaaactttctctttcaaaaatagggaaccattgaacattggttcacatattaaattcagaatcctaagtataatctctttataacttgggatatgagattagcagttgtgatatctatgaagctagagagttgaaatttagccttccaagagcaaattagttaaaggaattgaattctggagtcataacataaggaatgtatagaaaactacatatagtggctaattttaatatatcatttcataagaataattcaagcattataagaatcttgttgaacagagaagccagggaggtttgggggacataataattggactccaggaatactgcagaagttgtcttgagtccctggaagcccttgtgaaaagaggagagcagctgtaagcacagaggccacagagcagggaaggcactgacttgctttctctggctccagatttcaaactaacaacctattcaaagctgaactcacttactagtagagtacttgcaattggtaaaatattcagtcattacatactgaatattttaaacttttgttacaagtactttgttatgctttgtattactattgtatttccttacagtttaatgtactgctttttaagataatcttaatctttttattgtcacagaagaataatgcaaacctgaaatcattaaagccagacaagcctgactctgaggtaagaccaattcctacatctaatcttcctttaacatgaatagtgataaagtcgttgtgattaaaacgtctgtttcataggagcaagccaagatagcaaagcttggacttaagctgggtttgctcacctctgacgctgactgcgaaattgagaagtgggaagatcaggagaatgagattgttcaatatggacggaacatgtccagtatggcctattctctgtatttatttactaggtaaatgtagttgtatttttattttttaaatcagtataatgatatctggtgtaaagaaaaaagttccatgttaaatcattgacaggttaaagtcggtatcaaatatatggtaaaaagactaaaagtagttactatgacaatttacgtaagtgaatgcaacaacaagacacatgtatttaattaggatttagatttagaagggatcttctgctaggtttctgcccactctttccatcattgaaataattttacatcctgcttttttgttatcctgcattgttaatgcctctcccagccagcatcagtacgttaagaaaacatgtcttttatgcctttatacagtgattgactagatacagatgaagattgattagacacagatcaaagaatagagctatgaggactatgtcaatagcgtgccaaatctctgtgagtcaccattcattatgtagagaattcccctaacttt

SEQ ID NO: 134414 - DNA, 1561 bp, Homo sapiens
agcttgtgtatagaaattacttcatagttgtttattgagttgaattgaacagcagacttacttacctttggtcttcaaagtgattctgagggctaagattttgaaattcacacaggtgtatattgtgtttctttagataatttctgctgctgaaacattgacattgcatccatctagtaaaattgctaaagaaaacctagatgtattttgtgaagcttgggaatcccaaattagtgacatgtcaacactgctgagagaaatcaatgacgtgtttgaaggaagacgaggtgagaaactgtccacataatgaaatatgttattattttaatgtaactcttgttagttttttaatgccaaacctcaactgcaaatgaattcttgtcgtaacccagctgggttatttttgtagtaaaatattgttcacaaaaaaattacaaaaatattattttatcctcctttattttagtatccaagcagtaaagtttgttgtacaacagtgtagtaggccaggtgtggcggctcacacctgtaatcccagcgctttgggaggccaaggcaggtggatcactttgaagccaggagttcgagcccaacctggccaacatggtgaaaccctgtctctactaaaaatacaaaaattagccgaatgtgttgatgtgcgcctgtaatcccagatactacggctgaggcacgagaatcacttgaacccgggaggcggaggttgcagtgagctgagatggcgccactgcagtccagcctgggcgacagagcaagactctgtctcaaaaaataaataaataaataaataaataaataaataaaacaaacagcatagtagatctctgaattaatattaacatcctagttttcctattgaaatagtcatttttaaatttcttctgaattgttttttaattataatacaacagctcttctataatgcagtaattctatgttttaattctactaacttcataatgaaatgaatgtagttatttgatttttgaattgctttccttccacttggatggaatctctttccttgatgactacataatcttggaatattgcctgtggtgggtaagttcattggtatttctacaacatgtagaatagtgccatacaatgtataggaaggcatcatttttattctttattttaataccgagtggaagttttgtttattttccattgtactgtgtgtcctgttatttatatttacatgtttatattttttctcttcaaatggcttctgtagtgtcaaagcttgcttatttttttaaataaaatgtcatttacaattatatcaaattacatattttttattgagtatgcccatttaaacatttcatattttaaaaatactcatttaggataaatgttaatttgcttaaaaatcagggcataatagaattatagctataacatcatttgtaaagtatgataaatgtttaccatgcttccacatttaaaaatttctgtgatagtctgaatggcaaatcattttgatgctttgtatttatagttacatagattttcatatgagccaaattttggatat

SEQ ID NO: 134415 - DNA, 1495 bp, Homo sapiens
caaatctcaaagactaatggttagaaggaacctttagactaattgaactggcttcctcttctttacttgtttacataggagccaaaaaacttctgggggaacattcttaaaatgactgtagatatagcttcttcatttaataaatttgatgctgctatgtttataaaccaaatattataactatagggaaactgcttattttaggaatcttgcagcaaatctttttaacattgaaaaaaaaaatgttctctgattttctgttttaagcgtcaagattttcagtaatttcctctgatatagggtctgtccttattataccagtctgcctaatccaatgttagctccattggaagacagtgttgatagaacatgtagcttgtagtaactctgacatagtttagctgtgagaccttgggcaagttacttctctgagccaaatttcttttttttttcccaaatttctttatatataaaatatgtgggcactactaggtctttccaaaggttctttctgttttaatattctgtaaccaccttgccatgattggataggaagtagaaacaatgttatacctttattgatatctgctttgttcccagagaatctgttggtgaccaatataatattataataatcttctcagtaatgtttaagtttattttaataggttttaagaaattttatttgtaaaattttctttttaattataaaatgatactatgtattgtggaggatgaggatgtgaaagttaaactgtagacatattgtcttgtagacctgtcgattgttacgacacatatctgggacagaacctctggaaataacctgtatacatgcagaggagacatttcaggtgactggccaacaggtatgataatagcagattgctccttctgtattgtgtcctatctgagtgttataacaagttgtgtggatggaaggtataaatggtttttcataactagagtccaaatatacatagagaaagaaagataatggaatttctgttggtagtgtgccagaacatggctaaccttccattggagctggtcatctgccaaattggagactggttcatttaattaatactctagtttatatctattttaaaggaagctgtttacaatgcacttgttataacatgtttggagattaagttatcatgacataagaagccatatgttatgtaatattcacatttcaacctaagattcaaatacatttcatgctaataattaggacatgagactaaaacacaaacaaaacaatgttatgacattacttacaagattcaattgggaccaggcatggtggctaacacctgtaacccagcactttctgaggctgatgtaggaggatcgtttgagtacaggagtttgagactagcctgggcaacacagcaagaccctctgtctacaaaaaataaaaaataaaaacaaacaaacaaaaattacccatgtacagtggtgcttacctatagtcctagctactcag

SEQ ID NO: 134416 - DNA, 1012 bp, Homo sapiens
tcaccagtgctacacaactcctactgttacacagggaactttacaccctcccctcagtggaacccatggaactgctttgcggcttctctttattaatagtttttaaagtgctgatgtggtgcttggtcacaaaatgttattgtttgttttctttccttcatcacccttctccttctccaccctcccacccccccacccacacacacatctgcagcttcatagtacagcgacacagctggcagcagatctattaaaataccatgctgatcatgtggttctaaaagcattaaaacttactggagtagaaggaaatttagaagctttggctgaatatgcctgtaaactctctgaacagaaagagcagcttgttgaggtgagtaaacaaggtgctaaagaaattgtagtttaataatggctttattaaactatgtgggaatgttaacacaaatacagttttgggttaatttatctgagcattttctctctcctttggcatcttaaaagcataccatgtatctgttctgttcctgcaacagtctggcctctaaaacaaaacaaaaaaaatgctaagacccacaaatgaacttcttaatcttcttttccttatcctctcagagaagttagaccttggagtagagccatggaggtacgtcgtatgaccttgtttctgtttgaatctgtcagggtctcagcagggaggagatgacacactcaaattaggacaatttgaagagagtttaataaagaagctgtttacaattgcatagacagggcatgggggaaaccatacatgagagagcagtaattggggcgagtggtagcaaggctggtaccaccccaggcccacatcagcaggggaatgtggaatggggaagcctttcagagaactgccttgagaggtttgtgattttaggactaggcccagagacagcccaaggtgaccctcccgggaggagcatgggagtcaaggcccattctctcctcagtcctgctcatctgtggatggggcttc

SEQ ID NO: 134417 - DNA, 1040 bp, Homo sapiens
ttgtatttttagtagagatggggtttcaccatgttggccaggctggtctcaaactcctgacctcaaacgatccacctgccctggcctcccaaagtgagccactgcacccaggcttaattcctttatattcttgaagacggtcaagggctcaagacaatgaaattagaattttaaaaaaattttcttatttttgagatggggtctcactttcttgcccagacaatggtgtgaacatggctcactgcagccttgaccttctggtctcaagtgatcctcctgcctcatcctcccatgtagctgggccacaggtgcatgccaccatgtctggctaattttttgtagagatagggtctcactattataagctcaggctggtcttgaactcctgggctcaagcagtgtttctgccttggcctccgaaagggctgggattacaggtgtaagccatcatgcctggctgaaattggtttttggatgtttcttatataaattttatacgtggtgatctgtttcacatcttacttggcactgatatgtctattgaaatctccatttaaacatcctgttaaacatagaaagacatggttttctatgctttataaaaagcctgctgcccttgacacaaggaaaaaaacaaaacaaaacaaaaaagaaagaaaaaagcctacccatttcattccagactattcagttttaaccaaagtattgttaaaatcctgactgtcagtagaagatgatctccttgtgataaactgagtggctttccacaggcttcattttcattacctcttatatgggtatatccatgtcaacctcatagaattcttgtaaggattaagggagataatgtatataaggctgctgtcaggacgttgcatagagcaggaactttgcgtttgtcctgcctccctctcttacacgtgacaagagttacatgaccttggcaagacacagtctctgtggagctgtttcgtagtctgtaaaataaatgactggcattagatattctctaaggtcctgctggtgaaacaaaatctttt

SEQ ID NO: 134418 - DNA, 1038 bp, Homo sapiens
atttagattgagtgatctgagaaagcctttctgagaaaaagacatttatgtaagatcttaaagatgagtaggattttaatttttaactaggttaggagtgaaagcatggacattctaggcagaaaataaaagagattaattttagacttgagtttattaaagaaaattagattttaaaagttcacctttcaatataatccataggttcacagaaaaataaataaataaaaaaacagaagttcatctatttgtagttagcattgaaaaatataactaaactgaaattttattttccactgtaacttaaacaggtaaattttgaaaatctacttttatagttcacagaatagtattaaaatttattacaatttacagtccaaacaaaattgtaattaacagattaaagagatgcggtaacattacatgtatactttttaaaatttttagcaaagcaagaaaacaaaaagcatcgctgaagaactggaactcagtattttgaaaatcagtcacagtcttaatgaacttaagaaagaagtaagtatagtttgaaatttagcctcttctaattctttgtgattttcatgttgtatgggtgtatgaaatacattagtattattagtatgtctctgtgcctagaaaatggttttaaaagttttcctttgaggccaggcatggtggctcatgcccgtaattccagcactgtggggaggccaaggtgggaggatcacttgagcctaggagtttgagattagcctgggcaacatggcaaaaccccatctctacaaaaaacacaaaagattagccaggtgtggtggttagcacctgtagtcccagctactcgggaggctgaagtgggagaatcacctgatccccagggctcaaggctgcagtgagccatgatcgcgctactgcacttcagcctgggtgccagagtgagactgtgtctcaaaaaaagaaaaaaaaaaaagttttcctttgacatagttattttgaagccatgattttattaatgccatcattctcaaagcttgcacatga

SEQ ID NO: 134419 - DNA, 1079 bp, Homo sapiens
atcttggagcgtatggaggactttactgattctgcctacaccagccatgagcacagagaacgcatcttggaactgtcaactcaggcgagaatggaactgcagcagttaatttctgtgtggattcaagctgtaagaactttttttaaaatcaaagtaaatcttatataatggctttcccataaagttttgcaagatatggaagttacataatcaccaggagtatgaatttgttccagaatgggacaggatatctcatcccttctttccctcctagttggccaaaatatccttcccatctagcacttacaatacttgacatttatttccaggcctgttgactctcattctagccagtctcaattatatgcctctgtcactatcactagttcacactgttgtccctactcttccaccaaactcacctctggaaaattcctccccaaaatacttcttcagagtgaagaacagaggagtagaccccctcctagaggttcttgggacctgagcctgactgctggagccattcacatgtacacaattcttacctctgaggacagctgatttacagagacaatgatttagaaaacttattggggtgtagattcaatgaaaacaagggtagatccagctggcaagtaaaagcttttcacccttgcacaaattcctggtctaaaattggtgggtggccactctgtgagccttaaatgggctgttggtgtgcttcaaacagaggagcttatttgggcaagaatggccaagactgacagaagtgggacagacaggaagtgtgtgtacacaatctcttatagcaggtggattgcaaagtggagagacagagagccctgggacatgtctctagcattatttatttcttaggcccaggctctgtcagaaaagtatttaacatggcttacaatatacagcagtgatagtacaaatctggaagtcatgaacaaagctttggcagtaaagatgatgaaggagggtggatatggctgagactgaagaaagaaggagcagttgatttccttgtaagtagattaatttatgaatgaaagtagatatgaatcacagatttc

SEQ ID NO: 134420 - DNA, 1050 bp, Homo sapiens
cctattagatgctggagaagcaagcattaaaagaattgatacatgtaaaacacataggctagtgcctggtactgttgtgcttaacaaatgttagctagtcttattttttatatgataaggaaagtgaagtttaatctcaattttgtaaaactgtgtatttaagtatctatatgtacaaaacaagactggaaagaattatgccagaattctcagaggttagtaggattatgggtaatttttatttcttgaggctctcctatattttccatttctgtttataaacaataaacatgtataacttttgaacctaccttttaaaacatttgaaactaattttagaatataagtagaccttaaataaagaatgttacatattgacttagttcctctaaataaaattttaaaggcatactatatttggattgaacatttcctagactgctttccagtgaaaggaaggcagccacacctaattatgcactggggaaggcgcttctagtgaaagcaaaatgtgtcttttggaacggaacaatagttcatattttggcttaattgcaggatcttttctttgtaattgaaattttaaaactttatgtaaatgaaatatttaataaacagaatcaccttaatctgttcggattgctataaaaaatagactgggtgccttaaacaacagaaatttatgcctcacagttatgtaggctgggtagtctaggatcagggttcaggcagattcagtatccagtgagggtccacattctggttcatggacagctgtcttctcactgttctctcagggtggaaatgagtgagagagctttctgaggcctcttttaaaaggcattaatcccattcatgagagctcctcccccatgaactaatcgtctcccaaaggccccacctcctaataccatcacattgggggttaggattttaacataaggatttgtggagggggagtgggagggggaatgggacacaaacattcaatctatagcaagaacttaaactcctttccactgcagtctcttccaagatggtagcttggaa

SEQ ID NO: 134421 - DNA, 1767 bp, Homo sapiens
cttttttactctgacaggttctcactggcagatatggtagttgacaaaacattttttcatgcttctcagtctgttgcttaagtctggaattccttcacggcgtgcatactgctgacaacctccttttggccttgctcctggagaccttagaataggagtcttcagctccccgcccccatcgtggggctctgtgcgagctcagagttgtgcttacagaactgattcttacccttcccctcaagtgagttgtcagaaatacacacttggtgttttcatgcaatgaacagttatgaagaaactgctctgtgcctggcactaggaaaaaacttcgaaaaatagttttaagaagtagtgttgaacagtagatgaggctttttcatgtttcttttaaatttcttttgaataagtctaaacagtagtgtgaaagatatactgacttcctgccgaatacccagatactccattaatgattgcattatcaaatgtttccccttcaatccagctcaaagtgtttgtgagaaatacatggtgaaagaatgagcagggtggagtggaaattggaccttccggagaagccccaggaagacattaccactggaattcccgtcccaggggaaaggcccctcccaacagacttgattctggttttggtctaccagtttcaaccccagcacagcttccagaagtctttgcgggaattcagagctgatttaggacgagtcacctatcgagaggacgggaagctttgctggggacgcttgtctgtccaagtaagaggaggccatgtggctgtgtgacagatgtgttttgtttctcctcgccaccctggcgagaaggtgcctggaacccatggaaggggtctgagaagagataagggcggggccatgtgggggcgggacccggcttagggggtggggttgcagggagcccacaccaggctggactgcgcgggcggggcagaggccgggggtgggcggggacatacggtgacgggcgtcggggacgcagggttggcggcggagccctgggggggcgggcccctgggggcggggtctcggttggcgcgagtgtcctgtcgccgccgcctcgggcgggtgggctgactggcggcaggctcgccgcggcgcggagtcccggctgcgggatagaccgagggccatggccgcctctcccggacccgccggcgttggcggcgccggagcagtctacggctccggctcttcgggcttcgccctcgactcgggactggagatcaaaactcgctcggtggagcagacgctactcccgctggtttctcaggtaaagtggcgcctggcgcggcccctcttctccttcccgccgcggcccgcgatggcggccgccgctcgcacgaccggacgggaggcagccgctgccccactttccgcgccggcactgcggcgttcttgtcggaccgcctgtgtggggctccgggacgggcctcggcccgggcggcgagagactggataatccaaactccggcggcagggttgagtggactcggcagcaggggaggctgcggggcgggggtgccggcctgggcctttgcccccagtacctgcctcgggtctgcggctcccgggtgcccccggccgggcgatgccccctccgcggggcgagtggttgagcccagctcccgaggcagagaggacccccgcggggcccctcgctggtacttagggccctccacgataaccgactttgtcaccagttcgcagcctggtcccgagcccggctcctccgcctggg

SEQ ID NO: 134422 - DNA, 4142 bp, Homo sapiens
tgagcccagggatttgagatcagcctaggcaacatggcaaaaccccatctctacaaaaaaaaaaaaaaaaaaaaaaaaattagctgggcacggtggtgtggctatagtctgagctactcaggaggctgatgtatgaggatcacctgagtccaggaggtcgaggctgcagtgagccaagatggcgccactgcactccagcctgggtgagagagtgagacactgtcccaaggaaaaaaaaaagtgttggggggtagttcttaagcgttgaagatttcctttttggaaagtatttaaaggtagaaatattaataatttttcctaaaacatctccctaagaagtcactgataattataattagtttaaatttattcttacactacttaagaaaaatttcatttagaaaaggctaccatgagatcttttgactatatggagtagactgcatacagatctctttatttctattatgaatattttagcgattataatcagctattccactgagtattagatttggtcactaagtaactcatgtttttctttagtcaatcattcattcattcactaaaacatttgttgagagttggctaaactctagattctgtgccaggcactgtacagggtgatggagatcactcataagaaggcctcttgctcttagccagatcatatgtaatactaaatttaaattttttgcattaaaaggctaaaaaatcatttgtttttgttaattatatactggttgatttatagatgtaattagcacatattcataagagacaaatatatacaatgagttactatacatatacaaagtgattttagctgtataaagtgatattgcaaaaaactacagctaatgtttcttgctgggtaattattagcataaatatcaggttcttagaggtctttaagagaatactttagagctaccaaaattagcagcagtgatgtaatatcaccctgaaataccaggagcagaggtgccccagagtgcttcacagctatgatcaggaaacttgacctgccccattgctacagcaacggcataaggactaggaaggtccactagctggggaggtcttggaaccctccgagccagaaagaagcattccagcatgattcctcagatgcaatgaggaaggtttacagaattttcacagggcaacagagatcaagtggtatgaaaaggtaggagttttaagctcaagtctcaaagataacctacctttacattctcagtcagaatttgacccagaaagaggaagtttcttcaggaacagaccgtacgttgatgaagtagaagtcatttcagtaaaaacggagtacagaacttggtcataatatcttgcattttatagatttattaaagattagtttcaagttcacattcgctattcagttgtaaaccgaatggatgggaggggagaaaatacaagctctccacacaggtatgctcctctcttttctgagagagaaggcatgggattttcagcataaattccatgttatgtgagtgctgtttgagttctgaagttcctatcaatatctgttcctgcaagtgatctctgtaagaccaccttacatgctggtcttagttattgttaaaattgcaaggtttcttcacaccctctttgataagaagtgtttagctggcagagctttcccttgacttctgagtctagtgtgggttggcccatgacagtgggaagaaatccaacatgttacatggagaccttgtatgtaaacaaactctgtagcctttgaaagtggaactgctttttacagttaaagggctgctaaatggcttgcagatgagatcttctggctcaccttgatcttcacatgaacccattgtgacctatctggatttcctaggacctgtagtttccatttgggttatattagtgcctcaggaatgtgtcactactggtcaagcaatactcagaaattcaggctgtgaggggttagattagaggaaagtaatttaggtgagctatccagagctttcaacctcagggtttataggaaaaaaaaacaaaatacaaaaacccttaggacttctcatactctagccctgaccttgcagtctcctctgaggggcctcctaagacccttaaaataatattacaataggactttgagtgtgcatttcacagtggaaatagcctctggctagcattacttccaaatgctagttccagctaaaaacaagtactttttattagtttcttgtctttcaacattctgccatcaaaatatattcattttattaacttaccgattattgggaacctgcaaaaaaaaaaaaaaaaaaaaacacacatgctgtctgcagccactgtttggttatttttgatagtttaagagaattataaatcaagttgttctgtctactagagtcagaaattctgtgctagaatgggacttctaaaattaggtggtcctgtcactttctagagaaagacccaaattcataggtttaagtggcttgtctgacatacacatacagccagttagtaacagaattcagaatagaatagagttcttttttttctgtcagtccgttgttctacttctctttccttttcttcatggttgagcagcttttggcaaaatgtgttccatatagcagtagttccaagagatgttaatagatgtaagaaaaaaagtgtgtgtgtgttgggggtgggggattgcatggtcaattaaaatgaaggaatgctgagtttgtttccttactgtaggacttctaagagttttgaacatgctattacacattgtgaatttataaaaggggacaaacactgtttgaccttagactgcactccccttctttattcctcagagcatctcaaaggactacagggtcctttgagaaacatggcccttgatcaagtttacaactctttgagaagacatccctaatggaaatactgaatggcagatctattactgtggtaccatgtagtgtgtaataaatcttgaagtccagaaagcaagtatatttgctgtttagagctatacttaaggtatagagattcttttccacctgtggtgtgtaaaatcagtattgtgtttaattttgcaggtttttcaaggatcaactaatgtgcaaatacagtggtgatatattgatattacattttaataatgcttttgtatggcactttatagttttcagacaccttttgtaacagccctgtgagacagacaatattatccttattgtacagatgggggggctctggaggctctgaaaagtttttggtgatattcccctaagtttataccacaaaatgatggagccagaatttagttgcagaacttctgactccaagtccagagttctttactagacatctggtttcttactagctttttgctagctttttattttacagtgaaaagtatggaagcaaatcctgataattttggcttattatcaaatatcatttattttttattgcagagacccagcagatgtaactctcattgtagccatcccaaagaaaacccttctttgccctttgcagtgccacttatttaggtaactgaagtgtatttccagtacaatttgattttgaactaagatttgatatagagttgtaattgcttacataactctttgaaaatgtatcatccctgggttctcaggtgaaggaggcaattcaaaagtaaaaaagaatattcgaatacaataaataccctctgttctcacacaaatgctgtttcttagctaacttgctttgacaacctactgatgtaacttctttattaatgtgaaatatttatattttgaaataaaattactagtgttgaatgaatcatgtggtaaacttaatctcctgtgtgttgaaaaacttgatcttttgtgaagccaaagtttcatgaatccatccgtctcttaggccttctgttatgccatttcctccggcaccattgtgtacactgaattcttaggagatactgtcaacttcgtaagggaaggtgtgtccaggaagtggacactgggcgccttaaagaggtcaagggccctcagtgcacaggggaaggtggccttgtgataggtaaggaagtggtgagatggttggctgagaagaattggaagaaaaagttggattgaggacctgtccttttt

SEQ ID NO: 134423 - DNA, 1299 bp, Homo sapiens
ggctgctttgtattttaaaacacagcttgagagttcagagttggtggtttgctcacttaactgttgttaagatggcttgaaaagtttcattttatacactggtaccctggcttgaaatttttccactttggttatctatgttactatattatatatttataaagttattttaagaactctaaactacctgctgttaaaagaatagatggtgtaattttttcctggtttaagaaatgtattgttaaacttttctaagacagtcacttttcaaggaagagggctttcacttttgagtgtgtagttgagtgagcaggaaaaatgaatcttctacccttctcccacaatgtattatacgctctttaagaaataataaatcataagtataagggtggggtggcttatttgatgttcagttttatattataaccctgggagatacaaagactgaagctcttcctcctcttccttttctcttcacgcttctttacactattgccaaattataaaacttggctgaccacgttgaagtgaaatacttattaagctgctatgaatggtaacagtatgataaaattcatgctgttattaggttttctccttccaggtggttgaagtgaaaaatctcaggtgtagcaatactctgatttgttaaatgtatccgtttcattatttggaactctgccaataagttagttttcagcagaattttgtatttatgtagtattttcccatctcttagcacagtgccttgcacatgactctaaatgaatgcttgttgaattgaattgcaactttaaaaatatctcagatatcacaataaccagcatagtgctttacattttacaaagtccttttgcacatactatttcacaagtacatcacatcagctttcatatagctttatattattttacatcagttttacactgatggagaagctaaggttcagaaaagtgaccaactcaaagtcgtaaagtgtagtaggatttggcctcagatctttgactccgttgtgtgcagattctgctgtattagtgttccttctaaatattgtatgcagttttcccagtgttacgagattggtgttgctatccatttgttgtgaatgaagacttgtcctatagtacatgacagggctgagagtggactgtagttcttagctgaaccctttctactgtttaaaacaatcatcaggcctatcctctgctcccaggggaatgtgggagagaaaagggttcttggccaggctgtaggtggtggctcacatctgtaatcccagcactttggaaggctgaggtg

SEQ ID NO: 134424 - DNA, 1031 bp, Homo sapiens
gggtgatttttttctccccagacaatttctcatgtctggagtcattttgattggcattctagttgaatagaggccggggatgctgcaaaacatcttataatgcagaaaaatttcaagattgagaaacactgatttgagatagatagatagatagatagatagatagatagatagataatgcatataaacatacatgtgcgtatacaaatcttcacctttggacttgttttcagaacataaaagtctttaaggaaagaaaattcatttcaattattagatcagccagcatctttaaaaatggttggtgtattcatgtcacacataaaccctctcaaagcctcaggagccatagccaggagactaacagtttttcaaagtagagctgtgctagtagaggcgtgcttcagagatccagaggcttagggcaccatccttgaaagagccttgagataactgaacatccttaaaggtaatttcttttctgtgacattttacctgttcccctcttgacactgaagtactttcctcattgagtgctgcaaggttagtctttaattgatctctgccttgcctatgggcctcctaaatatttatatgaattgagaggagagaaaaggagtaagggagggggcatgattgtggaattacatttgaagttcagattgtttattttatgagtttttaggtgattgtacctaataaaagctttttgttatctttagtttctactactgtgagctgttccttaggttttggaacacttactttatattgtacttcaatttattcctccttcccttcctccctcccttccttgctttttttgggggggtggtggtggtggtgcagggtctcattttgttgcccaggctggcctggagtggcatgacctaggctcactgcagcctcaacctcttgggctcaggtgatcctcccaccttagcctcccaaaagtataaaaattagccggatgtggtgtcatgttccctgtagtcccagctactcaggaggctgaggtgggaggatggctt

SEQ ID NO: 134425 - DNA, 1068 bp, Homo sapiens
aaactatattttaggaggttgccaaaagtctgacctatgagtaacagggatgctctcattgttgctgtcgtcatataaaagcataattaactgaattacatgctaaattgtgctcacttaattatccttgatggaggttaacttaacaggtgactcctaaccagtcccaagccaacattaacccatcataggcaggcacctgtaatgggtataaaatatctgttaacattgctggctttattctttcattcctggagctataaaaagaggcagatgtcatccataggaaaaacaattgttgcatctcaatattgttgcatctcaatattattgcagtcagtgttcagttgtatgcatcgaggtgatctaaagaaagctgataatatgctaaaaagcatagtgtattaaagaatgcacattgtattagaaatgtatttcagattttttccagtttttgtgtgttaaaggtcgtgctctttattccagaggtggccatccttacctgacaggcttggcagtggccggtggagcatactacctaggcctggaaggagcaatcatcggtcctattcttctctgcatacttgtggttgcttccaatatctatagtgccatgctagtgagtcccacgaattcagttcccacgccaaaccagaccccatggcctgctcagcctcagcggtgagttaaagcagaataatcataagctgtatttatacattgaactgtcctgtctctgtatttgataagtagcttcatccagacttgtcaggataaaggtatttgagtaccaatgctgtgataaaggttgcagaagacactaagtaaatacaaatcgttggcagagttttgggtttcatataccaagaaaatttaaaacctatattggggccgggagcagtggctcacgcctataatcccagcactttgggagaacaaggcaggtggatcacctgaggtcaggagttcgagcccagcctggccaacatggcgaaaccccatctctactaaaaatacaaaaatcagccaggtgtggtggcacccgcctgtgaacccagctgtttggga

SEQ ID NO: 134426 - DNA, 1054 bp, Homo sapiens
cctcttaagatctgttgtggtgcttcttctacttttccttcctttatttctatggctgcttgttttcctaaatatctctgccttccacatttgcctctaccacatccccccctttccctatttgtctgtgcttccttctacattgtcaagttcattcacgttcttctctactgtgatgtccacaaacctaccctctgacctgcaagcaccctgtgaggcgggatggtagacttgtcatatagatgagagaccagttttccaaggtcatgtacctggcttctggtaggaccagaactagaaactacatttgctttactcttaacttggagagaagccagatggaggaagagtgcttgaacatactgctctggaagggaatgaccttgaagcagggtccttcaactcaggattttttctgtttatttttattatgctgaggtttagaaactaatttctgattgggctttggactcagtacaagttttgacacatgttctgtaggtgtatttataggaccgtatattaactattgattgatagtagcaactacagaacccttgaattttattgcttaagaagagatccataaataagacacacacttagaaagatttttagtatcacattttaagatattgagcctttacttagctagaaaattcagttagatagggcatatcatttccctaatatttgagtttgtgagtatttaacttgttttgttggaagttgttgaggaggagctactgcttagattcttttgctttgttagtgttttgctgatgatgttaagttgtttttcttttactcttttttcagcattagcagcaatccttggagcagtgccattcctggggacatactgggcagcagtacctgcagttcttgacctgtggctgacacaagggttaggatgcaaggccattttactgttgatttttcatctcttgccaacatactttgtagatactgcaatctactctgacatatcagggtaagtaagccacagaatttcttattagtgaatcatccaggcatttccgttttttttttt

SEQ ID NO: 134427 - DNA, 1895 bp, Homo sapiens
aagaagaaaaagttgctaggaatttgagggagttaaattctgttttctggtaaattgtaagaggatttttctctgctgttttatttataaaacttgtgtgccagatcacaagtaatgaggtagaggggaatatattgtcttttcatccctcactaggttacatgaatatgtttagtaactgcaaacaatatacagtgcatttaaaagttgccttgagaacattaccagcaaccaatattctcagcagtgaaagaaagaagactgctgtcttctccacgtggtccttactggattgagccttggttacttgccacccagaggggtgattgagttgcagtattctgttgcacctttgatgtcaacttatttttggcttaaattttttaaataacataaggttaaagaaaggatcacatctctatcttttcctcattgacctccctagttctagacaaattctatacttttttcctttctttttctctgtggtcgattatgtcattattccctccccctcaaaacctaccttctcccttggtctccgggaatactgcactctagtgattttcctcctactacggaaatgatttcattacctctctggctggtatttctttgtctttaggtcctttatgaaaacacaacctgttgccctattttctctccacttgcccttttaagatgtcctgtactcttttataattattctggtgcgtctcagatgtcttgttctgaattttctattaagccttgtctcttatttcagctacctctagggtattttcatcatcctttttgagttcctgttgcccatactaaacaaactgcccttttcttgcatgcctcttccattctggccttctccatgactttgagacactgctattctttccccttcaggtttaaaacctgaagctctgttgttttctttttgctctgtcctctctgtttagttgttgagcagatccttggtattttctttggggtctttcgcttccttttggtatttttgataccactttattctgggttcttgttgcagagtcatatggctcctttaagacgttctctagtgaaagccattggtccggatgacaaagcaggttttacaattggggagccactctgcccctggatccatgtcccagaacactactaaatgactaaatcactagattacagggcttcactttgctcctaacagtatacctcttgggatgctttagaaaagcttggtgtttctttttgcatgtacaaggtcacgtttgccgctaacgtcttctttttcaactacagcttttcttctgtagtgaccatatgaaggtgctttccctgcacccctctgcaccaccccatagagtccaggtttttatgattttgtgctgccttgagattacttacgggttgccacctttgtgctctctgaacagttccttatttcccctccttatagtgctgcactgccttactaatcttccaactgaaaaacacagagcacctgacattgcagattttcatgtattgaattcctatattagtcaccaaatatatgtgtctgtttttatctctcttgtattttcctctctgattttactttggagttaggaatattttttttcccacaaattctctcccaatgacctactttctttgatagcatttgtaagagatgttactttgtaggcttagttacatagtttaagaaacataggaagattttgttaaggcaaagaaagatggtgaaatacaagttacactatcccttattggctctttccaaaaggggaggactggccacagcctgggtttcttagagtttaaactgtattcttggaaacatgttattcacgcttaattttctttccatttgttttggtggtgaaatatctgcttca

SEQ ID NO: 134428 - DNA, 1137 bp, Homo sapiens
agctgggcttggtggcatgcacctgtagtcctagctactcgggaggctcaggtgggagaatctcttgaacccaggtggtggaggttgcagtgagctgtggtcatgccactgtactgcagcctgggcgacagtgagactctatctcaaaaaaaaaaaaaaaaaccaaaatgataaatgatcaagatgatggatatgccaattacccctatctgattactatacattatatgtattgaaacattattatgtaccccataaatatgtagagagcagtcaagggagctggcgagtacttttcccactggttattgtatatactgtgtctctaaaagctgactggtctctcccaccagctcactttctacttgagacataccatattgcagtgaggctagaatactgggaaggggaatgacagtcctttagaaaagagggtggaaccagtgtaaggaaatgtggaggaggcagaatttcactttggactcttcactcctccttttcttcattatttatcttcttccttagacaggtaattcttactcagctgtggtctaaggccctgtgtacactgagtttatagagcttctggactggtttgttattctccccatcccactccttgcttcaaatatcattccattaaaagcaggtcatctgattaaatcctgaattgtcttgttatttttttcttactcagtttagaaaagtagcaagcacaatctggtttgtcagaaaagagagggttgagagctaaagttaagtatcaggaaacgtgtgaaaaagtaagtttcatcctaggatttataaaggatgaagatcaagagctggttaggaagagttaacattgtaaacaatcatttgaagtcaattcaagcttctggtgcagaggagttattattaaatatagttgtgtaaaggaggcatggatattcacacctttagtgccatacggtataaatatacagtaggctttattaggggaaaatcctagctgagaaaaagctgatcctaactaactcttggaacttttattccacagagaggtatgcttaggtggggcatagctggattggatgcacgatggcctaccttccaatggacaggaatcctgctctataatagtctatatatagtatg

SEQ ID NO: 134429 - DNA, 1618 bp, Homo sapiens
taattttaaggctataattcaaggtgttttttttgcagtttaagttcctagggctgtttctttactggctcaaattcaagacttaaaatgtacagattttacagagattcctctgaagagctttctcctgtggagaagatggtagtgagttctctttctaagagctcctgttggatttttcatcctgaaggtttgtgttgaagaggcaatatgtttcttcatggaaaaagattttgagggaaaaataagtggttatttataatttatgaatgactatgaaaatattgtaatgtcctcaaagtgcagtttagcctacaaatatcagtgataccaacttttataagcatcagtcattaatcatcatctatgttgcagctaagtggaaatcattacattcatttatatgatctgtgaataagtcaaaaatggaattgaaattgggggttaattgcatgaccagacagtgatagtgtctgttcgtgaagctttgccttctgaagtatgtggtttctttatgatcactatctcattgaagttttgaaccttactcattattttgattctgaataagtattcttctcagttgaatacatttgcaattgggttttcatttcatgaagttttgagtcagtggcatgcatcctttatccccagaccattttcctctcttcagcagcatgttgtctcctgaatgtatacatcacacccttcttccctgatgctcccattctgcttgctctggtggagatattgcacattactaagttgcatgttgtcacggcctcaatgcaatttagtgtgtgtgatattttcacatgagtgcatgcacacgggtatggctcttgcttgctgggattacagcttttcagtgccagtgggtgggtgtcctgatgaattagataagacagtgtgtatgccatgcgattctcatttggaaagtgaacatgcttcccatcggtaccttccaattttggagaattaaaagtatttggattaaaaaaagtcagcaatgatcatttagtaaatcagtgtttccattttttactttgagcaaatgaaatatttattacaaattctcattgatttaagagtataaacaatatttaaatgtataaggaagaatgtaaagctgtaagaaaatgtattttcatttatttgaagaaatctctcccaacactggaatagagaagcagaaatctcttatgcatatttggggaaattaaattaactggagttcttaaataataatcaagacagtaaaggtatgcttaacctacctgatgaaagattcatctcataaacttaagtttccaaggtaaattaccttaaaaatgtgtcttttactttctcattgtgatgcttcgaaaactgctaaattcattttagtgggctaataatggaactagttttgaaatacacgtttactatttgcctatgtaattgaaacaaccccttgttatttttttagttagcattagagtaagcatccacaatcactaggcattgtcaaggacacaaaaccatgtattactgtatgaaaatattgaattaatatttactactaccatagcctccagatgatctattgtgatgctgtcattgtatgtttctgtgtttc

SEQ ID NO: 134430 - DNA, 1424 bp, Homo sapiens
ccaggtagctgggattacaagcatgtaccacaccacacttggctaattttgtatttttagtagagacagggttttactatgttggtcaggctggtctggaactcctgacctcaagtgatccacccgcctcagcctcccaaagtgctgggattacaggcatgagccaccatgccccaccaattatatataaaatgttttaatcctgttttttaaatttagcatttcattgtaaaatattttcccatgttataacagtgatgtttttaattgctgtctatattatttggtgtggatttactattttctttactattgagtatacaactgtttttggttgatttttctttttttttttaattttcatttgaaataatcctcagttcttagcttttcagttcatggtactaaaacactgtattaaaagcacactagatggctctagaaacttttttcatgaggattggttctgatatccagctttccttcctcgtcagatcttggagtctctgtggatcgttatgagccggaatgtgagcctgctgttcaccactgtcactacactcttgaccatcctcttctacagcgggacagcccttctcaattttgtactctctctggtacgtccacatagataagtacacgtcatatttccttccctgttaaagcatatttctggtttcatttgcaattgcagatgtctgtcttcctatagtttccaaatacgatttttttaggagatgttgtcctttgttttgcagataattttcctgaccacactattttatctattaagttccagtgatgagtactacaagccagtgaagtgggtgataagcctgactccactatctcagccaggtccttcttctaatattattggccagtctgtggaagaagctatcaggtagggataaggtttatgctattcttatttctcccagaactttttttccatgataagcctgttttttgtcatgagcatcctgataacattcagtgctaaactcgtgatggactctggtattttcaaggttttcatctcattttgacaggataaatatgaacagtgcagttgttaataagaaaaagattcaggccaggtacagtggctcatgtctgtaattccagcaattgagattgcttgaggcaggaagattgcttgaggccaggagtctgagatcagcctggacaacatagtgagaccctgtctctataaaaaaattttaaaaattatctgggcttggtggcatgcacctgtaaccccagctacttgggaggctgaggccagaggcttgcttgaggaacttgaggttacagtgagctgtgatcacgccactgcgctccagccttggtgacagagcaagatcctgtttctttgttttttggagatggattgcagtggtgtgatcttggcttagtgcagt

SEQ ID NO: 134431 - DNA, 1022 bp, Homo sapiens
cacagcattgttgggaggtctatggaagcattttagaaatggtaatgggaggtgtttttctggtcattttgtttttgtatttttcattaagaggaaggatagtccacttaggaagaatagaacagataatataataaggggatttgagatagtaaatgaaatgtgcaggtatgctataaatattgtacctctcctttattaatatttaacatctatgagaaaccttcctcatgatatctggttctagtgaatgtgtaggtgacaaatcagctgaactcagtagacgtcaatatactggtcattgcctgtctcaggaaagatttttggcctcagagcactgctcttgtccctgtctgttgattgcttttcttgtgatttaatgaagtcattgaggtgatgctttttatatttgtagatagctctaagttggaaatggcaagggtgggggctaggcagccagtaaagcaaatactggaatttcatggcctgcacttaggatcctacaagataaatataaccacaggttgtactctagcatattccccaggaggtaaagtcatggcctgtgtcacataataatgtctctgttaatgatgggccacaaaatgcaatcatggtcccataagattataatactgtatttttactgtaccttttagatgtttagatatacagatacctatattgtggttgcctgtggtattcagtacagtaacacgctacaaaggtttatagtttaggagtagtaggttgtatcttacagcctatatgtgtgctaggctttaccatttaggtttgtatcagtacactctatgacatttgcaggacgaaattgcctaatgacacatttctcagaatatatctccataattaagtgatgcatgactatattttttctctgcttgcgatttttacataatctacaatgatgtgtgtgtgtgtgtgtgtgtgtgtgtgtgtgtgtgtgtgtgtgttttgagacagagttttgctcttgctgcccaggctacagtgcaatggta

SEQ ID NO: 134432 - DNA, 2001 bp, Homo sapiens
tggcttactgcatccttgacctcctgggctcaagccatccttctgcttcatcctcctccttcttcctcctgagtagctgggactacaggcatacaccaccacacccagctgatttttaaattttttgcagagatggggtcttgctatgttgcacgggctggtcttgagctcctgagctcaagctgttctttcacctcggcctcccaaagtgctgggattacaggcatgagccaccatgcccagccaataattattgttgtatttagaaatacagtggctgtgttgaaatggcgttttgaggtcacgtgactcatgtcccttcctttaaagataagaaagattggaactagagaagatagcagagctcatgtggtccattgtctccaggctccctcccaagtctctgaggcagacagaggtggctcagttctgccaggagagacatttttccttatttagacctctgcattcctgcaatgtcctcttcctcctttgtttttctaaactgttgcgtttgaatctccttcaccggctccatagaaggtgggctgatggctcttagtaagtactgggaaacgaagttaataatcaaaaggttgtttggtgagtggtggactcagagtaaagggctgcagagccactggagatggtgaggccttgttggtcagttcttatccacagtagagaccaccgttcatgaccacattgcttagttggttcagtaagtctcttgggctttttgtatgtttcataatgaactctttgtgatgttcttccagtacttacattgctattgttgattaaactgataccaaacctggctcatgttttctacttctgagttaggatccttttttttccccctcagagagagagtctcgctttgtcatccagtctggagtacagtggcacgatcccagctcactgcaacctccacctcctgggttcaagaaatttttgtgcctcagcctcctgagtagttggaattacaggcatgcaccaccacattcagctaatttttttgtatgttagtagacatgggatttcaccatgttggccaggctggtctcaaactcctggcttcaactgatccgctcaccttggcctcccaaagtgctgagattacaggtgtgagccaccgcacccagcctgagttgggatacattttgtctccataaatgtgttttgttttcagagtttcatgggccttgctattgtgcctgcctttacccagtttctcctctttaagcctgacatataaattaaaccactttactttaaggatttagttaatattctagaaatgtttcttcctctattttctccagttgattccctttctttttttctttcaaataggaaaggttacttttttgttgttggagactaccaatctaaaattagtgtatttagttaatttcttaagaattaccacaagatattttctctcagtgcaacccagaaactatttaaatttttttttttaataaaaattccaaaatgactgaagctgcaaaaagaatgcttgtcaaatcacaagtaaaggcattgttggcttgtttcttggaactgatggcattgttcatttattctttatcccacgaggtcaaacagtcaatcttgcacatttttgtaggcattgtgaagcattttcaagattttatgtaaggagtttttgtaaatgaaaccagcctgccggagttctcttatgaaactgagctgaggtttgcaagaaatgccaagggcaacaaaatatgcctttataaatggtacatctgaagtaggaaaggaatggagaagacttttcatagaacagatggacatatgacaaaaaccagaactgctgttttgggaagggcaccaaaacaaaaatcagatgttgtgagttctgccccacaacatttaagctctaagctctagttccacttactagctttgtgcctttgggcaagttttctaaaaatttgtgagcttcaaattatgtatgtataaaatagagat

SEQ ID NO: 134433 - DNA, 1051 bp, Homo sapiens
tagacagagtcttgctctgtcacccaggctggagtgccgtggtacattcttggctcactgcaacctccgcctcctggattcaagcaattctcttgcctcagcctcctgagtagctgggattacaggcacgtgccaccacgcctggctaatttttgtatttttagtagagatggggtttcaccatgttggtcagggtggtctcaaactcctgaccttgtgatccacctgcctcggcctcccaaagtgctgggattacagacatgagccaccgcacccggccttagctgatttcttaaataatgcaaagttcttttccttggagtacttactgaagtgatgaaggggacctgaagcaaaatgtgacatttatactttctgttctttagattaagatgggaatttcatgtctgcactgttttattccatagaatgtaacacactctggaaggcacaaaggacagaagttgcatgtcagtcgtcagaatagctggctgggagacattctggactggcaggatattgtttcctttgttcacgagaacattgagacatttctttcggtaagaaatagcatttatagttaagctgaagttcaaaataaaaacaaactgtaattccaagttttcttcatacactttgaggcctcatctatcctgtttttaacatcatgacatttacatatttgagaactctaaatgcactaggatgatgttcaaaagccataggcttcaggtgtcactcccttggtatttcccctgtggttgtagagtaactgagagatgaccaggatgtctccagctggactactggagaggcacctgcctttgtgttgtgcgaagacccttgaccagatggaaatatggttccagttacattggagggatgggatgtgttgaatgcttagcttgtcaccttcccacctaacctcctaccatgcatcatcacctctgcagtctgcagcattcctaagtgctaactactgctcctcctcattccataccatattttgtatggtgtcttgcatgtagaatttcacagagggcagttttct

SEQ ID NO: 134434 - DNA, 2360 bp, Homo sapiens
ccagtctgatcaattgtaaatgagaccggacatctctcagcatgcaaatagaggaaggattcgtgtttatagccaacatcctaaaattttacttaaaattctgtggtaattcttaataatagagataaatgtaacatgagacatatgtataatggaaggtcactgggattacaggggaaagatttttctctggacaggtaagatcagataagtcagcaatcatggcttcatttgcaccattctctgatagcgtgaggtagctctcttagagacctaagaatagagcaaagaaaatagaagcaaaaacatgagaaaggaaatttactgggaatactcaggagtagatttaaggaaagaacgtaatatggctagagataaatagtctggaacatttttgtttgctttggaacaaatgtaaatacccagcatatattaattttactctgttgttgcctgaaatattgtaccacgtcgtatctgtgtttttttctagctccataaaattctaggagataaggtgaacaatactgctgtaattgaaaagcaagtactagaactttgggacagactgtatcactcttggtttgtaaaggtaagttattttagctaaagtttcctgttgtaaactaataaagtccttttattgactcatcaactagataggattatattcacagtgggatttcattcatggaaatttcaaaacagcaaaaccttaagcctcaggtcactaaaagtcagtgtgagttgatggttagtctccatggcagaacctgcctatctctctggtgcgtcagtattccatcctcagtctgttgtcacggacatctcatcccctagactagctctgtgcgggagaagtgtaatgcaagccacataaggtaatgttaaattttctaatacttatactaaacgaattttacctgttttagttttttagtgatattttatttaacccaatatgccccaaatactattattttaatatataatcattagaaaaaatttaataagatattttatatcattttttttccatatgtctttgaaatctagcatgcattttataccagcagcacatctcagtttttgagctagccatattttaagtgctcagtagccacatgtggctagctcctactggctactgttttagacagtacaactgtaggcattaataacttttctttgagaaagtgaaactgaatctaaacgcttagagatcttttattttttattattatttatttatttattttttgagacagggtctcgctctgtcacccagactggagtgcagtggtgtgatcttggcttactataacatactccgtctcttgggctcgagtgatcctcctgcctcagcctcctgagtagctgggattacaggtgcatgccaccatgcctggtgaatttttttgtattttttgtagagacagggttttgccatgttgtccagaccatcctatacactggatctggcagggcctgtgggctagcaggagccgtgctgtgtatagagtggatagagttggtggtgatgattctcagagttcatgtaaggagagcaagtatatatgtaagtctcttaatgtagggtggagggggaggagggctgattttaaatttgaatttgttgcttagtgacttgtttgggattatgtactcttgctttgggatgagttgaaggaagattgttagtttttatagatttcaaagacttgggaaaaaatattcagggaatatctaggtgagtatcatagatttgatcccatctgctgaaaaaccagataattagaaaggtatatctatttcttttgctaactctggggcttctgcttacaaatagcttttattacccctcacacctcctgagctttattttatagtagaggaaggtcagtgtttcataagcataggtttgttaagtggttaagtacaattgtcccccagtatcatgggtgatcggtcctaagacacccctctggtaccaaaatccagggatgctccagttctttgtacaaaattggcatatttgttgtctgggcctggtggctcatgtctgtaatcctggctatttgggaggctgaagtgggaggatcacatgaggctgggagcttcagaccagcctgggcaacatagtgagaccccatctctacaaaaaattagctgggtgtggtggtgtgcgcctgtagtcctagctactcggggagactgaggcgggaggatcactgaagctcaggaattggaggctgcagtgagctatgactgcaccattgcactccagtgcagcctggtgacagggcaagcaagacgctgtctctaaaaaaagaagacaacattcctaccatcatgcttgt

SEQ ID NO: 134435 - DNA, 1911 bp, Homo sapiens
ttgggaggctgaggcaggtggatcacttgagatcaggagtttgagaccagtctgactaacatggtgaaaccctatctctactaaaatacaaaattagccaggcgtggtgacgtgcctatgatctcagctacttgggaggctgaggcaggagaatcacttgaacccaggaggtggaagtcgcagggttgcaccgagccgagatcgtgccattgcactccagcctgggcaagaagagtgaaactccatctcaaaaataaaataaaataaataaaagctaaggaaagattgaaaggacatcctgaatgttagagacttaggacagttaagcctggaagtcctgctcatgatgctttggtatctgtgtattggtgaatgatcaacagtctgtctgttatggattaagcatatcaagttcaaagcattattggtacactacacagaaagtgtacttttttcatttttttctttgttttacattagttggcttcctgaggctcaggtagtccaaagagccctgaattctgcggctaacaacgtgtatcagtatggacgagaatggataactcacaaggtaagggaagaaactttctttgtggctttctcttttcagggtctttactggtggttgcttgttgctttgataaaacataagtagaaatgctattcacagcagtaaataggcttaaataaacaggtaagcaacatacaatgaaatcttttgaaagatcacattgaataggggtagtaccctgaacaatctgagaggttggtcatgtactttttcaagatagatgtgattcattacttgtgagttaggacagaatgatcacttggtttgggtagtcaaataaggctttgtagagaaaaaggtattaatgcatattaaatcttattgtctgctgataactgtctttggcagtttccagttattttcatttaatatttgtttttttttcttttactgtttctaagaagcctgcagtatgaattattttgcctgctttgcagatgaggaaacaagactcagcaaggctgagtcagttcccagtggtcgtgtagtaaattgcagagcttggtttgaaactgaagcttaacttcaaatcctttgtttctactgtagcatgctcgcagtgtgtgcccagaactggattaagtgcttttgatgtggcacttgagataaaccttgaaggaatggcagatcaaggaagagtggattttaagaagggtatttgtgtgagccaagatgcagagacaggagtgtgcttgaagagatgattgagatgctgagacaggagtgtgcttgaggaaatgatcttgactgaagtggagggagctttgtgaaggggaaatgaatgatagaggaaaggcagcacagttaaggattagattccaccatatggatttgggatattctttccctccctagttttgcctgtaggaataaaggtaatttgcacttttagtatactgaaataattaggattatgtaagaatcgacaggatttgttgcagtaagacttgtgcctagaaaaatatattagtatgtgattccatattgaaaattcaaaaacaaaatctaaaaaaataatataatggaagatacgctgtatacacatatatggaatcaggctggccgtggtggctcacgcctataatccaagcactttgggaggccaaggcaggcggcggatcatggggtcaagagttcgagaccagcctgaccaacatggtgaaacctggtctctactaaaaatacaaaagttagccaggcgtggttgcgcacgcctgtaatccgagctactcaggaggctgaggcaggagaatcacttgaactcgggaggcagaggttgcagtgagccgagatcatgccactgcactctactctcagagacggagaaactccatctcaaa

SEQ ID NO: 134436 - DNA, 1057 bp, Homo sapiens
caccagcaagcctgggtgacagagcgagaacctggctaaaaaaaaaaaaaaaaaaacaaaaaaaaaaagttagttccttatttgcctgtttgtctcacactgcgtgatgaacctgttagctcacaaagtgctgatattgcttacatagatacacaaacacatttatacgatatattcatgcaaatgaaatgtatgtacatatacgtgtcaagtatttgaacatatctatttatgtatttttttcttaagtaatgtgttgaacagggagctagcatgtactttttatttcccgtagtgcgtatcattagatataatgtatagtaactttgcgctgcatgtttctaaattaattaaagcaaagatgtgtatttatttggctctcaaagcattgttccaataatagagtagaaaaataaatgttaaattgggtttattttttactgagattcttttctttctttatctgtaatacaggtacatcaagagagtgtacacatgattgaagtcacaagtaatttgattaatgaaactctagcaaatcaccctgagtgggcaaagtaagaatattgttttgaaaaagaagagagatgaatggcctagtttcagcatctgtttgcacgaaatgaccttcattgatgcagctgcattggaagataaaagatagggtttgccagagctttgataaatattgtcatttttgaagaagaatgtcatgtaatacagagggtgggaggaaagtgctcaggattttaggtacaattcatggtaaatgatactttgttttataattgaggtttacagcatgtttataatttacaaagcacttcatctgtcttatgtcatttgttcctcacagtgactgtgtgagatagattgaagaaattatccccattttacacatgaggaaacaagatcaaaggttaaggaacttgagataataattccgcagtggcagagtcatttataaccactgcttctgatcaactgaaggaaagtttccactataacatggaaactgtaactcctcaactttctatataatttttaaatttatgtt

SEQ ID NO: 134437 - DNA, 3973 bp, Homo sapiens
cactttttttcctcttttcgtccttagttttatgtatcaactccccgtgcccccattttttttttgcttgaccttctctgtttccttttattcttgaataaatcttagtctctgtttctctttcccactctttcctctctcttactgtctcccttcttgtcctgttctcagctaacttaactggccacatgtgacgaaaacaacaacttcttagcttcttttttgagcatcttaaataattttgtttattttaaatttcaatgaaacatccaaccctcactgtcatcccttggatatacgtttttatttaggtgactgaatttttttcaacctttatggcttgtgatagaaaaattttaccctaacttaaaactaaaaaattggatattgtaatgttaatgtacctaatatgtttttgaatattctatgttttatatgttaaaaatactcaaacatgtttctaagtagaatatcatttacatttaaaaatacatttcaggatatgacttttctgaaaaaaaaaaaatagaggctctacattattttcagaaattgtaatttgtggatacaaatacagtcttaattctgaaattattttatttatgcttgcttattcaaacacatagtaattgaatgcttaccacgtgctaagcacttagattttggagatacaaagaggagtgatacaaacctagctctttccccaggaagctgccttgataactagttttcaattggtttctgattgaaagttttcagtttcattgattttagaatttaacttcagaatatgacatctgaccttccatatcttagaaacctgttattccttttttttaagtctctgcattgtctttgatgccttggtagcatgcactgaaaattaactcttctgtttgaagctgtaattgtcaagattaaagattaactttttatctttgagttcactttagcattgatctcttagtgacagtgcccttgatgaaaaacagataaggggggcacaagcttataaacgtcaagtgaaagtaaatgctgcagaactcatgttgtttttttaaccaacattctttgcttttggatgtttaattcactggagagcataaatcagatctaaattaagaataacttatttagcaatgctgttgctcaccttggggttgagcagtgcattgtggtgtttcagcagttattaatctagttaaatgtagttttgaaatgttagatggtagctttgcatgaaaggaattctagcaatctatcaagtatatattctgaaaacacaagttgtttaaaatgtaggattatttgtggttgtgaaagatgaaggaagttatagcaagataatgtcagatagcatttagggaaagcacagttttaataactgattaagaaacagctactacattgattatatcaattatagtcatgtcataaagcttatgttttcagaagaatagaaacttcaagtagaatatcagattttaaaaagcattttattatgtattatgaaatatttcaaacataaaaagatgtaaagactatctaccaatgactccccccttaataaaacaaattaacctgaaggctgttttgtgcccctccttgattgtgcattcacctcccaacccctcgctccttgggcaactgttatctttgttatttgtcattgccttaacattagatttttttattactgcttttgtaattctaatgatatcaaatggaaaaaatattttgaatgcaactcctcttttaatttgctccaattttatctgtattttttagtccatgcctgtattataagtattataaatactatctgtatatacttttgctaaagtcgtgtgtatttgttaaactgatgatacagcttcataagattttaggtcagctaatggattgtcaatattttgtttagaatacttaccaggttataaattacaatttgaaacatagatatcctatagtttgagaatttgaacatagatatggattatgttgaaatcgactgcctttttcttagctatgacagtaataaactatataacaacagcagtaatgagtactgtgaagtttttaaagttgcttaaagcttttattgctttaattattatgccataatttgctttgccatgctggagatcctgttttgtctttatgacaattgagtatatgtatttttaaagttctactttaaagataagtaattctctttttcgtttttgtgcagatgatcatctggttggagaagatgttagataaaataattagcattttcatcatatttttgttagtgataggaactcttcttttagccctactcctgactgcaaaggtagagtacagtgattattattctcattaataaacccttaattgttagaattgtagtctggattaaaagctagcagaaggggcatggaaaatgttaacttgatttaaaagtatgtacaatagctaaaggatttatgatttgtatattactaattttgccatgaatttgcctagtatattttcttttcagacctcttttacatgcatttttattttatcgaaacccttgggagtaaatacaaatgaaaaaaatgagataatgaagaacaagtggcgcttgttttttttagtttaataggagaattaggatctggtcttatgaattctaatctagttagtattcttcactagatcagaatttgctgattaccaccttccatccttgtctcattgatccttctgctgatatataccatagcacctttatttctcgctttccaggtccttccagcttacatttcctttccccattttcatctcatcaaagaaaattattctctaaagaacacctaaaatgttatctttatagtgatatctcttactattttttttaggcttatcaagtctgacaagatttcccccccacttttatggtacattttaatctttattttatctgaaccgtattgaactccacaacccagattttggtatgttcttttcaaggagttggtgaagcttatgtgaaatcatggatacaaaattttttttattcctttagttcccatagagacatgttggtaactataattgataatctaattaaccaatttgctaaagaactgcactatttcttcagtggcatctctgcttggaagtcctattcttagtctcagcttcagtacaccctcaagctatcttatttgcttctaaaaatctcttctagtacttctgtttcagtctttgtatagttcctatctgttctttggatattaattatgtatagtcacgtatatatactgtgcagacttatttagaggctttttgtcatattttgcttaaacctgctactgtgcaatcttacattccagttctttcattagtatggtctttttttttcctttctcctctcttctacacttctattctacttttccttcttggtccctttgcgtagcatcttttgcctggccatctcagttttatcttttaagtcctttttctttgttcatcccctgcttcagtgagcttttgcttctctgaactttgataacaagtattactgaaccatttatttctgggtgtagaattcatccaaactgagcttttgagggaaccttattggttatctaattcattctcctggccagtacagctgtcattctctgaaacatccatgacagtatctacttgaatgtttaatggacatctcaaatgtaacgtcagagactgaattccagaccttcctccagttgtctgttcttctcatagtcttcagtgacaactccattcttctgcttgctcaaatggaaagtctcaggatcatctttgactactgtttttgttttgtatccacatccagtttgccagaaaatcctttttggctccaccttcctaatatgtcctgggataatagcagggtgaggaagtcaggtaattcctttccacagaaatcaagaataaaacaacatgaaat

SEQ ID NO: 134438 - DNA, 2190 bp, Homo sapiens
tggattcccaacaaagatgtggttatcatcatttcaatcattatatatcttaaaggaatactacattccgttgattttaaaactttgatgtgttacagtttttccgtccctagtttttcctttgtctgggatggtttccttctcatgctttccttttcttttcatactatggttgcattctctaatgatactccactgttcttatcttctctttctcaccttaccccctatcctcaagctctggcactggctaaataagaaggtaaatgaacacccagatgttggtttttactattgaattccgtaatgcccctgtatcgcctttttcactctatgtttctgtccatgtgtcaaactaagtttttgttttcaaagttttaattataagctatggaaggttgtgaagcatgaatactatcacagtataatttggtaaaaactcagcaaaggctgtctaggatatggatggtatctccttgctcaggtgtttgtaagaagttctgtctcatagtccttttgtcccctgtaaatccagttctgtaaatgtggctcagcctgatattctagtctcctttgatgtgtgaaaacacattaggcaatagttattgtaagggcaagagagaactctctgtttgatactttttctataaaagacacaggaattttttaaaaagacaaatctgtgaaatatttgtatggtttccttggcagataattttatatattgtctttttttaaataactagtatttcaaaatttatttttaacttaaaacagatagtagtcatgacctgtgacatcgaattttgtgttttctccaaggtatgaggttgtgtctatggtaaatgcttcacatgattggtatggcattataataggcacacttttaataacttcaataaaggctaatccagatacattaggaatgttgtacctcgacatatagtccacatatcgtaatgtttaaattaattttaatgaattaaatagccaggccttgtggcacacacttgtagtcctaactacccaggatgctagggcagaaggattgtttgagcccaggaattcaaggttgtagtgagcaataattgcaccattgcactccagcctgggtgacagcaagactctgtttcttaaaaaaataataatttcaatgaatctctaggacagatagcaagagatgacatcatttatatatgttgtgtttaaacataataaaactatatatatgtcttttgtggaaatattatatcaggccttaagaaagatgtagtacttcttgaaaatagatcaaaatgagacttttggatgggttaggatttcatttttttctgttgaaatagaggagaggggagacttgacaatgcctaaagttttaaagttgagttgaaaggaagcattgtgtaaaataaacactcccacactctcacatggttgtgtatgtctccattccctataaaactagtatgggtaagtgagttcaatccttggcaaatgatgtgcaaatataagtcacgttttaaaattttgaccaaagaatgtggtttctaaaaaatttttatttgttctaattgttttttagagacagggtcttgctccgttgctcaggctggagcagtggcacaatgaaagctcactgcaactgtgaacttgggctcaagcgatgattttgtacttttcttcaatttgtgttatattgaaatgaaattgccctcaagagatgggggaaaggagaattaaattcattggattaaatttgatttaaccttcagtggactaaatgagctagattacctaatttatgagactacttcataactgaatcatcgagttaattttaaaagatctctaagatcaagtcctttttttctttcctttgatgattccatataacatagtaaagcattggtgtaaagatagagtaactgcttgagattttgagcgggtacattccaagaaaggacatacataagttgagaactattttattacattacatctcaaagtcagaaaattgcagcactgggtaatgttggtatgtagaaatttcaagtggagtgaattaggaaaccaattcaagagaagagagggtgagagagcacacatgggttaattgaaatgtaacccatttctcaagagttacttgttttatttcttttcctttttttttttttaaatttgagacaggat

SEQ ID NO: 134439 - DNA, 1615 bp, Homo sapiens
caaatctctagagttagggaaattatgtactgattgagatacagggtccaaacttgaaggcaagcctcacagttgagtaacacttctttctggccctaccaccttcttaattggcttctaacaggaagcttaacctctgcttaaagagccacttcactgcccaactccaggaggagacagtgtggtttgagagtggtccccactgaagttgccgtgcacagccttgggccatttgtagcagccctgctagtattcagcttgcttctctactgaaccctggcatctgttcagatgttgagagcagcatcaaatggggaaataggaacaacattactctgcagtggtacaaaatcatgatgcgtatggaataccttatacttttctggtcactaaataacgagcaactaaggaaaagaagaatatttgacaagaacagctataaaagccaaggagatgaggaaatgtcaggggtttgtattatttacccaggaagggggaatatgcaaggggccagaattgtagtcactgaaatcttcacgatgagattatcttttgtttatgtgggctgtaaaataatccctgactctacaaggattcagacttcaggaagaagataatatataggcaggtggggatggtttgaaaagttacttggtccaattccatctgtgtggggagtactttgagtcccaccctgctttttaacattgatcttctttttaatactagctttgttgttttagaaaggttttgtgaaattaaggtaccttttcatgttacaacttgttaatctatattttgtttatatatgtattttttgtctttttttagtctggatactcaaaaagcttgtcattcactttggagttgtggatttcctagagaaacgctaccatgtgtggtggggcattatagaaagcttcctgaaggagcggcagggagctctcgcgccttggcccattgtcgggcttggaaaattcttgttaaaagttgatagcaaggtattgtattttaaggacttgggctgtcttaatggagttaatatatttcgtggtttgaacttttccattctatggtgtttatattgtaactgttgataacacatgtaatatctaattctatgatgaaagtttaatgtttaaaattatggtttacacaaggataagatgggtttactttaaataaggcttgtgtaagtattttttcctcataaaaatgggagaaatggattttctgatttaattccttcattatattaggaccaaattgaaatccagagaggttaagcgacttgcctaaaattatgtagctaggtagtggctcagtttagtgaatatttttggagtaattaccatatgtcagatactgtattaagtcctacggaaaatcagatgaatcatggaaaaccagatacagaagccttgtttattggggaaagacagcagttgataaaaattcagagatggcggttagatttagagccttagtggttaaagagcatggactatgaatccatgaagtttcctaacctttctgtgccttggtttccataccagtaaaataggtacaatagcacctaccttgtagaatggtggtaagggttaaatgaggtaat

SEQ ID NO: 134440 - DNA, 1031 bp, Homo sapiens
ggaagacttttattttccatcttgcagtcatccatttctctgtcattctttctctgaaagtttgcatgcttcatgtgttaatatattgacccctcaaacagacccctctggttgttttggactcgttgtcctgtgtggcctggctttgggaattgcaggctcctgaggaatccagctggtagatataccagctgtagagtcatgctgtactcttgcagagttccagaatgtaaaaggccaccttagtctgtgctgagagatccattagtgccagaggtatttggagttagggaatatttagagtgaattctccttgaagaactgactttagaaatgtcagctaagataaaggaatttggtgtagtaggaacacttatttttcttgcacatggaattatgtttccaaagtggagaggaaatgatattttggttttggactcattcttccaaatatctgtcacacccaccatcatgaagtttccaaattagaaagataactcagagcaaagtcaaacaaaagcatctgttaactagcttgggctttagccctgcacttttaagggtagaatgttggtcctagtgaggtgagctgacttaccagggtgcaagtgatctcagtagtaaaaattgactcatagctgaacttttaacattaaaaacacttaaggaaattatgatacagcacttggtgggctactgtatgattgcttatgaaaattatgaaacaacagggaagtcattcattcacttatttagtgagcacctcctatatatgagatactattgtatgtgccaggaattcagtggagggagaacaaaacagacaaggtcttagctctggtggagctgactttcaactgaagagaaagaatgagaaaggataagtagaacatgctacaactatgtaaaagaccagggggaaaatgtgaggttgggattatgggagttcttatttcttttctcttttttctagactttttttctgacgtatgatacttttgtaattaacaatccacacattcaacgtgaca

SEQ ID NO: 134441 - DNA, 2358 bp, Homo sapiens
catctggcttacctctccagccttgtttatttgataccagtttcttactagctgtctgtgttccagacacactgaccttctttcactgtctttaatatgccgggttcttctcacagctttccttctgcccaagatattgttaggatgtcacaagatacccagcatttctttttatagcaaccataatttctatacacacgtttatttgtgtggttatttaattcatacctttactatactccctgggggcagggtctgtgtctttatccccagcacacagtacatgtaagaaatgaaagacactgtttttctctgtcagccctttctgtcttattggcatttcaggaggaccttggatacacaggccaggagagtaaggtcctaatccagaaatctaacttaggctttcctctcagaccatgagtttgaatttctctcatattgagagatacgataccctatctaaaaatgaactctttcaggtcacaggggcatttattagaggagggacagagtatgactgagcaaggtgagtactcttatcctgatgtctgaatctaccaaagatccacctcaggctctggcttgctgctatctgggagagggctagctttggatatttgggtatgtggagttaattaacttggagctgaaattcatcggctttctgaaggatcatggctcttttcattggggtgacagaatcctatgttgccatacggagtcttggcctaccaaaagtaatgtctcagttgtatgagtgtgggtgtatgatttggtgactaggaattgctagtgttcttagttgtgaacaatagaatctaccccaggtagtttaaataaatagtaggaggtattggttagcatttacaatttttgcacatggaatttctggaaagaccagacaattaatcttggaatctgacacaggtggaagcagtgcaatcaggagaaatgctcagtgacactgaaggactgtttgggcagagggccacggctgctgctgctcgccgtgaagttagagatcagacatcagaacttctgctaagttgctgcggaaaaaccatatgccttcctgactgactgtgtttgatacaagagctctggctttcaaattacagtgtgccacttcaggctctcaagtcctgcacaggtgtacctgcttggtagaaactgtgtcacatgtgagacctcggctgcaggggaatccaagaaatacaatttttttagctctccagtctagtgtgcaagaaagtgtgctagaacccgatgctatgtgagctattcttccttgtctgctatagaaggttaaaggttgacagacttcctttgccagtgaatgttttacttgaatttagtgcaaatgattgagcttggtactacctattaggaatttaacatggaaatatataatgtgaaacaacgtcatgatgttcctttagattttcaagtggtggattttgcctgtactgagttatgtaatttataaatctatatggttttgcataatagccatatattcgcatactcatttgtggaatgttgttatgaccaccaattgtggattatctcgtactaacatgagacctagtcatacaacatagcctaagacagtcagatcagggagctcacagacttgatgtggtagtgtttttcaatagaagtatgcattaaaatcaacttgttaacaaatgtaagtgtgggactccaagtttacatgtgtagtgtctgccacatccaccagcattaagttcccaaaggaggaaggtatacagagagtcaagggatttgcttttttagcacactttcatgtcaattcttaatggttcttccttggtgaagaaccacttattcagtgggtcagtagtaaccattttattttgttgttgttgaaaatgttggactgtgtttaaatttgcagccattatttcctactttaaagagttttgaaaatggatgcttcttttacaggggcagagttaccagggcaggttatctccatggcagcttctactctggcaaacttggccatctctatcacagggtatgaatcaagcagtgaagaccagccctccactcagcctgcaggtgactgatgttctggtgacattcaaggttattctggaaaatgaaatgtacatagaaagtaaaattcaggacaccagcatcacaaaatgctacttactcctgctgatccttcatttattctctttggttcctatttttatgcccttttccctctcatctttgttctcatatatcactttttaaatacatgtaattatgtaacttcttgagtttcttaccttggttctttgttctttcctttttaaaaaaggcttttcttatttttcttct

SEQ ID NO: 134442 - DNA, 2030 bp, Homo sapiens
cagtttatcatctccctgcctggactgttgttttttgtttttttttttggactctgattccaggccaattccttgtggtttttgaggtgctgaagggtatcattgagacagaagtcattaaaatacagatctgttggataaaagcagtttgccaaatcttatattcataattttcaaatactttgtttattttctctgtgtgctactcctttcatgcttttgtgaagtctgaggtgctcgaaaaatgtgctgagtcatttgtgtattaactagaaaaatagtgcagtttccattgatgtagctaagctttactgcatatttactgcatattttagtgccattagcaagttggagagttattccttaagccacagttttgaagatttaattgattgggtttagctttttctcgaatctttcagtgcctactctacagatacaagatattttgcttagctctgtggagagatctaaaaatgtctactaagggaagatagatggctatactataaagtagaaaggggaggagaggtacaaagaaatactacagaagggttagtggcttctgcttctagtttatactgtcgaagccaacagattgatattgatgatgatgatagctaacatttattgagtacttcctacatacccagcattgttctaaactttatttatttatttttcaagacggaatctctctctgtcgcccaggctagtgcagtggtgccatcttggctcactgaagcctctgcctcccgggttcaagtgattcttctgcctcagcctcccaagtagctgggattacaagcatgcgccaccatacctggctaatttttttgtatttttaatagagacggggtttcaccatgttggccaggcaggtctggaactcctggcctcaggtggtctacctgccttagcctcccaaagtgctgggattacaggtgtgagccactgtgcccagccagcattttatatgtattatttcacttcattctcaaatgagatacgaatttatgtaagcctcatttttacacatgaggagactgggacatctcgacgttaactaacttgcctatagccatctaagtagtaagaatagacctgggatttgaacctggggagtcttctttcctcacctgtgcttccagccactgaattgtgctgcttcctcatagcaaatgtgagaccttctatgccctggtcccaacctccctctgcattcttacgccactctgctcttctcattcacactatcttccggtcttattgaacttcctagagttctttgaagagggcacctctgctttttcttgcctttgtgtcttcatatttgtttttttgtcttcctgaaacacttttctacccctgctctctaagacaccagtctctcaggagcttcctctccaagatagaactgttctgtcttctttatctagcttacttttgttaaaatggatttaaaggatggcatctttcaatattcttgtcagacagctcctttggaaacccttcccagacctccctgcatggatttgatttccacgctgctccctaacagtttacacttactttacattagctcttaagtatcagactgaatttgagaccaggggcttagtctcttatatcagcatatagcctagtcgcctatttggtgaatgaatgcttagtaggcatttagaaatgtaagataaaatgcagctgaactgaaagtccattatttgaagagctatccaatgatcttgttattttgcaaaaaccatcaagggacttacttttcttacagtgtctcaagatgagtaaccatttaattaaattacttttgaagaggccagttcagtaattaaagacccttgactagtctgtaatcttatgtaagagagaattcttaatttttaaaatttttgacctgaaggtctttgtttttgtttttcctttttctactgtactgtcccaggccattaggtgttcccaaactttgctcttgagtggggcctaagagatccctcctgggtgtactgctgcaa

SEQ ID NO: 134443 - DNA, 2051 bp, Homo sapiens
cagttaaaggaactagagatgtttactctggataagaggagggaactggggctctagggtgggaaggagatagaggtaaggaggatataagacatgaaagcctatttctaatatttgaaggactgtcctgtgaaagagtgctttaaacagatctctgtaaccatgagggagagatgtcagagttgtgagttagcttcagagagacaaatctcttttccacataaggatgattcatgtcagagctgctcagagtaatgggttccctgttatgttagctgggtggctgctcagatgttgatttttcagcgtggtacttatggttgagactttcatctcccaagtttgagccaatggaaacactaagttctaatttaacaacacaattcagtaacccagagcagcagatagccttaaagtagtttctagagctactacttattgttaaaaataaaataaaaaacagctatgtctctgtcttcgtttgatgtcaaacaaagcattattctctagctttgttgagttggaatgatagaggaatttatctgcaagaacccgtatgtcagatatgactcattttgaactcagggaaggcagaggagggaggcaggcaggcagggatgttttatgaggttctaggtggactcagggaaatggttatgggtagggacctgtttcttggtgacttgtgaactttttttttttttttttttgagacagagtctcactccatcgcccaggctggagtgcagtggtgtgatcttggctcactgcagcctccacctcctgggttcaagcaattctcctgtctcagccccccaagtagctgggattacaggcatgtaccaccacgcctggctaattttttttttttatttttatttttagtggagatgggatttcaccatgctggccaggctggtctcgaactcctgacctcaaattagccacctgcctcagccccccaaagtgctgggattacaggtgtgagccactgcgcccagccaacttgtaaacatttttgcattatacactgaggaggagacattgatggttttgctgtgctcttttgggccattctctttcttgggagagaaagttcacgcccggtggtattttcaagaaaccaaggcagactttatggctttgagatctatgcctaattctggtcattctggggtgaagtagatggtttgagttcgggatggttttagacctttggtatacgttacaatagactctctttaatagaaccccattaaaggtaggcaggcatgtaccctatccatttgaccaggggcctctgagagcagggatgaacttaattttgagaaatcttgaagtttatctaatggacttaaatttttttttttttgcctgataagtaattctgtaactaatatatataccagattgttctgtcaaactacaaaactgagttttgtaaaaacaagtactaggtttttatttcactaaaaatgttaattcttaataatttgcagcatccctggctggctcatggagaattccagtattcctggttattgttttcctgatgtctgtgggtaccctctatgaaaaacagaatggaaaagagtcttctggtaagaaatagggcattctattaatactactctttgaagtattttggagagtagctttttaaaaaatgctatgatgaaacagctttgaatctatttaaaaacctatgatggtttctgagtggaaaataaattgtttaaaatattttaggttgttagaccatgatttgttttggtattattttattgaggcatgtataacttaaagttaaccataagccattgtattttaattttattaaaatattttatttttataaaataaaatatttttattttattttttagtgacaaggtcttgctctgtttccaggctggagtgcagtggcacaatcatagctcactgtaaccttgaactcctgggctcaggggttttccaaccttatcctcccaagtagcgagggctacaggtgcagtaatcacgtaaaaatggcctacaggccgtgcgcagtg

SEQ ID NO: 134444 - DNA, 1022 bp, Homo sapiens
catcataactctggattaggttctaatcatttgttgcctagattatttcagcagggtcacacttcagctggctgctttcttacttttacagagttatttccccagtaacaagcatattttataagctgaaatagaatcttttaacctgattctttttggaaagctttccttttcttgtttttttcttttctttccgtttcttttctaaacattgatcaacagagaaaactgtaggaattccataagattagattcttaatttaaatccatggtttatgctttgaatattttatctcaagcatttttgtgtataagatgggttttgaactatgtatcttttgttaaacaactatttaatattactacatgagatttcaaatgcctagtatttcaaaacttaggttctccaaacgaggagaacctaggtacgtttctttgacaccatcaaccttcatcttttctgtgctatgtccagagcattcctgctgtatagacacttacagattttgtataattgtatgttcattttcacgtgtatagattttacagctgtgtctttcatttatttaagatctggacgttggtggttggctatgtgttgactgtttcattcaagtggaatgcaagcactgaacgctacttgagagcagtttcaattcctgtctggattatattgctttttcatttaggtgggttccttcttttttttttttttttttttaagtctagcctaaggtcagcagaggctgactgtgtgaatgaaagtgaattttttgtagtgtcatatgttgcatttaacattcttaatctttagaaaatgttatgctttaatctttcattaaattttaatgaaaatgatgtgctttaaaatgtctttaattatgttcattttccaaaaggtccttttaaaagtcaatacatcttaaaaagtagagcacccttggattctcatatcatttctgagtgtcatacttaggggaagatatagataagcagtcaacgataagaggtgctcagagaca

SEQ ID NO: 134445 - DNA, 2508 bp, Homo sapiens
ctcctaaattcatttctttgtccatgtgaacatataaagtagaaggtttttgttttttgttttttaaaacaaagatgagataacatacatatagctctgtaccttgctcttttcatttatcattgtactgtggccatctttccttattagcacttagagatatacgtctttcttttttttttttttgagatggagttttgctcttgctgcccaggctggagtgcaatggtgcaatctcggctcactgtaacctccacctcctgggttcaagcgattctcctgcctcagcctcccaagtagctgggattacaggcacatgctaccatacctggttaatttttgtatttttagtagagaaggggtttcaccacattggccaggctggtctcgaactcctgacttcatgtgatctgcccgcctcagcctcccaaagtgcaaggattacaggtgtgagccactgccctggccacttttttctttttaatactgctacagtataaatcttttttctccccctcccccaccatgccttttagaaaatgttttcaacagattttcttagctctgaatttgtattagaatactttgataaacatttttaaccattggtaattgtataatcataatgggcttaatataaactctaaagtgtttttataaatggccttacctcttgaactaatattacttctgcgaatcttttctgaggaaacacttcaaaatactggaaaaaatccagaagccaaaagaatttcctaaaggttaaaaatacttctttttctgtttataaagatactacataaccttagtagaaaattgagcacctgtaataaaacataaagaagcagattactccttgaaatctgccatctagagataatattttaaaacattttttgttgagtatattttcaccattataaatttacacacgaataaattgacactgtagcactgtatattgatgttcatcatactgttgaaagtctgactaattactcaatttttggagatagcattatttaaacagttcactataaaatgatatttaagttctcaattttttatattgtaaatggcaagtgaatatttttatatgtgtctgcacagtgtgcttctgtaaaacactcctaaaagtagaattggggagtatattttaaaatggttattttaaactggaatgaggtaatctgtgagtttcaggttgatagatgaaaatacatgcttcttgttagacaataaatttctcttaaaaaatctgaagtatgcagtctcttattttttctctccttgcaaatgatactaattccttatgcatacagataagaaacaaaaacttcttggaggtactgtataaattgtgacctccagttcagcttcttactaagggtagtacttactttgtcatctctgttcaacgtttgctcaaacacttttagtaatgattattccatttgtagatagctatagtttattggaaaaacctgtccttttactgagctgtgttatttcctaattcccacgtatttctgctctcagaaccacagaaaatcaagtcttatgcctctcccagatgacattttaaaaattatttgaagatagctacaaaatcttgatatttccttctcttttctgagcaaaactttttttttctttttcccctagctacatttatattatcatgttgtgatttctatttcctttcccaggctgaattttgttgtgtggtttggtagcgcaaaattaattgaaacaatcactttccctgatacgagtattgtacttttagaaataagtgcttctactagtcataggctgactcatactgaactgaaaagtggttcagatgttctctttccattccatacttgtacagttgagttttgaatctcgaagcagaactttgcatttcttttcatatagtttaatcttgtttggattagcccattgttctggcttcaggatatctttttgaatcatgatagattatctcaatatttattgacaactcagttttgtataactgatttgtgtaaaatcagttttttctgttattgtgcctctagtctttcatctaagtgactgacgtaatgtttaatagggtggggctaactgacgtacctctgaagactatccatttactgtggatttttttttaatttcaacaagttgtagttgtctaaattgactgtttttattttcccttgtgaaaatctgagcagcttttgcttatctttagtattctagcaccatgcttctttctccttaagattagaaaagtgcactctggagccagattcctgggttctaatcctgcctctgtcatttattggctgtggccttgggcaagtcacttctctgaaatctgggtttctttcatgtgtaaaatgaggatcataataatattattttgtggggttatgaggatcaaatgagttagtatacataaagcattagaatagggcctggcacataggagtgttatataagtgtactattattgtactc

SEQ ID NO: 134446 - DNA, 1066 bp, Homo sapiens
gtagagacggggttccaccatgttggccagactggtctcaaactcctaacctcaggtgattcccctgccttggcctcccaaagtgctgggattataggtgtgagccactgcacccttcctgtagttttattctctctaaaaaaagcttgggaaactgttctgcaaaaatatgtaacagaagcaaccaagttgtttttccagttaatacccagatgacaataaatgaaacaaagatggttgaaaaggcagagtctctacttaatgttttctacatttaatatgttttttaaccagaaaagtatatgtggataatcgtgtgaaatgaaaggaaaatgtgattgcctattagttccctttacttgaagtgctaagtaaatgttgccaaattttatgcagtcttatgtagtgtctagcacattggtgctataaaaacgactatggaatgtatattttgaaaaggacatgttgttttggagaacataagtttggaaaaatatgccctcttatctgtaactgtggctcattgatttaatgcctggaataaaattcacacttgaataggtttgctcagaggctaaacatatataaagttgacttgttaacctcatgtttccgtgttagtgaagatttaagaattaaaaaactcctaagaggtcctagactagaaattgtgtgtgaaacatgcatgtacaaatccttatttttgttattttaaaggatatttagtgattcaaaatgttgacccaagtaaaatatgcttgttacatttgaaaaaacataagcagaacagaagtttgtatggtaaaagtgaattatccctttccttcccccgccctgcccctggccccgctgagatggagccttgctctgtcactcaggctggagtgcagtggctcgatcttggctcactgcaacctctgcctcccgggttcaagcaattctcctgcctcagcctcccgagtggctgggactacaggcatctgccaccatgcccagctaatttttgtatttttagtagagacggggtttcaccatgttggctaggctagtcttgaactcctgacct

SEQ ID NO: 134447 - DNA, 2494 bp, Homo sapiens
tcccagcactttgggaggtcgaggcgggtggatcacctgaggttaggagttcaagaccagcctggccaacatggtgaaaccccgtctctaccaaaaatacaaaaaaaaaaaaattagctgggtgtggtggtgggcacctgtaatcccaactatttgggaggctgaggcagaagaatcacttgaacccgggaggcagaggttggagtgagccaagattgcaccactgcactccattctgggtgacaagcgtgaaattccgtctcaaaaaaaaaccaaaaaaaccttgaaattcagctgtttggctcaagtgttgggagcaaggaaaaagagagagggttaaaaaaaaacaaactcaacataaaagtatgagttaagtatttgtgagtagggagtggtagaagggctaaatttgaaagaaccttcaggtcaatctgagtttaagaaaaacaaggcatggaattgcattctgctcaagcagcacttaaggatggatggttggatgggggtgaggtgtacttgagaagacaaggagtccttgctcttatccaaaagtgctgattaaggccaggtggggttgcccacgcctgtagtcccagcactttgggaggcccacacaggtgaatcacttgaggccaggagttcgagatcagcctggccaacatggtaaaaccccgtctctactaaaaatacaaaaaattagccaggcatggtggcgcacacctgtggtcccagctactcgggaggctgaggcaatctcttgaacccaagagttggaggttgcagtgagttgagattgtgccagtacactccagcctaggtgacagagcaataccctgtctcaaaaaaaaagaaaaaaaaaagtgctgattaaaggccaggcacagtggcttaatgtaaccccagcactttgggaggccgagggaggaggattgtctgagcccaggagtttgagaccagcctgggcaacatagtgagacctcccccacccccagtcttttaaaataagaaagaaagtgcagattaaggcctggcattaagtgaaagtaggttatgtgactgggcaggaggcccactctggaccttttccatcccacagttcacagcggtttggctttatgagcccaagcagggctgtctggttatagaacatggtctttatgctttctaggctactttaaccatgagcctgctgctgaagagcagtatagatgagagaggcagagagaaaagttacctttaagcgaatccctgttttgatgacttgacagttcatccatttaagatccaacttttgagcatctgccatgtcccaggcactagattaggttcttttacatgggtgttatttcattctctcaatgtcttatgagctaggagggagggatttcatatgtgagaaaactaattcagagaactgttgatgctgtcagtaaatggcattcaatagacctagcagcagttgaagtcctgctgttatcaaaactctgtagtaaccttcaataaggatttttaaaaagttttccctaatacattgtgtttaattatttttagtggattgtaggccaggtgcggttgctcacacctgtaatcccagcactttgggaagccgaggcaggcagatcacctgaggtcaggagttcgagaccagcctggccaacatggtgaaaccccgtctctactaaaaatacaaaaattagccgggtgtgacggccgactccataatcccagctactctggaggctgaggcaggagaattgcttgaaaccgggaggcagaggttgtaatgagcccaggtcgcgccattgcactccagcctgggcaacagagtgagactctgtcttaaaaaaaaaaaaaaaaaaaaaaaaaagattccagttactaggaaaaaatcagaaaaatatcagcattctagtcatctagaaaccttattcgtccctcttctttcttcccttttatttttatatctatgcagttttccaggtcccatcaattttcctttttagtgtctttgggacctatgtttttcttttttcttcttatattttgagacggagttttgctcttgttgcccaggctggagtgcaatggtgtgatctcagctcactgcaagctctgcctccccggttcaagcaattctgcttcagcctcccaagtagctgggattacaggcacccaccacgcccggctaatttttgtgttatttttaatagagacggggtttcaccatgttggccaggctggtcttgaactcctgacctcaggtgatccaccttccttggcctcccaaagtgctgggattacaggcatgagctactgcgcctggcctggacctatgtttttcttcgtcactagtttttctttccagttcagttcctcttcatgtcacttgtagatttcttcagtctcctaaaactccgtgcttcttacaagtgaaacactaatcatttatgggatgagtaattctttttcagcagtttcaaatatgttaggagat

SEQ ID NO: 134448 - DNA, 1058 bp, Homo sapiens
tcggcctcccgaagtgctgggattacaggcttgagccaccgcgcccggccgatacaactttttaaaacatctctaggttaatgaattactctgaaacactgaaatccttaccatgaagagcagttcagcgcaatggttgtccatgatcaccacagttacttaagacaaaactgctgcttagccggctctgtactttactgccaccacttttgcatcaattccagaaaatatattagaatgcaagagcatgagatgccctgtgccatttatttataaaaataaatcaacaataatttattttaaaagcaaattattcactaactttgatattcttacaactaaccagtaataatatgttactggcagtatcctttacaactaatcatgatatattggtgtgtccctatctaagaacaagggtgggaaagccacagtccataagcaaaccccgcctgcttcctgtttttgtgcagcctgcaagctaagaatggtctttggatttttttaatggctttctgaaaaaaatcaaaaggaaaacatttgtgacatttgaaaagtacatgaaattcaaagttcagtgtcaattaagttttattggaacatagccatgctcattcatttatgtattgtttatagcagagccaaacagagactgaaaagccaaaaaactactatctgacccttaacagagaaagtttgctgacccctggagtagagataagaatgacacacaacctcagtggtcacgtctcttatgcacaaaatcctgaatatagacagtaaacttaattccagaaatagtagtaaataccatctaggatggaaatccattcctgagttgtccaaactttctgatttctttaatgacaaaagccaacttaattaaatacagcttctgcattctatctgaaatcatgtttatatattcaccttttgactcagcggagcaataaaaaaagcactgggctccaagttagaagacctaggttttaggcaatttcttttaaattgttacattgttaaaaatgtatttaagtcttgtttgatctgtgtattaa

SEQ ID NO: 134449 - DNA, 1054 bp, Homo sapiens
tcttcttctgctatttatcaagctaatgatgtaataggagtgctacctgacaatgtgaacaaaattacctgtcatcccaatttagcatgattttttgtcatttttacatatttccttctatttattcatatcattcataattttacatagttaaatcatagtaaccatattctctcctgttttcctcttttcacttaatgctgctatgttgtttctagcttgttcttgttaccacattatatgactatttgtatttcatcaagtgaatggtctaccatttatctaacacattctttactacaggatgtgcgctttgttcgcagtttgtcattatttgggagaacacatatagctttttgcatcaggaattttattttcttaggctataccctgctggattaaacatggtgactttggcttttgccccctttctaaagtggttgtgctaacagatagtgccatcagaagagagtgactttgcttttctccacagccttagcaacacagagtgtaattgttgaaatctatttttctaatttacagcaggtataaaataattctttgagattgctaactttcacctttctttcatagcaataataaaccactttctggcagggcacagtggctcacgcctgtaatcccagcactttgggaggctgaggcaggcagatcacctgaggtcaggagtttgagtccagcctggccaacatgtaaaaccccaactctattaaaaatacaaaagttagctgggcatcgtggcacgtgcctgtaatcccagctactcagaaggctgaggcaagagaatcatttgaacctggggggcggaggttgcagtgagctgagattgcgccactgcactccagcctgggtgacagagtgagactccgtctcaaaaaataaataaataaaccactttccctttctgcttcatgatgatctgagagtcttatctgtctgttactttctgctaggatattggtctcagagcaccatgctgactcaataggcaacaagaggagaatgtaccccaagacttcaccccaagggtcct

SEQ ID NO: 134450 - DNA, 1049 bp, Homo sapiens
gtagcagggagacatatttctgcaggatataccctgaggtccatagagagcagcaggagggttttaagtagtctggtaaaagttaactgcaggtgactcagatggattcacttgactaaaaactagatttagaaacagtcaacaaaatgaaccatggactaagactttgcaaatgcaatttctacatctcccaaatttgaatagtaaaacaggccatcgtgaagaccattgtgagataatagttgtaaaaagccctttggaaattgtccaggactgcacaattgtaaagaggacagagatagatcactttggagacggaaaagaggctggcaattttcttgatcatttttctatgaaacttacccaggggctgtgttttattcttcacagcaggatgatatcaactatttaaggaaactctcttgagataaaagacgtgtatatttgttctctggagcaaatggtccctccctgaaacccaaaataaccctgtccgtggttccctctcctaacatcaagcatcctctgtcctccaacctcatcctcaccagtacaagctgttggacctctgctgggcgcatggtgctattcaaggataaggtggagaaccctgcgtatcccaaaggatgtggcacttttttcacaatgtttggtattttccagctaagtagcagggtgtcccagtgtcaaacgagatgccacggctgggcccatgcatctcgtcatgggtcagggtcagtttgttttctgaacacagataacaaagagccaagacatatgaaatcctcaactatatgttacagctgggcacaatggatcatgcctgtaatcccagtactttgggaggccgaggaggtggggaatctcttgaggctgggagttcaagaccagcctgggcaacatagtgggacctcgcctctataaaaaagaaaaattaaaatattagccaggcatggtggcacatatctgtagtcccagctactcaggaggctgaggcaggaggattgcttgagcccaggattttaaggctgccatgagctgtgatcaca

SEQ ID NO: 134451 - DNA, 1067 bp, Homo sapiens
agacttctagtttgcattatgatcttgtcataggattatttacaaatgattttttattattgtttttacctcttcctctcatttagagaatgcctttaaaaaaaagaaataaatattatttcatttaatttcaaatacttctttaagttacaagacttaaagtctctgatatatacaaacttccactttgctctttttcttaagtataatattaccattgtatatactttataataactacagatctagtttttgagtttatttctttcagtgtttaatgcctagaaaacgtctttgaaagtacacagagggcttgcaaggcattctgcttttctaaatcctgactgtgtcaccctccacagctacccgctcccttccccagtgcttagcagctcggaccggttgccttttggcattgaggagaatgggggcacaccgttcctcaccgcagcttcaggaaggcatcaccaccagcaccagcatcagcatcagcaccagcaccactcaaactacagcctctcactgaccctggagaacaaagaggggcctctgaggtccccaaactccagcagcaagtcccttacaagtgagtaggggtggagggggcaaggcaggagaagggggagcaatgctgcagggcacgagagttccctagattcttaagacagacccttgcggtgcagcacacaatggttgtcatgttatgctgggctaccgggtttgggccagagtagacaagagccttatgcatttgagcagaagcactttagggattatggtttaccagtaaactctaatttcattatagggtcacagttctccacctcctttctttttttcttttctttttttttttttttgagatggagtctggagtctggctctgtcacccaggctggagtgcagtggcatgatctcggctcattgcaccctccccctcccaggtccgagcaattctcctgcctcagcctcccgagtagctgagattataggcatgtgccaccacacccaactaatttttgtatttttagtagagacagattttgactatgttggccaggctggtc

SEQ ID NO: 134452 - DNA, 1049 bp, Homo sapiens
gagagccaattgttctaagatcacccaaagaatcattcacccttgccccatgaacttgtgatgccatcttcatatgtgtctgccactttcctgagtgctctcagatcctttctctgctcccctgcaacttacactgtttacaggaaactttacttctcaggctccctgtcctctggcttttacataggtttggtcaatgggaggcactgacatggactggagggtgaatacaggagacaagtcagggtatttctccttcatttcttcatgcctccagtgatgtttccaaaagcagccatgagttctctgtggctccagctccctctagactgtcttcctgctaccttagctcctgggtgctataacactgccacttccccttgtccctccagctctaggagtgataagcaggttctgtttgttgctaatttataggttacctcactgtccaattaagtttcttagttttttcagcccttgtataaccaattccctgaattaaattccctctgtaagaaatgcctagagtagtttcagttttcggattgcccatgacttatatacaatcaaaacctctctttggatttttcatatatatatatatatatatatgaagaatatatatatatatgaagaatatatatatgaagaatatatatatatgaagaatatatatatgaatatatatatgaagaatatatatatgaagtatatatatgaagaatatatatatgaagaatatatatatatgaatatatatatgaagaatatatatgaagaatatatatatgaagaacatatatatatgaagaatatatatatatatatttgttttttacagacagggtttccctctgttgcccaggcaagagtgcagtggcacaatcatagctcacttgcagccttgaattcctgggctcaagcaatcttcttctctcagcctcccgagtacctacaactacaggtgtgcactaccacacctggctaatttttcattttttttatagagacagggtctcatcatgttgcccaggctggtctcagatcct

SEQ ID NO: 134453 - DNA, 1042 bp, Homo sapiens
gaaattcaggtaacagtcagcatgatactgccctgcagaactgaaaaagggaatgtgggcaacataaagatagcaaagggaaaggaattgattttgaatatctgtgtttcctttcctgtttgggagggtattgataactttccactcaggcttcttagatacccacccagacatcatgaatttccctggtgcattgaccaaggaaggatggatgtacttctagttacaattaaagtttcaatatattggaactgaaattacagccacatcccaagagtcacctgtggttttattggatgaaaggctgcagaatttaaaatattaaaactgctgtagtctaggccatccactaaaaaaggattagaataattagaggaacatccctgtaggctcatgttataagaaacccacagaaacctcctaatcgtcccctactgaatggtgaatggtttaaacatccacattctgcactgagacctcaaaagcaagaggtgttgctatgctaatgctcaaccagcttcattccctggctgaataatggacactgtctgtattaaaggcaattaaaccattaagcccttaaaattcatatcagtgttacagcttcggaggccaactaaggatgttcataatagaagcttctgaaaaacctgcaagaattggggaacagagagaggatcatttgcggaaatttttaagcactaatgaataccaaaataaattaatcctcatctgtatcaccctagaaacacgtacccagtgttcagctccaactctgactcacattggtgtcttgtgcaattagaatgtctaaaacctactcttaacagattatgcatcttattcatctaacctgaactacattccgggatgaataatgttttaatttcattcattcagtgagccggatggcgtctggggagtggaaaaataacacttcccagctcatgcctgagtctgccgtagctctgtcagagtgcacaggatgacaaagaatctgctttgtggacattattttacactcacagctgagctttcgtga

SEQ ID NO: 134454 - DNA, 1063 bp, Homo sapiens
cctgactccagttgctcctgacaagctcatgctcctcccagtcactagagtgatctttctaaaacacagtcggcctgtgccattgcagtgcttgccattaccctgaggatgaagtccaagggcctctcagtggaattccccactccgtgtctccatcctcttgctctagcatatatccaccatttctcaccctactgttgaaaatccttcaatgccaaattgcttgtggttcctggcatgtgccacaccctgctgttactcacatctgtgcctttgcaaatactgttctttctgcctagaattctgtcactcccatcccttcccctaactcctgctcaatgtctgcctctgcccagacatcttctcccagggactcttgacggccccacctctgcaaattgggttaatttctgtgttccagtaataaccccctccctttctacccccatctatagcaacgttgcacttacagctttgtattaaaatgggctcttttgtttatctcatcctgaaacctgtacactgcatcaatctgagctttgtgtcttacttgcctttgttccccagcacctgacagatagcaggtgctcagtgaatgtctgctcagcaaatggattattccacattcatttgaaaggagatgtctaaccagataacaggcaataatacatcatctctgggctggtctgaaggtatctgaacaaccttatccagtatgggggcatcatactgtgagtaggacactgaccaccatgtgacttctagattcagtttcatcatctgaatattactcagtgtgtcagctgtgttctcgtttgaggcattggtatcatgctgtacagggcagaagaaagtccagccacgtgacattggaaaccccggtaggtagacattgatctgcgctaatatataggggctagtcatctaatgctaggctttgcatgtgtcacttcatttcctgaccactctgtgagatgggtagtatcctgtttttcatagatagggaagctcaggcttagagtttaaccaagcagcctgtattccagagcctatggtctcaacc

SEQ ID NO: 134455 - DNA, 1599 bp, Homo sapiens
aaagtatgatgtatcgagataaactcatgactgcactttgagagactgaagcatctctcttccattcaccttcatagtttcattgcattccatgaaaagtgtcttggcctcagatggatggatgtgtttggacgagtgtctttaaggagtagtcctgaaaggtgtttttggtgtccatgtaaatatttgaagataaaaccactatagcttgtcataatttactgttgactgcattctcattaaaatgaaggtaaaggctcaggaatcatattgatgttctgattttaaaattggagtcaaagtctatgtttatcattttactatgttcctgatgttctttgttatttaattaatgggagcaaataaaaccagaagagcttgggaagattgctcagcatatattcctgtcgtagaagttgagattgctagggtccagtttccctagtgtggcctggacgagtcatttccccttcattgacctcattttccccatctgaaaagagagggttggactaagtgatctccaaggtcctttccaactctaaaattctgcaatttgttaacatttcattttgtttaggttgaggacatacattcaaactaattttatcacaaggaaaactgcaatacccacttccttgacagagttactcctttcagaagctaaataaagtatataacttattagatgttatatagatacagggggactttgaatttcacatcttaaagcagttgagctactttgaatttaagcagtcgtactaatcttaaattgcatagcatttgttttgatcgaatttgctgctcaagtatgggaataatttttaatgtcttaatgattggtgctgctaacttgcgtgatttcagaagacataattgtgaatacacactgtcagaattgggggattggtttttaccctagacttcactcttaaaaagcaacgtgcaatcaagatcatttatggctcaaatgaaagcatataaggttttcttgaagttgtgccaaagcattctgtagagtaggatgagatggttgttgccctagtctgttggtagaaccagaaatcaatatgttgtcttttaggttaaagcttgtaccaaaatatttatttcccccatttcaagccctgagtcaaacatttttttctcttaataatagacctgaaatgttttattagtatttctgtgaaatcagttgattcttgtgccatttttgtatatgtaattgtaattttgcccatgttaggccctctaaaaaatgtttgacatcctttgagatattttattactaaaatctgatcttttttggctactgcaaaaatctattcagcaagaaggtatcagctgcataccttgcacagtggagctgactacctataaactctccctaaggcatttgtttacaggtgtattccattttagcagacgttctgatgctcagtgtatgtgctgcatacaaataaatgtgttctgaatcttttcatcttattgatagcatttttacaaatgtgtttccaaggaataaagattattcttgctttttttttgactccatcttcattttttttaaattgattcttgttgctatgcagaagt

SEQ ID NO: 134456 - DNA, 1049 bp, Homo sapiens
ggcaactgttcctttatctgtaaaacgaggtggtcacatttgttgacctcatagccttgtcgtgtggattaaataataacagatgtgaagttcccagtacagagtcttgtctggagagaacattccaaagtggtggccagattattgacagtggttttaatagcaaggggacccacatgtggctcccaccacagtacccagtgggagatgctcaggagggatcggtgcctccccctgccgtgggaagaggctctgcgcatcactggagcttctggtgccggtgctgtgaggtctcccagcaatgccagggcaggcctgaaatgggagtaaaattacttggtttgcccaactgaaacaggacctcatttttgtcaccaaaatatgacattgagactgcattctggaatatttcctactgtttctgtttgtgagctctaaaaggacaagtgaaagttgctgtctggggttttccttgttatatgttcattttaaacagccaataaccaaaaaaaagtcattatgtggaagttcctattagagtatgtagcacataggaatagttcatgattgttaaataaatcattaataatgccactctacaacctatttttctttttttttctgttttttgtttgtttgtttgtttagctctaaaacaaatccagaagtccataattaccaggtaagatactgcttttaaaggttttctttaaagaaggaaaattttaaaaataaaatttaaaaaaaggtttttgtaaagtttctaaattttccataatgagcagtcatcatatttgtaatcagattttgagaaaataataacaatatttgtttttttgagaaaatggtaagagaagagccctttccttctgacccctgccacttcttggccatctgaactgcctgtttttcttaaccttgtcaactggcaagcatcagggacatatgtttaagtttctgggtggccacacacagccccttagtggcattcaagtgaggcagcttttggtcaaagtgtgttttaggcctagggaacatgagtcccttga

SEQ ID NO: 134457 - DNA, 1211 bp, Homo sapiens
agattttatttccaaatggaaggttaaactttgtgtttctttacccaagtgagttcaggctaagttgaaacgtacgttggagctcttggaaataaaagtgcactttcaaaaacaggtaatgtactgagattctgatattgataacacacgagaaaatatttacttcccagtgggcggacagaatatcaagctacacatggctccaggttacgaagaaccagcacctttgagaggaagcctagtaaacgttatccatcccggagacattcaacgttcaaaggttgtgtgtttttcattctttcttggaattttacattatgcttgagtcatttaagccctcgaggagcttggtcaagcagcttatgaagaaagtacccgcagttctccagtctggagcttttggaaaaataatcccagtggtgttcttttaacgggacctggccacttccgccatccctctgtcattagtgtttgccgtggatgtgttcatttatttctcccctttctccatatttctttccatgtgcctctttgcttcttttagacctgggctcaagccccggtacctcaggaatatcacagggaaacacctttcttgcctatagaagatactgtatctccatcatcttgcaattttaagtgtggacatcaggcccatgctaactggaattctgaccacgtacaagtacatgaagaacttttagatattcggctcaagtcccacagtcagtccaaactttcctcacccttaaatttagccaggccctagaatgcctgcccccttcccctttccaaaccccttcaaccttgtccatcagttacagctggggcctcatacctgtatgaggcccggaacacagtacaactcagtcagtgaatgagcaagccaggctcatttctgttggatcccagcctccagatcccatcttgtagctcttctttctctacactaggttgctccccgacttaggacgcccagtttgtactcagtgtttgctcttttatggcagagcctctgcactcccagcctcctggccccttctgtacatgatttccttgtggccactccatgcatttttcttggctcaggacttagtgggcctccatgggacttggtacctctacttgttcccttctggaatctgtaactttgtgttccccaccattctttcctttatgaaccgatggtgcaacagcatgactacctgaaa

SEQ ID NO: 134458 - DNA, 1846 bp, Homo sapiens
cctcttaaaaatggctttgaaatactaggcctctggcagcacacagtgatcattgagtataagaagcattggcactgaagtggttgatttcgcatgcagtcttaatttaccgtaaagataagaggtttcaacaggcatagctcttataactgtgtcatttttcagcatctgtattgaatattttctattacatgaaaaactaaggctatattgagtctaaaaagtaacccctgctattgaaaagaatacgttctgattttgaatataatctgaaggaaattaaatatgtaatttccgaatttgcaaactctccatagaatatgtgctataaaaacctcagtgaaatgtactccatagaccaatagaacaagtagattgtacagtgtatacatttgccttattcagccgtgcaatacagacctttggttggtgtgtgtattatgagtgtgtgtacttttttttaatcctctctccctctctctctctctctctacctctctctctccatactgtgctcctcatactaaaggctgtgtaactctagaaattgtcttcggtttggaaaaatattaatggcaacaccttgcatttgtacagtactttgtagtttacatgcagtttagcctgctttgtatttaaaagcagaatggtgttcaagtcccaacattgctcctttccagctggatgacctggggcaagagcccttaacactgagttcctcatctatataatgggagatgggtcgggggggctcactggcaacacctatcctaaaggtttacaaacttgatgcattgaccaaattggataatataaatgaaaaggctttgaaaactatgaagtgctataccaatgtatgtcattattgtttttctaaccaaatttgaaatattacgtatgaatgagatcactgaatttgcagtagtactcttctatggctgtgccttagatagacttagaatgctgagtgtatccagccatgctggcagtgttcgatatggtgtctgtgtgtttatttttaacgctatgaccttgtttcaagaaagatttgaaggcagctttaaaaaagatgcatgtactatatcaagataaaataaatttaaaatatgtttaaaaataataaggcaaagggaatacttttcattctgttttccaaacttttccattcttgccaaattcagtaaaattgtacacgattgatagaaactatacctacattgggttattttgccctatgatgagaattgactttgggaaatttgtagtgcaagtcgcttgttgcattctttaatgtagacagcaaaaatatgactaagaatacaagtcattatctaaatagcgctaccttttgaaaaatgattttaatgacattttgtatggttgtacttaagttcctatttcgaattaatttcattttatttttttcaagattgaaatgcccttatgaaacagctgtggaattagctgctctctgtctacaaggtacattaatctttagtagtaattagcattttaatgttattgctttttatttcaacaaatgagtgtccacagtataccaggcccagtgcttagctttggggatataaatgaatatgacacggtctctgtccccaagtggcgtgcagtccagtgaggaaggcaaggagtagcaaggactgcagtgcagttccttcaggaacagagacgtgcaggaggtttggacaaggaaggcccattgtggggatgagaagaccatgagtcaaggaaccaaggcacaaaagtgcagagaggttagcagcagttgagtgatgctacagagtgaagttcaagcatttggacaggtggatgacctcgggccccattt

SEQ ID NO: 134459 - DNA, 1011 bp, Homo sapiens
ttgttgcttttaaaaatgcgtatatgggccaggcgccgtggctcacgcctgtaatcccagcactttgggaggctgaggtgggtggatcacaaggtcaggagtttgagaccagcctggccaacatggtgaaaccctgtctctactaaaaatacaaaaattagctgggtgtggtggcaggcgcctgtaatcccagctactcaggaggctgaggcaggagaattgcttgaacccaggaggcagaggttgcagtgagccgagattgcgccactgcactccagcctgggtgacagagcaagaccttgtcttggggaaaaaaaaaaaaaagcatatatgattgggaaattttcttcttagtgaatgggtaaggaaaggctaactttttgtgtggtgaacttatagtcaagattctattcacagtagctcaccctaaccacaaaccacagacctcagggaaataatcttgataatctgtataaatccaagcctaaggagaggctgtcagcatcacacctttcttttctccagctgaacgtgtcattctctgccttcttcctgcaagaggcagtgacttttttttttcttaagactactgactcacccagaagaaaaaaggctatctataaaaagacaactttatttgtatactcctccatcagatgaatggatagtgatgccttagttatagttttatgaccctaacagccaagctcaccatagacagggttaaaggaaaaaagttcatgtgcttttccactcattgacctttttgaaaatcttacacgcagagccaagtacatagctctaaagttctgcttcttatgtacagaataccaggcatgagtgggacccaaggagcttggggttcaagactgtgccttggcccaagaagcatccaggctattagggacagctctcaccatcagtttcagtccaggggagtaccgtgcaaagcatccaggggctgccacgcagcgaggcctctgattgccgcagggatgctgtgggaggtcc

SEQ ID NO: 134460 - DNA, 1017 bp, Homo sapiens
gtgtacacagaaccaagccaggctccaggtagataaagactaagtcagggatgccactctttccctgagtaactaccacttgggtaagaatatgtgtcttttgcatctgcagagaactctatggtttttacatgcttttacccagtttcggtctaccttgcttctctggggatgttgaaagttgactcttggtggccagagctctggcatagttgttttgctgcactttaggtgcaggaactggcatctgtaacatgggactaagggaagaagcaggacttgaatagtttattgacaaaaatggttctgaatccagttggagttgtttgtttatttatttttgagacagggtcttgctcagtctcccacgctggggtacaatggtgcgaccatggctcattgtagcctggaattccagggctcaagagatcctcccaccttagccacctgagtatcagttggggttatttttatcggaaatatttatctcaacgcgttgtagcttacccatataagatggcacaggaagtatgtagatgtgtctacatgagattagccaaaactgcatattgaaggcttttttaattcatatgcattatactgagtgaaattaaccttaaaagagtagcctctgtatgattccatgtacacgcagctgtagaactggcagaactaatctgtggagaaaacaaatgagaataactgttgcctcgggggtagggaagctcagggattgacgaggaaggggactcccaggaactttctggggagatgagaaggggctgagtggtagaggagtgtggggtacaccagtccatttgtcaaagtaggataacttagatttgtacatttcaaggcaaatgcaatttactaccatccccaaaaaagtataaaaaaattaatggtgggccagggaggaatgaatagaggaaaagatgatacacagtgttgatcattgtcaaagctgagtgacaggtgtttactgtactcttctgttgactttgtgtttatttgaaa

SEQ ID NO: 134461 - DNA, 1030 bp, Homo sapiens
tggcactttctgaaagatctaattaaacatgttgatgtgccaatttaatcaagatgagagatccctgctggtgtcaccctctagaacctgcacttggtgttttgactttccagaagaaaaaaatgcaactttggttagggggcagtggttggatcacacagttgtctttcgtttcctaccacagtaattcatatttaaatatgcttttagattagtgtggatactattgctgctgtgttgctacctgacctttttctggggggggtacctcagaaatgagcatttgagggcaagcgaaaaagccctcttcatcctccagaggcaacaaagaggcagcagaaatggggaaagattgtgagaggcagggcttgggtctagacctggacttaggcaagatatgttgccctcaaccctgagttttcttatatgtaaaaagggaaggttgggctggactagatgaggtcaagatttgccattctgggaggctgatattccagagaatcaaaattaatcctaaaccaaagctttatggctgctacagagacatgtcacatttctgagacttgtcaccaagagtttgtccctcagactttggcgctgttgaatgcaaagacaaggatggccaccttctggttcttgcctgttgtcctcagctgagagcagtctcggtaaaggtggcaaagattctgtgacctcagaccggggaccaaatgcttgggagtctgatggccgggctgggccaccattctcatagctctcattctgtttggagcaaccaaaggatttgtgtgaagttatttggaaaaggaccttaactgagcagtaatcttttttctgtatatttggaatgtttttcattctgacctgttctgtcagtgattctactgaaaaacaatttaatcaatataaaaatgttcaagctatgcaacactgttattgtctgttgacatttttattctaattgatttctgcaaatcttttcttatttgtgtttgctttttcctttcatttagaaatcaactcttttgga

SEQ ID NO: 134462 - DNA, 1410 bp, Homo sapiens
ggtgtagataagcatgcaattatggcatcatttaggcctgtatttctatggaaagatacaaaaaggatctcagtttggggcctgtcctaatgccttcttccctaacatcaccacacacacccctgtcggcatcctggagcaattgagaccggacacccacagagctgttgtcctcccagcaacaagatggtgtggttatcttgggtcatttggatgttttgtttgtttctgtgtgtcagactgtaagggctgagctttctgtgcttctaggtggagctggaacaattcagattcacccgccctgatgctaaggaaaccctgacgtatgtactagatggcagggcactgggggtcaggctgaaggctgagcaacacctctctgccctccctccctttgtcccatctcccagcgacttccaatattcatgtttctgagaattgtgtccctcttcaggttccctcttggtgcctaacctggattagtaatgtgcattcaggtgaattttcagctgaggctctgagaactggtactctcagtgtgttctggtcatcttgtggcttagttgtagaagcaggtgtgtctcttgcctctgcttgcctcctactgcacactcagcacccaggactggaatcaccgactactgaatctcctacatgtattgctgctacttcaagctcctccacttgaaaccttatgattttcccaaggggagatgggacagtgtcatctaaatattccgaatgtttggccttctgagaaaagagcttctagtaattgaaccatgggaaacccagcttctggagggttggccgtggggctgtgtacatgtgtgtgcccaggggtgagtgtttctcaggattcctaacgattcaaattaccgttgagtatatataaagaatgagtctctgtatggaagaacaaatgtgtgcattcacccccagtcacaatggtctccattgcatttcaaaggagaggatcagactatctgaatataaacacaatctgatgttaatttattctaagaacaccatcattttgattgtcctaaagaattctgcctttgtgaataccgtgttaaatttttttaaatttgtgacaggattgtagcaaattattatttaaggaaaataaattgtgtaaacatttaatgtggtatttttgaacagcggtttttatgtactcagaagaggaagtaaagccaggttcttaatggtatttatagaaaagatgttttcatattataatgcacataaatgaagccattttgatattcagcaaattcggtgccaattgaatagtttgctggtagcaagacggatgaagacctatatgggagattctttatctctagagctagcatatttacttgcatactttgtttcttttccacatggatattttactgctaa

SEQ ID NO: 134463 - DNA, 1050 bp, Homo sapiens
gtgtgcccttacaaacctctgttgactgtggttcttcaccatttcaaaagttttttggaattttatgaaatcctaactttgtgaatgtagcacagaactgaagaagaaaatcccctcacacaccctttctcctgtccttctgtcagctgaccttcgtcataggtgtgagtgagaaagggaataggtttggcacttcacagtggccctctttccactgcctgctagcccccagtctcagatgtgtgaggacaggctgtctcagcctgtttgagagcacgccgtgagtgtgcgttttgtcttctcgaaggccaagggaggaaagcccctttggagtcagcggggaactgctcgctgggccatgcagaaaggctactcagacaaatcccaagtctgtcttctctcccctctccagtgctggaataggtcgaaccggtgtgttggtcactatggaaacagccatgtgcctaactgagaggaacctgcccatttacccactggatattgtccgaaaaatgcgagaccagcgcgccatgatggtgcagacatcagtgagtagaaatccagtaattacggtggctggcactttctgagcacttacaccaggcaggcctgagagaagggctttgtgagtcaacagactgcagctcagggggactgaatcacttgcccaaggtcacagagcttgtcagtggctacagcccacacccatctcacctctgagctctgctgcctctgtggtttatttcctgccagcccgtctgtcagggagcagccctggttgcattctgtatcgttgaacaatcatttgtccattatcctcccccgcaccgacccacctagacctgggtactccttttggctcagtggatgttgcatatgaccctactttgagctctgttccacccgtgtggtgcctgagtacctgctgtgtcctccacgggcaggccagagctcaaagtagggtcatgtgcaacatcctcttgtcctcaagaggaactctaggggataactcttggggatttcccctggaactgcaagcggggcagtgaa

SEQ ID NO: 134464 - DNA, 1165 bp, Homo sapiens
cccagtgccagcccaaagctcagcaggttctgagtgttctttcgtcaaaaggactcagtccagagggcaaaaaggaaacatggagcaggaatatttctacctgaaacattcatttcaaaacatttcaacatttaatgtcaagattgaccaacttcatgatacaagcattggaagccatgcagaaggcaaagtgcaacaagaattggtggtgtaaacctgtaaggtttatgctttaaataaacgtaaatagattttgatagaaaaccctgcatagggaaagacttaggggtaggattggtacatacggctgaaaatgcagatagccaatattgattatatttaggatagagcaatgaaagtcatttaaactcttctgccatctcacagatagatttctgatttttgcctactgagtaccacacacttttatcttaaagatctaatactggtggttgtcagatatttttcaagaagttttagaaataacttgtttgattttccttattggctgtgaattgataaagagataatttttctggtgcaatatcaattagcaagtagaatagtttaaaatccagttccctgtgcaccctggggcagcaacagattctaatactttaccaatttcttaccagatggaaattcctgctgctaaccttgtgaacaagtacatcgccactcaggggcccctgccgcatacctgtgcacagttttggcaggttgtctgggatcagaagttgtcactcattgtcatgttgacgactctcacagaacgagggcgggtaagtagcttgatttctaattcagatgtgtgcagtgtcacaccctactctgtgtaacatgaatctcagcgctgagaagggtcttcagcgtctcctggtccagcccgtatgtgaccctaagtctcctctacagagcaaccaatagacacccctagtgacgggaggctcagccctcctcctccccagtcccagcttggatccattacaacaagccagaaggcacttcccctagccttacttcatgtgccccaacacccctgcagtgacgtggccttgcccattcaggacaagtgctggtcctgaaagagcagtgtgtgtgccaggttaacagtggcctttgtaaaaaggagaaattacatcactgtgccattttccatagaatc

SEQ ID NO: 134465 - DNA, 1749 bp, Homo sapiens
ggttacagtgagccgagatcgcaccacttcactccagcctgggtgaaagagtgaagctccatctcaaaaaaaaaaaaaaaaaaagacaaaaaaaaccattaaaaatattatttggtatagtaattctcttcttagaagtttgagtaaaaaaaatttcaaaacagcctaatgaaaaagtaagataaaagttaatacaaattatagtaaactagattattgaaccattaaagatcatatgtgtaaataatagttaatgacatggggaaatagatactatataataagtaggagaaagcagcttgaaaattagggtagttatttcccagaatactccattagatgctgagattttccacggccaaattagcttgagatatgtttagctgatcagaatttaacaaatgtatgcattatgcattgcaggacttgtcctgttagagattcatagaacataaaataaatgttttccaaatgtcttgactttgaaactttttctaaggaatacttactatcttcttttaggacacttaggttgagtagaacatagcataagaagtgccaatatagccgggtgcagtgactcacgcctgtaatcccagcactttgggaggtccaggcgggcagatcagttgaggtcaggagtttgagaccagcctggccagcatgagaaaaccctgtctctactaaaaatacaaaaattagccaggcatggtgatgcacacctgtagtcccagctactcggaaggctgaggcacgagaatcgcttgaacctgggaggtggacgttacagtgagccgagatcacgtcactgcactccagcctgggcaacaaagagagaccctgtctcaggaagagaaaaaaaaagtgccagtatgttgttcaatctcattttttgcttttaaaaacatagtatataaatgtattatgcgtttacatatatgtgcttctgttcatttgtgttcatgtaggcacagaaaaaataagctggagaaaatatacaaaaagcacatctcagagttgtgaaattgctgataatttttttctttatattagtctgaatttcccaaattttccgcaaaaaaaaaaaatcacttccaacactgaaaaaactgtgtttttaaattcccatagagttaataaaaaccactggtgagaaaggattaaagggaaaaagcagtcatatagaaaagaaaacataagccttggagtcagatctgagttcttgtttgtgatctcgaacaaagcattgaacttgcaaaataagaatacaattaatatctcttacagggctgttgtgaaaatcacatcagataccatacaaatatgtctaatacatgactttagatatgcaaagattgtgttgtttgagatttttcgtagtgattacatgtgtagggaagtacctctgtaaatgaaatgtactatatattgggataaatgtttttcctgtggaaatagactcctgaaatgatgaatgaaatgctctcgttcttaaaggaagggtgtggttcactacattgaactgaagggaaatgattctagactaatttagatgatttccatttaattttgagccagaattcttcccccccccccccacatctagttgcttttagctcttgtcaaatagttgtcataaagacaaggtttcacttaccatgctccattacctgagacccagacccttcctatggcattttttcaaattaaaaaaaaaaattattaaagagtttagtcagtttctcatgg

SEQ ID NO: 134466 - DNA, 1049 bp, Homo sapiens
actataattacttgaatagaactaatagatatattactgagtattctacaaagggaaatagccctttttttcagtggcctacaggaggctgttcacacttttggttaaaaagaagaaaatgtaggctgggtgcagtggctcacacctataatcccagcacttaaggaggctgaggcgagtggatcacctgaggtcaggagttcaagaccagcctggccaacatggtgaaaccctgtctctattaaaaatacaaaaatcagccaggcggggtggcaggcacctgtaatcctagctacttgggaggctgaggcaggggaatcacttgaacccaggaggcggaggttgcggtgagacaagatcagcctaggtgacagagcaagactccatctcacaaaaaataaaaataaaaaaaaaaggaaatgtagaggttatcttctctggccttgcctttcaaaaaagttcacattttgagcagtaaaactcattcatattttcacacactccaaaatcgaaacaaggaagaacttaagagccagtcacagtgcataccggttttttggtattagagaggacaggaaaggcagtgagaagtcgtttgtttgttgatttagcgagtgtgtcttgggtatttcccctggatcaggaacctgatgagggaaggagaggggagtttctggccccaaggagtttacagtctaattttagtgtattttaggaggtacatcatgtgtcccagaaacagctgaagaccaagacagggtaagatgttattatacagaatatatgttctgcagcaactggaggtgaggggactccaggagatccctggagtgagatgtgtgggattaataaaggggtgattaggattaagtgtgtggggggagcatattccaggaaaatctcagcccaaatgcagacaaagctcatggggtatcacgtagcataaagagacaggcctacctgggtggacagcgcagtgcagatcctgggcaatgcctctaggtgaccaccgtccttcagccctgcgagaactggttccagtttatcag

SEQ ID NO: 134467 - DNA, 1123 bp, Homo sapiens
cccgaagccattttccccatgtgtccggagggtggggacactttggagggatccatggcacagctaaagaagggcctcgaaagcgggacggtgctgatccagtttgaggtaagaccctctggaggctgaatcccactgccatgtcgcctattgggctgcccctgcctctgagcagtggaggaaatgaggcagagacacaagcccttgtttccttggtcgagatgattgtgtgtttcacaaaccaaaagcagtcaactgagtctctgaggactgacagggcgaggcctgtgcttgtcgtggataacagggcacagcaggcagcccccttctcaggctcggagcagcaagcagggatcagggtggccaccctcgctgaactctgtctcaccctcttattctagtaacatttggtagtcatggagaaacatgccagaaactgaggaggagggactctgagtgtatttaactgccaacacaaaagctcaaaactcccagcagtggaaggcagtggagaggtggctgtgggtgaaggaaccagctctctgaccacccccagccatgtgctggaatttggagcaattagtgttatcccatgagggcatagtgtctcgccctcccaagttgcccagaaccctataaacacaagtaagaaaccaaactcaaacccccatcttccccaggggaacctgtgattcataggattcaggctgttgacaaaggtacacacagacattttttataaaacaaaagggaaccaaaggaaactcagcttttaagccagttttactgatcactaacagaattaaaatagaatgtgttcatcttccaaatttattttcttatttttattttttaaatatgttgttgtcgttgtttaaaatagagacagggtctcactgtgttgcccaggccagtcatgaactcctggtcccacgccgtcctcccgcctcggtcttccaaaacgctgaaattacaggtgtgagccaccacacccagcccatctcccaaatttatttaaaagtagaagaaaacagagtaattcctgtaataaaagaaataacaccaaaaagcataaaataggtcaacaaaagaaaatagatcatcattagaaataacaacagtc

SEQ ID NO: 134468 - DNA, 1071 bp, Homo sapiens
acaaaagctttcacctttgcaagacagataaatactcacctctagctggcaaatcatttcctaacagtacatctaggaaacaaaaggctggaaatggtatagttatattataataagtgaaggttgactaccacggagaaatggcttcagcaatttttatatccttattctgaaatgtttcataacttatattctgagcagtacttctttatatcttacaaccatctaccatgtccacatagcagtggatgcattatacaaataatgacagtactacccgagggagagaaggcaaacttgatcatggtcccaggtgtctgggagcagagcgagtcagcgttcttcccccaaggactgtgttatggtaacaggagaaactcgcttttccccaccacccaggcggacacctgcattcctaagctgaacgaaggggatcaaatcgtgttaatcaatggccgggacatctcagaacacacgcatgaccaagtggtgatgttcatcaaagccagccgggagtcccactcacgggagctggccctggtgatcaggaggagaggtaatggccacctggggggaggagccatagggaagctgtcctagccaagctgcgcctgctccagccctttatctgctcttgaaaatgttgagtttgtagccaacatttgaaaatcaagaatcttcaggtaataaccgaatgtttggcttctcacttgaaaaatgtgaagatctgcccccaggaggcctgtccccatgtggccagtcttctggggggagacagcgcccctgcagcccctttatacaggacatgagcccccagctcccagttcctcccaggcccagcgcagcccacatcacgcactctctaagtggcatgactctgcagacatttgcattttcagccccttcttaaaggatctggtgatattttattcgtgcgtgtttgattttgtcggggaggcagtgaggagagcagggtctgactgtctcgggtgattcctcactctgcctctgcgggctgggggaccttgcaggggttacataaccagtctgtggttcagctggctcaggtgt

SEQ ID NO: 134469 - DNA, 1038 bp, Homo sapiens
ttactggtgggttaatgactgcagagttgagcagttgaatcagagccctcactcccacaaagcctctctggccctttacagaaaacgtttactcatccctactctaggacaaagtgagggcaggtggtcgcctaccccccagctgccatcatgcacagcctcatctgccccagcagctgtgttgaggaccagcgctcacaggccagatgcgctcacagggtgtgcccccttcccaggcctcgctcgcctctgctgaaagcccctatatatatatatataaagcccatatatatatatattaaagcccatatatatatataaagcccatatatatatatatatatatattttttttttttttttaattattataagttctagggtacatgtgcacaacgtgcaggtttgttctagcagcactcgaagacatgctgtggagtccctctctgggggcatctgcgtttttaaggaggagcttctctctgagtgtatctgttagttcatggactgtggggatggcagagggaggcttctgaacagagtcctggtcagcccgctggatccagaggggtcaggaatttgttccatatttctgaaatgacgtgtgattcgaatcagtcatagtgaagtttgaagcctccctgtaccaaagactcacatttattggtacctccatgttgttgatgctgtgagctactcgtttttttgtttgtttgtttgtttaacttaaaaaactttgttttgtttttattttaaaatgtttacagggaggagtggatcaaaagatgcctcttgtggtatcaaggataaacccagagtcacctgtaagtaaatacattccatgttattcctcgtgtttgtttgtttccccctaattctaacaggtttctgtttctgagtcctgtttctttttttgccagagcaaagaatgtgcttagatatacatcaccatgttttctataaccttgcggctcagtgtggtctttgaagccatagcacccatgttacctgggacctcattagaaatgcagcatctct

SEQ ID NO: 134470 - DNA, 1058 bp, Homo sapiens
taggaagatctcttgagtcaggaaatcgaggctgcagtgagctgtggtcatgtaatggcactccagcctgggcaacagagctttaccctacctcaaaagaaaaaaaaatggattgggggggtgcagggagggagagagagggagacagaggtagagacagagacagagacagacagaacgagaactggaaataccattttaacttgttttgtaactgccaagcagttgccctttctgccactgggtgatgctcttgtaaacagtgaaacccagcaaagatgccgtatttggggggaattttgtaaagcttccttttacgtaagtgaaagtcatgctttttcaatctgaaaacttgtatacaacttcaattccaaaatactctgtctctgaaatgccttcccatccataacaccctacccccaaccagccacttggacaccataaggccagactcttgtcctactgtatcgctgtgtttctccattggtctgtcactgaatattttattcaaatagattgtgattatgaatcattctgtgtgactatgatacagattttatatttaaattaggctcatttaaactcactaggagaaagagaagcaccaatttcataaaaaatccatggataagggcttgaaatgaaggtcaagaaagaggcagtagcagctgtcttttgtctgggtttcactgaatgacttggtctctgcgcttctcccctcacttcactttggatgaggttagggtggggcagagtcttagaatgtaggagagccccatagtcatcagctctgtaaggtgtctgtgctgggcctgtggctccggaaggggctggtgtgggtgatgcagagactcaagggtcctgtcctgtacagtgacagcagggatggttaatccctgtgactctgaggggttagaaataggggtcttggaagtgggctctgcatggtctggagagggaagaaaggcttaggacgcacatcggtcaggtttctgtctgctaagccgggggaaagccatgtgaccctgggcaagttactcagcctctcctgacctcag

SEQ ID NO: 134471 - DNA, 1033 bp, Homo sapiens
acagttgtcttgatgggtcaccagcatgacaccctccgagtggatggggcttcatgcctgcataacttcttcgctgtttgcctctttccttagagcctgccttcttccatgggatttggggcagccattgttttttatttcaaaaattctgtgctggccagccatagtggctcatacctataatcccagtactttgggaggccatgctggtcagattgcttgatcccaggagttcaaaaccagcctgggcaacatggcaaaaccccatttctacaaaaaaatgcaaaaattaggcgggcacgatgttgtctgcgtgttgtcctggctgctcgggaggttgagatgagagaatcacttgagcccaggaggtcgaggctgcagtgagctgtggtcgcacccctgcactccaggctgggcattggagtgagaccctgtcaaaaaaaaaaaaaagaaacaaaaaaacaaaaaacaaaaaacttctgttcattggaaggaacctgggggatccccttcttcagctttggcggcagtgtaggaattcccccagccctgagagccctgcgagcaatggagagtcccctacagtgcagctgtgtgctctgtcgttagacagcccaggtgcccactgttcttcccaagctgtgctggaagcctccttgacgctgacccagcatcaaggttcctgccttgaactctcaggacaacacagatggtgtctgttcccagttccacctgccagccttggttactgttccttaagatagacaattccaatgtagtcactttccacccatcaccctcgtaaccaccattctccaagtgcaaatgagccttctagagggtggcactagatctgaatgtggaggaaggatctgcataccattctacatgtccccctcggaggacaccaggcagggacagggttttgttcagagtgtttgtgtcccttttccttgaaccttgccttcttgtttgagtccacttgcgtgtagatgtctctcagatacctgaaacccaatatgatccaatctca

SEQ ID NO: 134472 - DNA, 1128 bp, Homo sapiens
ctgcagtcccatcacagagcatctagaccttcatagtccaatacagcagccaccagctccataggactatttacattccagttcattaaaattaaataagatttaaaattcactccttcaagcactgtttgatgtaagtgatttctggccctgcttgttcctatacattgcacaatgagtcttcttgaaacccctccttgagaccttgtaaagtgtgtcatcttggggctctttttatcttgcagctaaatgttaagaatagcaaataacagtggttcaaaggcaggcttccttgtggggttttaccaggtgcactgacaatagacatgtcagggggtcaagttagtgactgtgctctgcaagtgggatgaacagccagaaaagcagcccccaccacctctgttaggtgggagacctcttcctgccggtgggaagccactttgtgctgggtcttcagaggaggctggccctcctgagggtctgggaacccccattgctccaggtaagaagtacagactggtctgtacctggtgagagaaaaaaagaaaaaaaaaaaaacctgttggttagtttctgtgagtatttgcaaaatgtttacaaaatatttgacatgttttatacagcagatttgtgttaagaggcaaaaagaagcattctgtcagagaaatcggatgaataatatcacagacagtgaggagggttccttttaagaagaagaattaagtgcgatgttctgtactcgtttaaaaaagaagaaagagagaaagaaaaagagcggttagatttggctgtaaacccagagtggcgcagctcaggctgcctgagtgccatcttagcggatgagtcacttgctggtttgttccgtatttatagcagcacagcaaagtttatgattatagttatgaatccttggcagtttgctttgtgcccaagtaggctgcactcttttgttgctcccaaggttctatcagccattgtgtgttcctttccctgcttccgaatgaagaccaaattctgcagagaagtaagtttctttcatggcagaaatgaaaaagctaccactctccacccagataaaagggagagaatgttccctaaagaaagagacatgcagaacagaaactgggg

SEQ ID NO: 134473 - DNA, 1205 bp, Homo sapiens
taatgagttaaccggctctgaatgtcagcctccgccaaggaaggcatccttagaaaggtcaggacacgaggttcactggtgtctaataaaatttttaagtggaatttgctttgaacactttgcactcaacgtttttcccacccaggcgaagtcctcggctccggcacgaaatccgaaagccacgccactcttctgcagataaccttgcaaatgaaatgacctacatcacggaaacggaagatgtattttacacgtacaagggctctctggcccctcaagacagcgattctgaagtttctcagaaccgaagcccgcaccaagagtaagaaactcgtgttgttttatttctgggtatttgctttttggctgttgcggaatttgctcaggtccaggttgccatttgagaggaaccaagagctggtgcctgcagccagctcccacaggtgccttctgccaggataagaacataaatcagactctaccttttcacccggaagacggtctatgtgcctggggtctagagcttgtacttctttttgtccacgacaaagacttcctagtcactaagtacttgttagtctcttgaattagtctcctctccagctcacaagcaaagcccagtttaatcattccctgttctggaggtacagactctagggccatgctaactctgatttctctagattattaaagttttaccatcacatgatttcaaatcattggaaatatgcttgcttctaaaagccttctccgaacaacagggttctgaggggttttgttttcaattaatagttagtataaagaaacaaacgttagaacatctctaattttctttgagaaattttttgttaaatttttatgtcctacctcccccaccccgcttttttaacgtgacagagttccctcatagctcaaggacagaaaaaatgtctgtcctgaaagatggttgagtgcttttgttattcaataggatatatttaacccatttgtttccctttttgccttggttaccagggagttcagaactgcacattaggctcaattgtattcacttccctcagcccagatttcttgtataggaccttctcttcctcatttgcctttgttatatgggtcttttttttcttattttaatggattcatagttacatatctgtacgttttggggtaaactcgcaaatcatttttttaagtaggtaagacat

SEQ ID NO: 134474 - DNA, 1123 bp, Homo sapiens
gctccaaatgtatccagcctagaaatgtaaatagatttgaaataaaagcattcatgaagaagcgcagatgatgataaagaatagattctggtcatctctattaccatgttcataaagacggttaacaaatcgtgctcttgaatattccggtacactggtttgtggccacggcattttgaaaccagttttctgctgtctgttgcatcttacctcatttcaccaatgtgggttaaatgcttacaagtccctgctcctatgtctgtgtgggtgaaatcttgactgtttttcctcccaggctgaatccagggaacatattgtggccttcaacatgctgaattaccgatcttgcaaaaacttgtggaaatcctgtgttgagcaccatacgttctttcaggcaaagaagctactacctcaggaaaagaatgttctgtctcagtactggactatgggctctcggaacaccaaaaagtgagtgtgctgtaaagactgtgtccacactaggctgagatgtaaatgcatcctggtcatcagtgaatagaggacattgttaggcagaggaggaaacccatagcccaggggctccaggcattggatctctgaaccataactaaaagtctcccggggtcagcagtgtctaagggatatctcatgttcccagcatttctctcccctcaactctgctgaactcagcacttccaagcagtcagaatggcagctgtaccctgcaccatgacataataaaggaaatggagccatggttctgtgtgtctcctggtgccagcatactgggctatcccagtctgatgccactatgccagcctctcccacagaactttaattccataagatgctctataaaaatgaatgaaggaatagaaaaacatttccagagtcaagtgactttgggatatattgcctataataattacaaaataacagtagtaatcacagttgataattactgagcatttactttgtgctgggcacataattatatttgactcttacaactctcctatgagataggtactattagccacaggaatgatattcaaaatatttaatgactagtacaggaaaagaaatggatgtaaatttatatatatttatgtataaatatata

SEQ ID NO: 134475 - DNA, 1289 bp, Homo sapiens
gtggttcctgtctccctcactggattataagcctctggatggcagtggctccatgtcctcttccctctgtccccagggcctggcatagaactttgtacatcctaggctctcagtgcattttttttttcttataaatgagtgaagggcagtagggagccccgctgaggccccaagcctggaaacgacaagagttcatgtctgtgcataatcagatttgacagctcagggagagagctgtcaggtggggaaattggggtcagcctgggaaggcgatgctgagctggagccctaggaaccacaggaggcctgccaggccctcctacccctgtatatgaagccaggggtggggggagtaagaggtccacagatacccatgggccaaacaaggcaaggtaagaactcaaaaggggagttgattctcctgactcgttctgcagaacaggaatttttgcatctgccagttggcacaggagaatcgtgaggagactcccccgacttcagggagatggcagagcagtaacacacactaggaagagtatctccagaaggggtgagcccagacactcttctcatccttagactattaacctgtagtcaccccaaaaaatttacttcacagttacatctaccaacagatcgttgaaaatagatgtgtattaggtaatatctaatatgtaatagaggtatattgctgatccatctgggggatgtcccatgaatagttcaagtttcgttttacctacacagcctctccattctagaatgttctaccaaggtctttgtatgatcctagagaatagtaaaattccttcatttccccaaagtatttcagaagtaaagattccagcagagaaatatgcaccctttgtatggattacagaagttttgcataaatgaatgatagtcagcccttggtgtacttgggggattggttccaagaccacttgtagttaccgaaatctacacagacttgtcacacagttggctccgcaaaactcgtgtatttgaaaagccagccctttgtatatgtgggtttcgcatcctgcaaatactgttttccatccatgtttggttaaaaagaatcccccagatagtggaccccacatagttcaaacctttgttaatcaagggtcaactgtaaatttattttaaaagttatgtttttaattaaaggaacaagcattgcaggcctactgtgtgacaaggtagggacttgacattcctactctgcttgaatcctcacaaggccgctctctgagaagggcagtgttttcaccactgttgggaag

SEQ ID NO: 134476 - DNA, 1137 bp, Homo sapiens
ttaaaaaattttagtgtattacatttgcctttactgtttatgtgcagcataaagttgcttttgttacaattcatgttgttttgtaatggttgatcaaagcaaagaaagacatgtgttactacgcatgatctgtcaatgtttaaggctgttgttggttcttgtgactttgctaatatgtttttctcctgacaggttaacctgccctcttaactcagcagtggttctagcgtcctatgccgtacaatgtaagtcacaaagggagcatttcacggatggacaggttgttctgatcagtgtgtggagaaagtcactggttcctcctgcttgaccaagtccctcttccccaggaatcctgctgggcagcatatctctggctgtccagatatgtgtttctactcagactggcactctcctgtagcatggggatgttagattaaggaaggtggttaaggggaaaggaatgaatgaactgtggtgtgaaattttctccaagggagcccatcagacagcagacagctgttgcacattgcattttccagaaactttgctcaggcatttgatctgatcttcatacaaatcccagtgggacaaatatttgtatcagtcatcccttatacacatggaaacctagacccagctaggttaagaaatttgctaggagtcacccctgctgcttggttggtgctactctaaaacactactgggatcttaggaatttcttttcagagttgcagtatagctaatggattgtatattgatctataccagtgctattcaatagaaatataatgtgaatcatatatgtaacttaagttttctagtacactcattaaaaaaggtaaaacgaaacaggaggttttttatgttttatttaatgcaatatattgaaaatattagcattttaacttaatgtacaaagttattagcaagatattttacattttttttatactaagtctttgaaaatcagtctggattttacactgacggtacatctcaatttggactaaccgcacgtcgctagtggctaccatattggatagaaagtccagatggaattttcttgaaggctggtttaaactggagtaggaatccgctcattcaatcagcaaaactttatcgagggtatattccctt

SEQ ID NO: 134477 - DNA, 3088 bp, Homo sapiens
gaaagaaaaagaggctatgcctgcagcgcagagatgaaaagttttagaagagggggaggggaggtgaacaagcatcccaaggcagcaggaggacattgttctcccctgatgtgcagattgtcatagcgccatccgctggtacctagacatgtggacaggtgtactcaggggcacacccccgttagggattctttgaacacacgctgcagatgaagaaagaaagcactaaagagcagggagggtagagctcaggatgatctcaggtagaggaggagatctagcaggctagtgagaaggacttgagttgcagagagcaagaaagtgctcagtgcctagatagggctggcgaatatttactgagggatgatggtgaaattgacatgaagatcttgggatcttagcagcacaatctgatcttctcctgttgccgtctctgtgagaagaaatggactaattttatccacacaagcaaattgactctagatgttgatgcataaagccgtatttgaatatgttcattgtgtgatttactagtatactaacttaatatactttacattaaaagcatgagatattttctagtttaaaaatgattttgaaatgtggtatagcagaatcaaagatctcattactctaattctggttttgtcaccagctgtgtgacctaaggcaagtcacctctaattggcttatctgtaaaatggggctaccagtagcagcgtagcccactcatagtcatggtggtgttgaaatgcaggaatgtacatgaaaatgcttgaaacttataaatggctacacaaacgcaggctattatttctttgtatattttgcataataatgccgatttaaggattttttaaattcctaatacagatgacggagtgcaatgtttaaacacagccctaagataaacgtgtgctaggaagtagatgataactcagtctgtgctgatgttgcataaatgttttactttttgaagacttggagatttctgaaacaactaacttatgtactccatgtttgaaattagcccttttataatggaaaaagctatggttgagtgaaaaaatgcatcacttatggaagagaagcaacttacatacattgactttgtcaaagggaaaatttaatttgtttttgaaaaatgttgtaggaggtttcccctgtaccctgcattttcgagtaagattttttatacctgatcccaacacactgcagcaagaacaaaccaggtaacaacatttttttaaagttttctgtttagtgtataaaaatgagtaaccactaaaaatgtactcttcattttattactatggccaaataacttcatttgggtgtaactacaccaacaatgatgatccaagtaaaaatctggggtgcacatactgacattttaatcacctaatgagttttcagtcttgggcctgcttctcttatctcctgatttgctgccattcccagcatactcccatctgccacctcctacctctcccacctccttccacctccctggcctctcctgcctgctgaacacactgtgctcaaaggacaaaaagtcattttctaccaatgtaggcaggatgtagaagacaaatttgtaaaatagtcatccacaggtcaaatagcatgatgtctctgaagagctaaaatcaaggctcttgaagataacaagacatctcttgttataagaattttctttctttttttttgttttgagacggagtctctctcttcaccctggctggagcgcagaggtgcgagcttggctcactgcaacctccgcctcccaggttcaagcgatcctcccacctcagcctcccgagtagctaggattacaggcaggtaccaccatgcctggctaattttttttttttttttttttaacggagatggggtttccatgtcgtccaggctggtctcaaactcctgacctcaagtgatctgcctgcctcagcctcccaaggtgctgggattataggcatgagtcaccaggccagctttgttataagaattttctatcagatccccagtttgcaagagttagaaaggagagcaggctggattcagcttgtcttctcagtgaatcagcaagtacaggaaatatgtgaaccagataagggaaagagggctgtgataggagttgtttacccctcagggcttggagtctctcccaaccctgggctggtactggggtttttctaggtgtgagggacagagtaattggaatggagtaggagagtgtagcacaagaaagttgttgctgttttaacacagactgcacaaacaaactttccctcccctgtggcaacgttaagcccttttattattgatccatttatttttcttagggagggaagctatagaaaaaaagcaatagatgcttagtattgaatcctgttttacattcatcgtggccaaaagacataatcaaggaggcagcattaactcagacacagagtgttgccttgttaattttttttagcagtaattacatcacattttaacttgtaatatgttgaaaggccaaatattaatctgttactgtattttgccttctttgtgcacctcctccctctactatagcagacactgggaatttgactgtattttttattactttttaagccaatgtccaaggtgtctggtatgacacatccggtgaccacacagaagcatgccctgtcctctgagttttccccataccagctctttatgctggtaaactggggataggatagaaacactcagcccagcaggttacttcataagctgacggacacagagctggtgatgaaatctataagaatgtgtttgaaatgaccctaccaaggtttcctcaggccagtactaaataacacactctgggccaggcatggtggctcatacttgtgagcttcccagcacttcaggaacccaaggcgggagggtcacttgaggccaggagtttgaaaccagcctgggccacatagcaagaccctgcctctacaaaaataaaaataaaaaagtagtcaggtgtggtggtgcatgtgtcagcatctcaggaggctaactaggaggatcacttgagcccagaagttcaaggctgcag

SEQ ID NO: 134478 - DNA, 1021 bp, Homo sapiens
ttttcaagtagtgattagggtatatgttgcccatgaaactgagctccttgaaaacaggaaagaatagaaagggtgttgtttcccccgtgcctggcacaaagctgggcacacagcatgtgctcgttaaatgtgtgagtgagtgggttgtgaaacaatcagcctcacagatggcagggcttggggaggttctggctcatcccacttaaagcccgtggcagagccagcactagaaacgaggtctccagtctcccaggccagctgcaggaagatactgggaccatggctgcctatggtgcccacccaccccagtcaccaccgagcccgtgacctttgcccatgacctcttccatcctctggccagtcctaacaggatcagtcccaaccctgaactggctgctaggatctgccccaacctgtaaagttcagtgtgcaaggaaagacatcagaagagaagatgggatgagagaacaattgagggaacaataaaaggccacaagaatgcaaagggtgacaaaaactgatccctgggtcttccgcacaccccatacaagtttgcccactgccaatcccaggtgatcatggaccttgatgtaggcaggaggagaaggcagtttgcgtggagttttagcacggtgggtgctgtatctccttttcagcaggcatggggcggtggcccagtgccttggctgcagacgtctccctgtcagtgcagaagactcaggtggacaaccaaagtcatggaagtttgggcccttcgcctggcagagagtgggaatgggcagtagagatggatgtttcccagccttctgccccactcttccacgagcacccaggcctccagctattccccagtgtcagggcatcatttttttgtaggtgggaaacattgttgtaacaagtgaaaactccagcaaggaaattcagttgtctagttaggtgtctccaaagtctaattagaggggctacaacgtatacctgtgacctgtttcttcagaagccactttggaggaaaacatcctct

SEQ ID NO: 134479 - DNA, 1094 bp, Homo sapiens
tttattagatacatattttggtccaaatctttgaattgtcgtgactttaaaaaaaattttttttagcttacaagttctgagtacatgtgcaggtttgttatataggtaaattgagtgtcttggagatttggtgtacagattattttgtcaaatgcgtcataagcatagtacccgaaaggtagttttgcaatcctcaccctcctcccacacttcaccctcacgtaggccctggtagctattgctcccttctttgtgtccatatgttctcaaagtttagctcccacaagatgctggtacatgtcttttagtgagtgaatatacatttttctgctgggaatgtgcccatgactgaaattgttctatcacaataaatgcatatgttgagctttagtagatactattcagcagttttccatcgtacagtggttgcactgagttatgctttcaccagcagcatgtgagagttctggttgctccacaccctccgtggttttgccagtcttgaatcataggggttctctggtgggtgtgtggtactattgctttgtgggtttaatttgcatttctttgacagctaatatggttgagtacctgtttttgttttcttcctgttttctaaggagttttctgttacttcctctcactaggttagcaggagcactccatatattcttggcagatgtatatattgcgactatctcctcccactctatcggttgcctttttgctgccctaaatggtgtctctcaatgaatagaggtccttaattttaatatcagtttatcaatgagtcttttcacatttgaaatcatatttataccatgtttagttctgtaaaaccttagaggtagaacacaaatacataaaattgtgaaacataaataaaaatttaaaagcctgggaaatataaattagaagactcagaccagggagttaataagacatgcaaataagccacgtaattctgtgaacgtacaatttagcaatacatattgcttagagcatcttagaagtcaaaactcaattggaaacatgatctgctatgtagttctcattatctgtgagtccgtcagacagtatcgagaggatgggat

SEQ ID NO: 134480 - DNA, 1014 bp, Homo sapiens
ggcaacagaggaagactgtgtctcaaaaaaattttaaaaagctatagatagaactaccatgtgacccagcaatcctactcctacgtatatacctgaaagaattgaaagtggactcggacagatacttgtatgctgaaatgataaaatttaagcattgcaacaccattcacaatagccagaaggcagaaacaacccaaatgtccaatgacagatgaattgataaacaaaatggaatatcattcagtcataaaaagaaataaagttctgatacatgctaaaatatggaggaaccttaaaaacatgctaagtgaaataagccagactcaaatagacaaatactatgtggttccactgatgtatctagactaggcaaattcgtagaggcagaaagtagattagaggtggccaggagttggaggaggggtgaatggggagttattgcctaatgggtacagagtttctgtttgggatgatgaaaaatttctggaaatagtggtaatgtttgcacaacattgtgaatataattaaagccactgaattgtacacttaaaaatggctaaaatggcaagcgttaggtcctatatattttacaattaaaaaaaaaaaaaacgcttgtttaccggagatttaaaagaacagaaaaaaagaaaagaaaaagaaaagaccagaagaggtagtgggaggagcacgtctttggcaggagccaccggtttggattctgccctgccgctgggtcacctcagaaacacatgtggtaacctcatgggcgaagcctggtcccctcttttgatgtgagagtccagtaagatggtgagtgtgggctctctcctgggtcatgggagttgctcagggaatggcttcccatcccctttaatttcatcttttccattgtaaaagattgttctacctggtagaaaagacagaacacagttaacttggcgattttgcgcaaatcatcatcagttaccttgctcatgtttagccatcctcctctaggtggtggcccagcccctg

SEQ ID NO: 134481 - DNA, 1032 bp, Homo sapiens
ggcaagctctgattgttgcatgatggtagcagataaaactagtcttagggtcacagcaatttgtttcagtagttattaaataaaactggttttaggttataacaggcagttttagcagccacgcttgcagagaattacatttttggagcaatgttatgtgccctgagtatttttcccctggcctctcaactctgatttagttgggcattacaataatgacccaaattgtataatcaacttccaccctgtaaaatgaggatcataattgcacctattccctttaagttgactgttgtcaatgagctaatgtggaaaactaaggcaaaacttggcatagaaaaggggtccctcactttgtggtcagacccctgaccctccagacaagtgctttgatctgtgttcagtgctgagagtcgctgtgggtgagtgaaggtccctcctcagccaggaccacaggtcccggttctcaggactgaagggatattccaagagggagcatccaggactgtgcaggggccatggctgcctgaatgctgtgctgatgagggtcccctggcgtaggagtggggttggagacctggcccatgcatgtcacctccctcagccacatcagctcaagggctagcccagaggttctcggtgagggaggcagcaaccagctccatcagctgttttttgaccgccagccaccattgggcctggggaggggaggttggcctctgagctcagtcttccccactggctcccccgagtcccctcccctgctctggttatcaaatgcattcatggttcttgtagaaaataaagtgtcagggaacacaagaaaaattatgcatgatgcttctctgaaagcagctggtccactgtcagcactgccatgatctgcacatgccctctcctgcttccagtggattctctactccacagacgggggagtcttccatacactcctatttttctcaaaatgaagacaaagctgatctctcagcatctcctgcaggccctatgttcatgctctttgagccctcacct

SEQ ID NO: 134482 - DNA, 1047 bp, Homo sapiens
tgttttcacctggatgggagcaatgccactgtgttgtctttgaggcaggagtaacttctgcagggatgcctctggttttagttatcagcactaatctgtacttattggttgccacacactgttgtgagtgctctccaaatagtaacttaattcatttaatcttcacagcaaccctgtcgccaggctgcctcccaggtacaagtaggtgggggctgaactcctctgcccagtgtatgtccctctgtgggtgatgctctgattgtggcccggcctccccctggctgcctttacatagatgtgccgggaaacagcccagtctgaattgcagtggagcactgaccccatttcctttaggggaccggcaggactgtgctgactgcgttttctgaaccaaagaacgggatctgtagtgtgaaaaaagaatgtgtgtgccactgctttgtgcaagaggaggcctgagaagtgtttggatactgagagagtggaatttttgaaacattttgatggtttatatggaaagttaggacagaggatttgaaattggaatagtcctggaaaattgaggtcccatgatttactgttaggatacacaagcttttagtaaatgtttaagcagtgtagagtgaagtgaattttttttactgagcccccatagggaacaaacagtgcattttagcctcaaaatctgactgattccttccagccccattttacagagggggtgagaaaactgaggctcagagagatgaagtaaccaccaaagagcacagtgtttgtaagcagtgcagccgagatttgtctttttggtttttgtttgtttgtttgttttttaaatatagagaaagggtctcgccatgttgccaggctggtcttgaattcctcggctcaactgatcttcctgcctcagcctctcaaagtgctggaatcacaggcgtgaaccactgtgcctggctgcagccaacatttgaacccaagtctgtgcctagacaaatcatctgttgtcaaagtcaaataaaatataaaaacagatgtttctctaaatttaaa

SEQ ID NO: 134483 - DNA, 1006 bp, Homo sapiens
agcaggagaaaaagcccaagttaccatggaagcagattcaggatcccttaccatatcatcagtcatgtctctgacccctcgattcatcttttatcatacagaagatactctggtagttttaagcattctcattcaagtctcagagacctggttagggaggcaaggtcagagacaaatcttatccctggaaaaagctggggttccgaggtggtaattggcttcagagaattgagagcaacgctttgttggctgtgaactggaaggtttcacacacagtggggtttgttgctgccaaaccccaccccattccccaccttgcagataaggaaactgagctggcaaaggtagagtggggccaggagcaagagggaccaattttgaccttctgaactacaggtccaggcacacaagagacattttctaggacaggcataacctaccagaagggctcagctttggggatgggagggagtgagaagacatggcaccctgcctttccccaaccctccgggtttgtggtggttgagaaaagaccagcaatttgtggtccctacatcttttcccaggagagctcaccttccagcattgcggtcctggaaagcagggacaatgcctctttatcttttcccaagatctgttgtagaagctggaatgctgaaggcacccagcacataccctggtctggaagggctggtgggggtgcagtagcctacccagcatcagctcttcattccaactctaatagagacaggaggagaccaggtcagtgtccacactgctcttggctgggtccaggtgacctcagagcctgatcttatagatgtcttctttcctctggccgagaaggacctgagaagtgcttggtaagcccctggctgaaaactgatttggtaatgggttctaagacccagaaatgttgcatctccagagcttctgcttgtgtgtgcacctgaagcttcccactgcccccaggttaacttgttattccaagaccaggtgtgagcac

SEQ ID NO: 134484 - DNA, 1511 bp, Homo sapiens
taaaaattcatgggaagttgagacaacttgacacctgggttttccaagctggtggaaagagcttgtgacttggaaactggagacctccgttcaagttgggctcccccttggccagctggtgaccttggcaagttgtttaacctctctggtcctcagtttcctcccttgcaatcagctggtaataatgcccacctcgctgggttgttgagtggattaagtgggataaattatgtggaggtgtttggcaccgtgcccggcacaaagctagcaagcagttggcgtgatgtgaatttaattcgtttagagaccctcgtggctctcatttcaggaggaaattagaattaggaaaccatcttcagggcctagtggtggagtgacagaccctgtctctgtgcccaggagaacttctgccgaagtcaaggccttcggaaaaacaatttagccgaattgtaatcagagagcatctcctttaaaagcagttttatacattcagaaactccagaagttggcagttggcttcacttacaaaagagctgttttgcaagatgatccatcttgcaaatgtttaagcagatgatgggagaaagtaaagcctgcttaggaagatttctgttttaaaaagctcccaaatccaactttaagcgattatttagatcagggtttctcagccttgcactattgacatttagggtttgataattctttgtgtcctgggcattgtagggtttagaagcatccctggtctgtagattccagtagcaattcctgttccccagttgttccaatcaaaaatgcctccagtattgtcagatgtcccctagggagcaaaatgccaccccagcacccctttagaaccaccaatttaattcttgctttctgtcattagcccgagttgtttgagaatttcatcttgtgcttttgtaataactaacctttgcatagccttatagaacttacagagtacattcacctgtatcgtcttatttaatctttacaactcccttgtgagactggtgtcactcccattttacagatgaggacatggaggctctgagcagccaattacacagtatgtggtagagctggggtgtaacccaagtctcctggttccaagggcaggtctttttcttctgcatcaagctgcctgtccctttgttgtatggaggctttgatatggatgactttccggatgattaaatcaagatgtgaagtatattggaagttggaaacttttctgagattgactagttgaaaattaacaacagtaagctattatctgacagagtaggccattctagttaaatattctagtttatagcgagctcccataaatcccacatgcagttaatggaataccaatttgcagagaattagagtagaatagaacgtgcctaatactctgtattgatcctgcgttttctctggtgatttgccatctcctaaaaaggactcatatatgcaaattagacattagctggggaatataaaaggtcaagttactgaaggcattt

SEQ ID NO: 134485 - DNA, 1005 bp, Homo sapiens
aaacagagtacacggagtggtcaggagcagagggctaatcgaggaaggtggtcaggaaaggcctctctgaggaggggacctatgtacaatgagaaggcgccggccacgtgaaaagctgggcaagaacgtcccacagagggaaaggcgggcgccaatgtcctgaggttagtgaagttcgagtgtttgatggacagaaaggcgctctaggatccgcaggaaggcaggtgtgagatgagacggaggtgggaagcaggagcacagatcaggtaggggtcccacgagccttggggaggtttaaccagggaagcttactagtgccaagggacgagcactggactggaagtcagcgggacctcagctcaaccgcgcacccgtcgtgcaagactcctcatttcaaagtttctttgggcgccgacttcttgccttccctaggcatgaaatcactgagggcctggcacacagtaggtgcccagtcatggctgtggaacgaatggctgcatgcatgcgcgagggaactcaggacctgcccggagctcggcggagagccccggtgcccctaggagatgcgtcggggcgcgccagcccggggcgggggcgggagaacaccgcaggccagcccggacgcccgccccccgcccggcgcgcgggcccgtcgcggccagcccggccggcgggaaccgcccgcgggcggcactgggcatgctcagacggcggccaggtcgcgccgcgagcgagcttccgcgccgcccgcacgcgcgacctacctgggcgctccgcgcccccggatgctgcaggtacgggcccgtgcgaccccagcgggccgggggcagggtgcggggctgccgggggccggggtcgcgctcggcgccaccccgcccccacccgtccctggggcgcgcggcggacgcgcgggcgggctggcgggtgcggctgcaccgggatccccgcaccacgtcggggcggggagggggcgccccgctgcgctcacctggcggggccggggcg

SEQ ID NO: 134486 - DNA, 1034 bp, Homo sapiens
ccaggctagtctcaaactcctggcctcaagcaatcctcccacctcgacctcccaaagcactgggattacaggcatgagccactgcccacctgcagaccttctaacacaactagatgactcttgggtgtggaggttggtgggtgggggggggacatcctgacttacttgttacacataggcaagaaatttagagtgcacagtgatatccaatcacagattagttataccttatttgggacactgctggacacatctttctacatctatctatatctcttttctatctactgattgattattaagctagcaagaaaaattctggaaggactttgacaaagaacctttagatacaacatcacccttcttgctcactgcagaaaagcaagcaatttttttgtaaggggcacatagcccttcacatatcttgcttagacataatagtcacagcctaaatggcttcaggaagatctttctgaaaggggcacacacattgataactcaatgcaagtcaaaatgtgatgagaagcataaaagaaaacagaacaggccaggcgcggtggctcaagcctgtaatcccagcactttgggaggccgaggcaggcagatcacaaggtcaggagattgagaccatcctggctaacacggtgaaaccccatctctactaaaaatacaaaaaattagccaggcatagtggcaggcgcctgtagtcccagctacttgggacgctgaggcaggagaatggcatgaacccgggaggcagagcttgcagtgagccaagatcgcgccgctgcactccagcctgggtgacagagcgaaacgccatctcaaaaaaaaaaaaaagagagagagaaacagatcaaatactctctggtgcagggattagagagctcatagccagtggagataatcggggaagaggcagtttctgagatggaccttaaccaggatttcaacaggcagagacagtcgaatgtgttgtttcgggaggttgatataggtgaccttcatttttcaaggggaagcaagaaagaggt

SEQ ID NO: 134487 - DNA, 1070 bp, Homo sapiens
tatgtctaagcaagatatgtgaagggctatgtgccccttacaaaaaaattgcttgcttttctgcagtgagcaagaagggtgatgttgtatctaaaggttctttgtcaaagtccttccagaatttttcttgctagcttaataatcaatcagtagatagaaaagagatatagatagatgtagaaagatgtgtccagcagtgtcccaaataaggtataactaatctgtgattggatatcactgtgcactctaaatttcttgcctatgtgtaacaagtaagtcaggatgtcccccccccacccaccaacctccacacccaagagtcatctagttgtgttagaaggtctgcaggtgggcagtggctcatgcctgtaatcccagtgctttgggaggtcgaggtgggaggattgcttgaggccaggagtttgagactagcctgggtaacatagtgagaccccatctctatttatttttaaaggaagatctacaggtgaagggcacattcttttgttgtccacctgtattgctgagtgagctaattccaaaccagctctggggcctatgacctccatatttgagcagaagaattaaaaagtctgtaaaatccctcattgaaattatcaggaaataaagggaagctaaaaccctcttagtgtctcatggttttgatttcattgcaatctagaattgtatatagtgcagtatcaatcatgggaagctgccccagtgttgtcagcctctgtgacagtattttattctcacactgtagggtaaatgcattgaggcaaccttcatatttctctcaatcctgcgcaatctgcagtaaccagctttctttgattacctagataggctcaggggcctctccctctgcattatctactagattctcactttaacacattatatacagttgtttaagtctgctactccaactgttaactgtctaacatcttttcttatgctgggctcctggatagaatctagcacttactgagagtgtgatgagtgagtgaattagttgacattgggttgccttattgatatgcccgtcaggccaagttccttgactt

SEQ ID NO: 134488 - DNA, 1025 bp, Homo sapiens
tttaaacaccatgtgcaggaataagaaatgtgtccacggtttcccttctctgaaacattttgtgtaggaggtcccaaaggcctgtctctccctgattaaggaggaacaaggtacctcctaaagaaccctgaataattacctaaaaatagataaacaattttaatctcctttatgtcatacttatgattaaagtcttaaaaatcctgtgcttggtgtttccggtttcaatgtgtggtcacacaccttacctcatgtagtcttcatggcattcaggaagcaggtgttaccaaattttgtttgacagatgagacactgagatttaggagtccctaacaaacatttcttgacgtaaaaatgaaagctgtcttttaaaaagctttaaagattagtgtgataatgtttaactgagtaggtgtgtgttcttctcaggagtgagaaaagtgtgtttggctgccagatggcttttggagacttgtgttggttaggccagcaaaaatgccctccaatctgtggaccagctgcaccagctgcacccaggagcttcttaataatgtagagtgtgagtctccccctccagaggttttcagatttggtaggtcaggggtgagaatctggaaggaatatcgttaaaaagctcctcaggtaattctgatgcacggccaggtggaagattggtcaattgcctcttttggttgcaaggataatttgaggccctgatgataaaaatgtggtctgcaagccacctgtctcagcatcactcagatgcagtttcctggacctcgccctaccaaattagacctaccaaattagaaatctccagaggtgggcatattttaaacaaactcccaagatccatttgttcatttatttacaaatatttcttcaggtctaggtatgtgataaacaccattccaggaactgggatataaaggcaaatgaggccaacaatgtctctcccctaaagacacttgaattttgacccagctctttgaatgctggagtttgagaaccactatcttaaaata

SEQ ID NO: 134489 - DNA, 1048 bp, Homo sapiens
gagagggagtaagcaagagaagaggggtaccatgccctttttagcaaccagctcttaggtgaaccaatagagtgaaaacccactcgttaccttggagaaggcaccaagccattcatgaggtatccactcccatgacccagacatctcccactgggcccaacctccaacaatcaggatcaaatttcaacatgagatttcaggggacacgtatccaaactgtatcactaatgaagacaatgtctgccctgtctatcacaaagtcctagagggatgggtttgctcttgattactataccggcacagaacctgctggggtgtccagtgcactccactagctgtgaaaccagatgtcactcctgtcaaaattagtaaatttaatgaagccatctgtcctaggtccactcttggaagatccctttccatgcaagaggctattactaattcaactgataaaccaacccactcattcactcgtgatgataggaagatggtctgccagacaccgggatacaaaggccaattagacatggctgatccattccttataaagatcataggctaatagaagggacagataaactattataaggtggtgagataaaaattaaagaagtacgagtacgatactgagggagtggagactaatcctgtctggtgggttagagaagctttcaaggacaagatgatacttgaaatgggtttgacaggcagggaggagttgaccagctacagaaaggggagaacattcttggaagaaggtgaacaagcatatacatttaagatccatggtgagggtgtaagggtgtgtgtagggggatggtgggaagtggtagaaaatgaggtggaaactcaggcatagccaggtgtacacagcttgtatactacaaccaggagtctggacttggttccaagggcactggggagcattgaagattgtaagaaggggagtaacacatttgtattttgcttatttaaaagaccatcgggcaacaatgattgtggagaaggcaaagactcttgctaggtcattgcactaataaaagggaac

SEQ ID NO: 134490 - DNA, 1042 bp, Homo sapiens
aagcagcagctctgtgactgggtagagttatccatgcgagaggtctgtgccagaggctggcacttggcaccagcagcattaggagggaggagggaagttcttaggatgtagggattgggacatgtaagaccatctgggtcctgaaggaaggacaagtctctgtgcctgtctacctgtttctccagccatgaatcttgggttctcactcctacttcctccctaggagagactcagtcctgtctagctagctctgtgctaccataccagaccctcagttgttaaagctatgtcctccttacccaggtatttctctttccatccctctttatcacagcatcagcaccagcaccaggaggttcctggaaaagtggctggagacatggtccccttgtccatgtagccaggcaggtctggcttctctgagaattgttggaaatgacccaagtacaaaagtgtaaatcaaagctcctcacatgctttgagaccttcacattttcactgaactggcaatatcagcagcactgctccatgcccactacactggtatgactgttaggatttcaaacaaccatcaaagccccagcaggaagtcttctctgacttcactggtgatgccagaatattctgtagtccagctcacactctatccagctactataagaccctccaaggacaatttttcttcttcttcttcttcttcttcttcttcttcttctttttcttcttcctcttcctcttcttcttctttttcttcttcttcttcttcttccttcttttttaataaaaacccccatggtgcacttttggaaaaaaaatttttattgaggtataatttgcatattaaaatgcacccattttatgtgcacatttgatgacttttgacatatttatataccttaaattttcatgcaatataattgtgaaataatcagtatatggaacatttctatcatcctaaaaagtttcttgtgcccttatttaattttccatgcacttttggtcctaagcatccactgatgtgctttcttgtcataatagattt

SEQ ID NO: 134491 - DNA, 1062 bp, Homo sapiens
atccaatgacaggtgtccttataagaagaaaagaaacagtgagaagaaggccatttgatgatggaagcagagattggagtggcgtaactacaagccaaggaatgccaagtattgctggcagctggcagaagctaggagaaaggcagggaacaaatgcttcctcagagcctatagaaggacccaatcgtgccaacaccttaggacttctggcctccagaactgtgagaggataaatttctgttgtttttggtcagtttgtggtaatttgttaaagcagactttggaaagtaatgcacagccccagaaggagacatggctttttgggtagagcacaggctaactttcagcccttcctgcccagcagtctggtttctttgtgcaaggcacaaactacaccacaatttatcaaggctctgatggagactgagaaaccagagcccaaatccacagaaagaattaaaggagtcagcatttggtaacaggaaaagaatgaactctataggcagatggaagcctgggattctgacactgtcgcaagttagtatgatgttgagcatcagtttttttcacctgcaagacggggtgggaagggaagtagcacttgttgatcaccttttgggaatgatgattcccttgaattcactggatggctctcaggattggatgacagagtacagtgcttggtttcccgtctgtcctcaacagatatttatttcctgtcccctcctctcctcaccttgggtaactggtattagtgttgcaggagcaataaggatacttgaactctgctacaactttgcttaagctcagaaatgtttggagcctcttgaaattgcagccaatggtgtctgccattggctccatgggccttgcagggagaatgaagttgatataccttctggaaaagaaagagcagggaaaaagcaggagctacagtttataaattctgtttctccaacgtggccacaatttgaaatctacactgcatgtttattctgtttgtagcactacatgcatgcaaaactggttgaagacagtttccatgatgaacacaagcattat

SEQ ID NO: 134492 - DNA, 1070 bp, Homo sapiens
catagcagtaagtccactttcattttattttcttgctctattgtctggggtggaagggggcccccgagggtttcggggcaagcggcatgccagcacagtagccgcaggtcatatgttccaggggctaaaactctgtcagggctcagctaggctgccttttcttttctatgtctatagatggagacccccaagggcgcgctttggactgaggatttgaatgtggaagattggcttaaaaaaagatgcttgctgctgggctttggggaaggactaaacagaggcttggggtggggggacgactccaggaatattatgaccgaatgctcaggcatacgttggcttcatagcctggagaaccaagagaagggtgacctgaacggtggctgccatcctctctgcggaagctgtcctcctgttaagtggaaaaccaggagtcagcgactcagccagccacgcggtagaacctcctcccagaaaccgggaatgttagttttcccttctctgtttgatattgacaagggcactggcacaagccaccaccctggaggtctggggacttcatacaactgggtcctggttataatattccatgagagcctccttcttatggtgtggagtatctgaaaacctattttcagcctacaaaggagtagtcagttttggcaaagttcgtaggcactttcagaaaagtgtacccatgtgcatcttgggtttaaaaaagaactctctgagactgcctagatttgagcaatcttaacacagtgttgccaatgatccacagatgtggtatttttactggagccaccacagctggattatatatttccttcgaggatgagggaatgattactgctgccgtatgaaatagtaacaattaaaaaagaaggtccgttaacatattggcataaaagaatctccagacattcttccacctaaatacatttgtgtttttcagttcggaagttctctggaaacacatataaatttgttggagaaatagtgtgtaatgttttggaaccaaagtatattaaagcgttttccaaaacctttttggacagattcttcattgg

SEQ ID NO: 134493 - DNA, 1779 bp, Homo sapiens
caaaagaaaaagcgctgtcaatgctgtgttgtcatgtgaccacttctttcttctcctttcttctgggcagcctgtactctccaccactcacgtagacctcactgtaccactaactgcaatactgtgaactggaagcaaacacctgccttgccttgcagttgaattgctttgatctctctcattttttttccttttcctcacctgagagacaacgtgcatgtgtgtgcttcattctctccaagaacttgcttttcctctaaacctttccttgtgtcttcaagagtgaatcacttccttcctgctcgattggaatggactcttcgtatcagccagtgatatggtagccttaactcacttgactggaattgaacccattggcactgggggtttcattttgtagtgtgttcctgtaacgtagtcacacactgccatgtctctggtttctcacttgcctcctttgctgtggatctttgtttttatatcttgtgtggcaaaatgctgttggctctagccggttgctagtgtagccaaaagtggaccttacttagtctgtccgatctagggtgatgctttttgctgccttacataagcttccagattacagtattgtgcattcatggctttctttctgttaaaactgaaatgaagtcaatgtagaagaacccagagcttgtcacagctgaaatgtagggactgattccataacctgcccatcagcggttgtctctctttctatggtttaaccgatgaaccctttatataagaagcaccattttaaaatttctaaggacatgaaacaaacattgtttgaagcatcagtagcaattgatctccaaacttaggcaaattcacaagccttgtttctattctcttaaaaaaatgtaaatttttatattgtttcttttttctggatattttctggtcatgttaatctattttcaatgaggagatcatcttgagaagtatctttgcagtgaccatatttctaaaacagtctgtccaacctacaatggttgccatgatgctcccacttcatcatggatggtgctgtaatgcattaactgttcatctcctccccagttgattacaaagccttgcatccatactcttttctttctggccccatgagaaagagaatgttttaggtaacttcaacttgtaggtttatctgcccttcaaaaaaaaaaactttaaaaaacttttaaaaattaagaaagacctatcttctcaatgttaagcacttaatttcataacaaatattaagtggcacatagctgagcttcttagggcattgttttgtttttagcttctggagattccagaagagcaaagaatattttttatctagaacacaatgaacagtttttgaaataccttctcagcactcccccaaagcaaaaagccacatatgtagtaaaaccaaagggaaacaatttaataaaataacaatagtatagtaatgaaataaagatataacatgattactggttttaataagagttatcttaactttaagttatttgcccatttatagcattgttatgaattattcataaaattatgtcccacagtatatagttttgaaaaaacatatgatatactacatccagtctaacttctgtggaaagtagatcagaaaaaataagatagtcttgagagaattttattatagaagctgtctaatttgacctattttgcttgctcagtgctaaatctattgcttttttttaatctcctggcttgaaattatatttacttcaataggaaaggtaaaaacat

SEQ ID NO: 134494 - DNA, 1012 bp, Homo sapiens
gaagggaaggaagggaagggaagggaaaggaagggcgggaggaggaagggaggaaggaaggaagaaaggaaaagaaaaagcaagcaaacaaagaagtgaagggatagtaatgtggtttggttgtatccctacccaaatcgtatctttgaattgtagctcccataattcccacttgtttcgggagggacctggtgggagataattgaaccatgggggtggtttcccccactgttctcgtgttagtgaataagtctcacaagatctggtggttttataaggggaaaccccttttgcttggctctcattctctcttgtctgcctccatgtaagatgtgcctttgccttctgccatgattgtggggcctccccagccaagtggaactatgagtccattaaacctcttttcctttataaattacccagtctcagttatatctttatcagcagcatgaaaacagactaatacagatgtgttgagaggtcaaaaattctagatactttgggattgaaagacatattgaatctggagcgaaaaggacaccccatttaacaaactgccaaatgcccctctcccaagggcccctcccttcccacctttatctgaacatcgaagtgtgccatcctgttgtcttgcccaacaatgaatggcaaggcaagcagctgggactatctactcgtagcttgtcacaaatgtgctccaactccagaggatggtgcagtaatttcctccctttttctttcgggttgtgctttctgctactcaaaagttctgctctcctgtgatcaagatggtaagtcctgtttcatgctgttgcccctttggaattgtgccttcaaattccatttgcctggaacagtcacattcttcagagtgatgggcctcaaccacaaaacagcaacagcaaaaaacatttttctctaatatttgttactccaaataggttatcttcaatacgttattgtggtaagagattcttctcaggagtgtttgctgctgtcaggggtaacatgg

SEQ ID NO: 134495 - DNA, 1049 bp, Homo sapiens
accatgtttgccaggctggtctcaaactcctgacctcaagtgatccgtctgcctcggcctcccaaagtgctgggattacaggtgtgagccaccgcgcccagccgatggaaaatgttttgaagtgaaattatatccaataaagagctcctgtcattcatccagttgtgagagtccctttgagagttgccagaaatgtctgctgtcttgtttttactcttaaattaacttgctctttctcgaagtacagaattctaaaacagagttggtgtttttgttgttgttctattatgtcctcctgctttctttagttgttggtactagaatagtcattttctactactttttcatggacattatccttgaaataggttattctagacaagttttggaacccaaactggatttaagaccaaggcattccaagaaaaataaaatctttttgcaatttctatgcatcatctttttataactttcattctcctttgcaaaggaaatgtggggctgtggatgtgaaaggaggtgggggcagtgaccggccagctgcagaacattcaagcctggcctttggactcagagactagggcagaagaagccagagtgctaggcttctggccagagtggaatgtgtcttcccaggagtgggaagcctgtgtttttccaccttaccatctgatctgctccagagggctctgcattagaaaaatagggagctatggggaatgactagggggtggagatcatgagagcagtgtctatggaggattatcagttatgctcagaaagggaagatttggcacctggtcatcgatttttagtacagtaattgtcttgagaaaagtatttgagaatcaatattagaaacaatttttaaaatatatcagtcttaaaggtacataaatgagaggaagaaaatcagagatcagggtgtctgcaagatggtctactaggctttttattattgtaatttgtgattgaatgccctctgtggggccaggtattttgtttttgtttttgtttttgtttttgtttttgttttagatgagtcttgc

SEQ ID NO: 134496 - DNA, 1043 bp, Homo sapiens
ttatcgaactgaggagggagttagctttctccaactctgggcagattaccgagagtaggatgccaggttacattctcttgggagaacagtgctatcatggctgatctctcaattaaggacttcatatttagattatttaaatctcaaatattgaaatactctcatttttctaacaatgataattaagaaaactttgtaaagttacaaataaagtgaaattgaaaaggtttgctgaatgaagtattttactattgaaaggtcttctagaatgtaagtttcaaacacatcgtctggttggtgcattacttaatctattcctgtttggctgctgcttggtatttcccacgcaggagttcattgacttcaaggcaattgaatgcattattagccagaagaagaaaacatgtgagtctccttcacccaacaatagattttttaaaatacattgtgcacagtcctcttaaaaaaggcatcaatggcaggtgggtgtgaacagaggaatttcctcctccaccctggctgttgctgagctgtaagctgtaaacattgtgagagacaaaaagtatcaaggtctcaactttctttcggatattgctttgtatttctgtttactagtatgaatgaaaattttcctgaaaatgctggctaaaactgaattttggtgttgtctttctaatggaatttctgatcaacaatttcctttatgttggcaattgcttaatctgctgaagtaggtaaggtagttgtgctgccttaaaatttatttttatatttgtcattaaaaacaaacatgaaacttggaggttaattttgtctgtttaaattttgatgctttcattttgacaaaatcttttaagaataatgacgaggctgcagtgattgaaatacaatttgtgtggcttttaggcaagtgagcatttagcaagtaagaatttcccagattgggtttagagttgtatttgcttatgttccaaactctttttttttttttttttggtaagataattttgaatatcagtagaacttggggcagatagaatgac

SEQ ID NO: 134497 - DNA, 1051 bp, Homo sapiens
tactgcatttcaggacttaacttttaaggacattttgtgaaattactccctctgttgcagcacaactgtatcttcctagtcgtgttcagcttcaactaaaattcacatgtaaggatctggggttggggaaagattagggagattagagctgccatagattctgactttgagtctttcccgggccttttttctttcatcttttcttcttgatttcttttcttctaaaaatctcctgctcttttcccaaaagaaaatcagtctgctgccagaaagaatataatacctgtcatttaaacctcagtgtaaaatggcttaataatagtgaacatttgcattaaccgttttacagtttacatagtacttttaagtacattttctaacttaattctcaaaacagatttgggagatattattagtcctgcttatgaaggagttctgttctcagcagaattccataattacaaaaagtctggtaggacttttataggtagagccaagaaatgaccccagactctggtctttggacgctaaactctgaattaccacatttcctgcattctttaggtggagacataggcacctgtgttgtaaattaagccacgctaatttgctttgcaaaactattaaacactttttggtaaataaaggcgactttagttgcagcctggctaccaggttatgttaaacacaggtctctgggaccaaattctggcactcatacagacttgagttgaataaacatttataaaaaatgctatgaggaaatctcagctccctaaatttctagatgctccaaccccaccttgcctgaagacagatgtggcaactttatgaagacaggattctgttaccattttagtgggtggtaagcaaccgaagtcccctgagccaaaggctagaaacaagatcgtttagttttcaaacctcaaacaccatccctaagggtgtataaaccaaagggttcgctctattggcatatcccctttatgaaagggtgaggaagatctctaatccacaaatttgaacaccaccaatttcacggatttctaac

SEQ ID NO: 134498 - DNA, 1045 bp, Homo sapiens
acagcaggaacagttgctgctgcagaagcagttacagcagcagcagcagcagcccccatcgcagctctgcacagcccctgcctcttctcatgaacgcgcaagcatgattgacaaagcaaaggaggacattgtcacagagcagatagatttctctgctgctcgcaaacaatttcagctgatggagaattccaggcaagcggtggccaagggccagagtacacccaggctgttctccatcaagcctttctacaggcctctggggtcagtcaactcagacaagccactgactaatccgagaccaccttctgtcgggggacctccagaagacagtggtgcctcagccgccaagggacagaaatcccccggtgccctggagaccccatcggcagcaggaagccagggcaacacagcctctcaggggaaggaagggccctacagcgagccttctaaacgtgggcccttatctaaactgtgggctgaggatggagaatttacgagcgcccgggctgtcctcactgtggtcaaggatgatgaccatgggattttggatcagttctcaagatctgtcaatgtctccttgacccaagaggagcttgactctggtctggacgaattgtcggtgaggtctcaggataccacagtcctggagaccctatccaatgatttcagcatggacaacatcagtgacagcggggcatccaatgagacaaccaatgccctccaggaaaattcactggctgatttttctctgccccagacaccacaaactgacaacccctcagagggccgaggagaaggcgtctccaagtcatttagtgatcatggtttctattccccttcctccacgctgggggactctccgttggttgatgaccccttggagtatcaggctggcctcctggtgcagaatgccattcaacaagccatagccgagcaggtggataaagctgtgtccaaaaccagcagggatggagcagagcaacagggacctgaagcgactgtagaggaagctgaagctgcggctttcggctcagaaaagcctcag

SEQ ID NO: 134499 - DNA, 1230 bp, Homo sapiens
tctccaaaatccatcttctttcccctaccttctccttcccatttgttgagcctgctctatgaggtatacagtaatagcttctctctccaacctgtagctcaggttccctctaccctttcccaatcttatgcccaacccctgcattttcctgggtccttcttgatcctccttttaggagccactgtggctctgcaatccttcttttgcggtggcctgggtgtataaatttgactctcaggggccatgaaacagtgcttccctagtgacccaggatgattcctttctgctttcagaactcaattccaatgccccaaattacagtaggcaaaagcactcgggctgtccaaagatctgagcggatagccaagggactaacttagtccacatcagccatctagcctagctgctcttgtgagttctttttgaaagttatttcccaggaagaagctctgccatttactccagaaacaggttcattccttgaaaacttcgaaagaactgggtactcaagcaaggaagaaatttttaaatttgaggatgagcagggataagtgttcattattctgttaactaaacatgaacatttttggtgtactagggtcaaagtcaactaagttagttgactggtgatcattgagcaccatgactacgtactgttctccttgccttttaaaaattgatctttctgccttggcccagacttccctgtgttctctttatctaaatccagcaagtatgttttcttgaaaaatgcatgccatttggaaaggaattggtaagaaaagactatgttgaagctatgtttggcaaggggtgaaggtgtgcaatgaaatcaggacttttcaaagtatagaattccacattctctttagatattacccttaaaggcttggaaaagacaactgccatggttaaacctgcctgtcagcctcactcttctttttttttttttttttttttttttgagatggagtctcgttctgtcgcccagtctggagtgcagtggcgctatctcggctcactgcaagctctgcctcccaggttcacgccattctcctgcctcagcctcccgagtagctgggactacaggtgcccaccaccgcgtccagctaattttttgtatttttagtagagatggggtttcaccgtgttagccaggatggtctcaatctcctgaccttgttatccacctgcctcggcctcccaaagtgctgggatttgggattacag

SEQ ID NO: 134500 - DNA, 1230 bp, Homo sapiens; identical to SEQ ID NO: 134499

SEQ ID NO: 134501 - DNA, 1230 bp, Homo sapiens; identical to SEQ ID NO: 134499

SEQ ID NO: 134502 - DNA, 1230 bp, Homo sapiens; identical to SEQ ID NO: 134499

SEQ ID NO: 134503 - DNA, 1230 bp, Homo sapiens; identical to SEQ ID NO: 134499

SEQ ID NO: 134504 - DNA, 1046 bp, Homo sapiens
ttccaaaagtcctgaaaattttggtcagatattatgatttgggtgattattactctctctatgcatgaagtctgaggtcttaaatcaaagagcctttgtttccacatttctcaaaataaaagaaaaagccttcacccactcgtatttaaaaaccaaactgaaccgaacaaaatcactcaccagaggacatgcctaagccagggcctccttcaatgacctcctttcttcacacagcattgggataaggttgcaaacatctgaagcgacccacaagtcaccagaaagaaatgagctcagacttgcattttcaatttcgtttcctctcagtacaagggaacatcctgcttgtcagccccagagtgcacggacttgtgcggttccagctgtgacccgcacaccaagagctggtcccttcttctttcatctcctcctttgaaggccccaggggtgggagaatgtgatgatatgaatcttcagattataaacttagctcagaaatgagaaataccactgcttggcaaacaagtctgagaaactgtcaaatattattgcttaaaggtaagtcaagttgttggatgagttgctgatattgggtttatacctatgaacacaactggaagatgatgaaaactctagaaggaaagaaagaactctgctcttacagggcaagcagagtttaaggccaaaaaggaaaaaagttaattaaaacagtaagaatgaaaattatggtgaatagtaattctccaccaagatcctctcttcaaatacatttctactagcatggtgggcttggctgtgtgaagattacctccccccagaaggaaaacatttttatggtaatacatgtaattttattcactcagtacatttaatgatggactttttactctttagtttttcgaatcatagtggactactgaaaactcattattcctgacctcaagtttctaagagaaatgttaattctaaggaagtaactgaaaaaaatcccagctaggaatagaaagcaattttatcatgtgtgttcggttatttatttcaggctc

SEQ ID NO: 134505 - DNA, 1041 bp, Homo sapiens
gtttctctccagccttttggcagcctgtgtgattcctaagatggcacccagaattctggtgcctggtttgaaccatacttggggaggatcatcagagatcacagggcccagcagaggagcctggctgagctagcttcccttgatactgaccagaatgatggccggaagtctggggatgaggcatagtgtcttctctctctggggacctgtgatagcctctcctaagggggtagatagaaccagaacatgggctcagttatccaaagcgaccattctcagcccccttgttcctggaagcccctgctccagaactgctaagccagcctttctttcctgctacttctctgacctctagtggctagaactggaaaaacttgctcaagggatgaaatcatcaataagcaggaaatgtctttgatgttaaatggctgtccacttctctatagtaatccttcaccctctttacaacattctttctgcatacatcccatcatttaattcagccatcatcaacactgggtttgggctccagactgtgactgtcactgtcttatgtaacttgggctggagttggcatctgagcctctgtggtcatgacatccaggtgtcacgacatccaccctaactacattccagggttgttgcaaggctcaaatgacatgaagcctacaaaagaagtggtatataaatccgcttgttactccaaagccattgagtctgtgattctgtaagcctaaaatgttttaattcatatattttggtgaaggcatttaagccctttcctctgattctctatgggagattctgtcccaatccataagcatttacttgtggttgttatatatatttcataatggacttactgattactcaacaaacatgaattgcctacctcgtgccatgtaccacagctactgctgggatctggcaatgatcagacaggcaaggctctaccctaatggagtttgcattcaaatgaattaaggggattcatagacaggtgaaacatacccccctgtcctcaggatgacattatagctt

SEQ ID NO: 134506 - DNA, 1041 bp, Homo sapiens; identical to SEQ ID NO: 134505

SEQ ID NO: 134507 - DNA, 1041 bp, Homo sapiens; identical to SEQ ID NO: 134505

SEQ ID NO: 134508 - DNA, 1041 bp, Homo sapiens; identical to SEQ ID NO: 134505

SEQ ID NO: 134509 - DNA, 1004 bp, Homo sapiens
tggcccccaacgaccttgctggtgggcagctgattgtgtacagaggggaaggaatcttgttaattcaaagtacagaaactgaaagcaacgttttgaattaacaaagtacggcttatctgatatttttattagtgaacaatagggtatctagttgctgcaaagaatagacttataaataaactaatatcagatggagaaagttttggcatgggtgtagaatggcctcctggtattacttcccctcccatcctcttctggtgtggtgcctgttcccggctagggggtgttctgtaagtgtgtcactgccatgtactaaccctggtcttttccctctctgccagtacacttctaagttactgtcttgcaaggtgacttccgaggtacttttcaatttgtttgtcttggtcttactgaatgcatgatccaggtgcatgctgttgtggtttgccatttcctgatgagttaaacgaaaatggcaagaaaaatgacttgtctccatatgtatttttttgtgcctgttctgaaatatgggactgcctcgaaatgttggagtccatgcaacagtgatatacaatggtgtggtttgctgtgctgtgctgtgggggcgagtgggagggtactggggaagaccttgcctgctcacgaatcttgaagacgtttggaccagaggacacaagtgatgggctattttggtttttaaagtttctttaggcattaatagcaagtatacttggcctggttggaaaacagtgcagctcatgcagattgagctatggattttcacccattctttgtttaccttaacataaagctagaaagctccattctatagatttaagatgaaccatcctaatctacagatttatcaaatgtaaaccatcctagacctccctccctccaatctttaaacgtgtatttttattttagaaactctaagccttgatttctccaaaagcctccttgtttaagagacaaggtcttactctgttgcccagggtggagta

SEQ ID NO: 134510 - DNA, 1013 bp, Homo sapiens
tagagattcacacacacacacacacacacacacacacacacacacacacacacgtctgaattaattacagaacagatactcattcaaataccttgatttttgaatcttctgaagaccagttgtggtgcagctttactcccagacacccctgggtcataagccttatgaacccaaagacagctttatatcaagattgccaggtatttcagtaaggatgtttattttcttgtctgtgccattactagaggctttagatttcactagaaatttattgtatggccatggtaagtgattgtatgaccatggtaaatgggcatacatactaggggaatgaattaagaaaagagagctcattgttggtataagtgaattactggggctcttgacaagtagatgtccaaacccaagctatactaaacgtttccataattatgagtattatttttctgcccattatacttttcgtcactaaactccatgagggaagggactattctatcctcaacacgaagcactgtgccttatacttggtaggaaactaataaatatgtgtaaattggattgatagatggcttgtaacaagagttcctaaagagcagagcaaactcaatttgctcaagttgtttgagaattaaaatagggtttaaataacaagacaaagaacattccaagaggatggggaccatagtttttagaactttagatttatttttagctttgatgtaaacctttctgtttgtatctgcaatctgaaaggcaaagagatgatccttttatacaatgtagagttctttataaaacgccctatttgtatgccacttcataatttatatatccctttcacatgatgatagaaataattattccatcatagtttgagagcttactatgtgctgggaactatactttacatacattgcctcattgatttatccgtccaactttatgctgtagtttttatgatccccattttacatggggatactgaagcacaggggtaagtgacttttcca

SEQ ID NO: 134511 - DNA, 1013 bp, Homo sapiens; identical to SEQ ID NO: 134510

SEQ ID NO: 134512 - DNA, 1013 bp, Homo sapiens; identical to SEQ ID NO: 134510

SEQ ID NO: 134513 - DNA, 1013 bp, Homo sapiens; identical to SEQ ID NO: 134510

SEQ ID NO: 134514 - DNA, 1400 bp, Homo sapiens
tctctccatatttgcccagaagaggcagttatgattccacttctcctacatttaattatttttaattgagaacaactcatgatcacaattcataaaatccatattttaagacaatagttcttcatgtcacaaacacaatctattctacatgaggaggctgagaaaggggaagagaaaaacaaaccaaatggatgatgttagctttaggatcgtgtctgcttataatattcactgatctgcagtttatgagaacacattttcacagttatgtttcttcataggaaaactatatttagtgggcaacaactatttttatgatgggatgggggagtatatacacgtatagaatctgtacgcgttgaacaacttggttcaagatggtgggggcatttttagagcggcaataattgaaaaaaaaggcgaactctgccttggagaggtagatgataagaaataaaaaggtgtttataactattttgtattataaagtgggccttagagataggaagaagaatgatggattccttttggatcaatcagaaaggaaacacgaaagaaaagtcaggaaggtagagagagaaaaagggagggaaggagaaagaatgggaataaaataaggaggtaagagatactatttttgctgagcaaccagtgtgtttcaggatgatacaaagaaaaatatagaatagaaataagtgcaggcttggaatcagctacaaatcctaaagatggggtgtgtgtggatgtgtgtgtgtgtgtgtgtacaccattgtgtgtttgtaaaatgtgtatgttcatgagtaagggtgtgtgtgtgtgtgtattaaaattccagagtgaccgtggcacttgggtgtacaggtaattcctccagagctgtttgctggcttcaggagtggagtgagaatttcttttttatgaaaagggatataaaggcaccgagctgatgcagtatttgtaatattaagttgacctaacaaggtatttgcatgagtcacaattacaaagttttgagcggttttgtaatttgacatttaggagagtctcctatttattctcatactttacattcatgcttagtatactatagaggatgccagctttaatctttctgtcatttaaagcaatatgataagggtattcaataattgggtgccctaaatttctggatgagaaaattttcaattctggccatgagaaagaaaaaaaaataaacagccttctttttttttcctttgttttaaaactgtggttttttaaaaaagcaataattaactcagacctcactaaaaatcatttttgtttttatattgttatgtcataagctctattatgttattctaacaagtagcaatttcacaaaatttgtatgtagatgttaacgcacatttcctttgctt

SEQ ID NO: 134515 - DNA, 2032 bp, Homo sapiens
gcagacacagggataagaacagaggaggcagcagcattgcacagccccaggcacagtggcagttaggatggctggagagtaggatagttctatgggttgcccaaaaaatgtgatgcgcttcatgttttctctgactcatggatctggtagagaccatagacatgatatagactaacttccccatttttcacaagaggaaaccatccttatgacttaccttaaagttttttgttctgttttgaaggaaaccatgtgcttcatgaaacctacagttgacaagagaatgtacagctaagagaaaagcttaagaggccacactattcgcggaatggctttagaggcagatgaagtggtctttgaccacagttgattgaaccagagcacttattgcttaaagaataacagagttctagagctgggggttcttgggccatgctccgtgtgtggataaggaaagaaatactgtttctgggactctcccacagtcacaaagctgttttcactgtggcccctacatctcttaacttttgctattactcctatgctgccttccggattactgctgtctatcttcttgctccactcactgaagatcctattataatcccatgaaaatgtaaattacagtttacttgggagagccagattttctctgtgctcttgagttttttattcattcaagaaaccttgggccaccgctttgtacatagcaccgtgctaggctctgggatcccaaatggacccttttaactttctgaagatgggaccgtcccctggaggaaagtcattcctgcctaatccatcgagagaaagaggcttacgaaaaactttgcctctgatgctcagccccacccccaaatagcacacaagcttgttaaccccacctcttacaaaatgtttagattctgtaggtgttaaaagcctttctggaagtattgcattctgccgtgtttataggtgttcactttcctccagagctgattaactactgacatgacttggctttctcatccagaaattatggaaacagggtctgtcagtggcaggaggccgtgctgtgttttacttggatgacacaatgcagtttacttgcctcttcatacccatgcatgctgctcaccctagacaatgacatataagccgtatatagatcaatgtccacatatatatacacacacacatatatatatataaagtgtaacaaggaacactaaaacagtgttgattcttgtctctgaagacaaataattaaaccttttttttcccaactaaagaatggatttaattaaactatgtattgaaaaaaaagtagcctaagtgttagagatggtgaatatattccattttagttaaagaacaaatttcctgaattttaagcattcagtgagctgccaattttgattttgtgttgctctttacccaaattattttttctttgtttttctttttttgggggaggaggggaaaaaagcagcaatactgtgtttggaaattatactctgtatctggttttcctgtgtatgttaaccacttaaatgttattatcctgctttggttttagagtgattgtgaggcattcaatgcaagtatacagttattttctcattaaaatccaatgtgtgttgagtttttataaataatggctgcttgtttgaccgtgagggaggttggaagactgggccaaacagtggcacgccagcgtcctacttggccgctactgtgtgacagcttctggttcctcatgtttgcaacaaaggaatcaatccgagctgagggggcactgctgcaccaggctgttcccacagcccccttttcaatgctgtccccagccaccctggctagatgccagaagctgcaagtgcctcttaaggacatagactcgaagccacagcaagagctggacaaacagcaggacgaacggtaaactccagccttgcctgtagcttttggctctaacctttagaatacattatgagcaccggccgggcgcggtcgctcacgcctgtaatcccagcactttgggaggccgaga

SEQ ID NO: 134516 - DNA, 1088 bp, Homo sapiens
gtctcaaaaaaaaaaaaaaaaaaaaaaaaaaccacattctaagcacctgtatttggctctcctctgcaaggaatagctgatggctacatgttgacatgaaggactccttttgttgtattcaacataaagcccctttccccaaactcttactctggtttctttattttcctactcttcgactacccccaactctttttctttttctttttcttttctttctttttttcttttttctttttttttcttttttttttttttttgctagagctttattgtggtataatttacttaacaaaatttattcatttcaagagcatgcgaagaccacaagtttctcaggaagcgtcctcccttctacttcctccctcccgcttcagtctccggctgctccatcccatcaccgagccctgggcccctgacccctgaccatcagttttcctagtctttccctcggcccctcctcttcctggtacttcctttccagctgcctttttctctctctccgcatttgtaactcttccagcctttttctccccaggatttccaaccatatcttcctgttctgagcatctgggggtgttctgtggcacctgtcaggggtgatatctttcaacctctaagtggtgagagttctgaatttggaagtgggggcacccctttaaaaatttgatcaaagtctagtaacagtggataacacttgtgaatgtcactgagaatgtgacaggcactccaggctctccatgactatgatacatttatatttatatttatattgatttccattttacatagtaggaaactgcagccccgggaggttagtttttcaatgcatagcttgtaaatggtagtgcttgcatttgaaccccggctcttaactgctcttcccacagaagcacacattggcagcttcacatgcgtgtgaagtcgaaatgggcttgcaccatctccccgcactgtactgtccaggaaagaggctctcagggatcaaagccaaggctgtgataggagcccaagtctaggggaagagtgaggttttggtgggagcaacaaagaactttcttcctttggatgaactttctctgggctct

SEQ ID NO: 134517 - DNA, 1088 bp, Homo sapiens; identical to SEQ ID NO: 134516

SEQ ID NO: 134518 - DNA, 1527 bp, Homo sapiens
aacttagatgatctctcaaaatactaatggaatgcctgttatgtgccaggcatcatgctaggcttgggataaagctgtgactaagacaccctcatcctcatacagcttacattctagaagcagagacaaacaggtgaataatagactggtatattctacaaggcaaaaccaaaaactgggcgcagtaatgagaagaataggggaaccagctgtgcatcaggtggttggacctgggttctttgaggtgactgtaaacagagctgttggataaaaagtactccaacctgctgagagccagggaatcagctttcaagcagagagaatgacagacacaaaggcttgagtcaagaaagagcttggtaccttgtagaatcatcagaggagcatgaaataaagctcgatagagtggcagggccaggtcagccagggcgttatttgttctagaacggatgagaaaccatcgaagggtaagtcagggtacatgctttgttaacaagttattttggcacctgtatagaaaacggaaactaaaaagtggaaaaccagttaggcttttttgtttgttttttgagatggagtttcgctcttgtcagccaggctggagtgcaatggcgcaatctcagctcactgcaacctccgcctcccagggtcaagccattctcctgcctcagcctcctgagtagctgggattacaggcacccgccaccatgcccagctaatttttgtatttttagtagagatgaggtttcaccatgttgaccaagatggtctcgaactcctgacctcaggtgatccacccacctcagcctcccaaagtgctgggattacaggcgtgagccactgtgcccggccccagttaggcttttgcaattacctagatcagagataatgatagctgtgactaggaggacagtggggaagtgacagagatggaacaaagcctaagggcctgtgagaggaagacccaggagtgaatctcaggtttctggcagaagccctgggtgtcggggtatgatgtgatgtcatgagtgaggtgaggatgggagggagaaaggggtggtggtgagggagtcagtctctggcccttctgagttgggtgcttctgaggtgcacatcccactgaaggtgctgtgcaggctgttgggtacctagttgagagctccaaggacaggtctggactgggatagaaatttgcaagacattgtcatgtagatggcacttataaacaaacatgacatcacccaggaagagtccagagtgaagagggctcaagatagcctgaaggactcaatatttggagatcaagtagaataggaaccaacaaaggagactgaagggtggccagaggggaaagacaaaaaccagaagagggttttatcctggaagaacagaggagaacatttcaaaaaggaaggagtatcatttaccaaattcccttggagctaagaaaggtaaggttgagaaaacaaaatggaggttggtgattgcaacacaaaattcctatggagtgatggggaaggaagccag

SEQ ID NO: 134519 - DNA, 1493 bp, Homo sapiens
tagcactttgggagcccgaggaaggtggatcacttgagctcatgagtttgagaccagcctgggcaacatggagagaccttgtccctataaaaaaaaaaaaaaaaaaatatatatatatatatatatatatatatatatatatagtgtgtgtgtgtgtgtatatatatacacacacacacacaaaattagccaggtgtggtggcgtgtgcctgtagtcccagctactggggaggctgaggagggaggatggcttgagtctgggaagtggagattgcagtgagctgagactatgcccctgcattccatccagcctgggtgacacagccagaccctgtctcaaaaataataataatcagtaaacccagtgtggggttattcctttagattactattattttgttcttgaacaattgatttttatttttttagactttttagcctttatataatcattctgtgtactctgccttcataataaaactggaaaaattatgagcaagaaataagaggtactagttctgaggaatagttaagattatcatactgagtccaattgtagcagaattttttgttgcttctttgtatgatacttaaaatagttgaaaatttgattggattaaagagcatattggatcgctggagtatctgatgctagtaacattctgaacattctgcctgttaatgtgcccgtcaaaggaagtaaatattaataaaacttcttcattgagaatataaccggtttggcttttgtaatgccattatattcattatattaattttcatatgctgaaaaatgtcctcatgcggaaatgtggggtacatgacagggaaaagtttctggttttggattacttctgtcaaagctcagtactcgcagtcttgtatttaatcctctccctttgctactttccctaccaggatgttgcttcagagtgtgaagtcaaatgcatgccaacattccagttttttaagaagggacaaaaggtacgtacatctgacctttaaaactctaactgggcaataggaaacccagtataagtgaataaatcactggagtgatgttccctttaaagattgaggcatatcaccaagttctgcttttaagaatttttaaatatgccaaaattcattggcttaagtacataatgtgacagctaactgaaaatcaatctttcctagaactagtcctatttatatcataaagcacatagaatttcttagacttgggcagttcatttgttgttaagtattgtgtaaaagaaaatttgtacttgagccttttgacttttctcttgatattttttctttgtttataacttaaatgaactgtatgttattcagggaagtttactttaaataagattatacttctttttccctccacccctattcttccttcattctatgctgaatacatatttatacatatgtatatatatacatatgtatatgtatatatataaatacatatttatacatattttatgtataaa

SEQ ID NO: 134520 - DNA, 2813 bp, Homo sapiens
ttaagtaacttgtgatgtttcaattgcaaaatcctatgcctttgtgacttcaagtgacccctttcataatccataagtgtttaatgaatgtctaccatatacctagccttgacatggaaacatttttaatacaaatgtctatttttattttccttttgtttggtgtagagaaaaaatagccagttcacaatattttataaaatagttatgaagagaatgtcagtatactctacacatatcttgtttcatcttatcaagtaacactaccaacaatgtatagaatttcttcaaactgagttttatttggcttgtttggggatttttttttttttttttttttttttttggctaaaaagtaggtcctgaaaggaggacctccagaatgtgctttgtgtcattgtgtcgagtctttcttttgaaggtttaatatttaactatttatttaatataagcttttcttttgctgttagactgcttttcaggaagccttggacgctgcaggtgataaacttgtagtagttgacttctcagccacgtggtgtgggccttgcaaaatgatcaagcctttctttcatgtgagtattaaacaatgtctgctttgtaagagatttgtgttttttgagttggtggtcacagtggtaggaaagaaagacagttaaaggattttggtttcggtggggggatttctttggctggatctttggtctaaaagtagtagtataacaaataatttaggtttgatacatgtagcccattgaaaacaaattttagaagttaattttgtcttaaatagttctttttttccccacattgaaacatgggccttatttgaaatcccagcctcagaatttgatatgccaagctgttttatactaagaaaaatttgatttagagaaaatttatgtctcttagatctatgtctccaaagatctaaatttttggatctttaattagtctctacttttattaagtttccatttaagaagcttgggtatgttgattgccattacctagttctaaatctttttggatttttcattttaaattttccagtccctctctgaaaagtattccaacgtgatattccttgaagtagatgtggatgactgtcaggtatgtagctggaaatatgagatactgctgagcttttcacattggcctttttctctgaattgcacagtgcttttttccataaatatgtcaaataattctagaactgtaatcctatctaaaaagttctatctcagaagagcaggcaagttaggagcttaatcctagctatcgggagctgtatatcacatcctaaagtaaacaaaaataaatgagtgagacttctgaatcttatcggccacccacctttctaaaaccctacattctactttacactctgagatgtgcaataaatggagattgaatttagctatgatcattacatccataggcttgatggagtcaccaaattatgagaccgcttgtagggctctttgtgaacttgcagtagcatgagaacctgcatttgcaagcctattctagtcttggttgattttagtcaattagaaaccacaaatgttttaacaaataaacaccaaggtacctgagagaataatttggaagaaattccagggttggttgtatttaacaaatacttgttttgcactaggtatataccaggcactgttctgggtggtttttaagtatcagttcatttaatcctgagtgctgttatcatccccattttatagatgagaaaactgaaacacagaggttgttcatgaagtttcagtgagtatgtggctgaactaggatttaaaatgaagtggtctggcttcccagcccttgaccttaagcactacccatcggaggatgctctgtcttgtgggtgtagatcgggtgcttagcacatgaccacagacctaggagagcgggttgaggaggtatcacttcggggccctttacagatatgtgagcattttcacttagccctagtggagaaggaaaggcgatgggggaagggtgcagtgtggcaacagaggcgctggacctggcttccagtcctggctcactagcatctgcttaggccagtcactcctcttccttgagccttaagacctgccccatcaacctcccaaggttgcttattcattgagcaaacatggaatatccaataaagggtgaagggtcacttaaaacaggcatatggcagtgctctctaaacatgggagggcgcaacaaccccagattgtgtattcttagccagtttttgactctgtgccttgggcaacccctgccttggcttgtgctgtcttctccatctggcctgtcctttcctttcctacctgactaactccttgtcatgagcttcaccccttctccacttaccgccttgtgtgccctaagtacccagtgaatcttggcaattattataatgatctttatgtctgtcctttaccattagtctcagtagattcctaggatcagagaccctgtcttaattcacgttggttgccccttcacctagcacacctgccttgcatgtagtataggtgtggaatgaatgaatgatgaatgtgatatggttgttaagttactattctagatgtgtcccagagttgtttttttttttttaaaaagagtgtaattgcatttttgtgaaaaatccttatcccttgttttaatcaaacttagtcttattaaggtcaatttagctaggggaaaattgcacctggaatagagaaattctaactgccactgatcctatcagatagcaacttgattttttttttttttttttttttttttttttttttgagatg

SEQ ID NO: 134521 - DNA, 1293 bp, Homo sapiens
ggaacaataagtgatgatttggaaaaacaattgctatacttctatgtaccctgctgcagctctccccatgtctccacctctagaggtggggttcagggatttgcataactaaaaaatttatgaaagtgttgtcctacctttctcaggaacaccatttgtgaattattttcccaaaaacgaggtagaaattagaaatctagagaagtaactattagtacatgaggtcatattagtgttttcttgttgggtttttttttgtttatttggttttttatcttatggttttttatttatttgatttctttctttacgagacctcttgtggcggtggggggcggggaatgttcatttttttttaaacctatttgaccagcattgtttccttgaagaaaacctagatttcagatacagatgtttatgttttgatttatcttaattgctctggtttggtttttgggtttggtcagcactaacgtactaatgtggttaaaatgagtcctttgttttgggaggccaaggcgggtggatcacttcaggtcaggagttcaagaccagcctggtcaacatggcgaaactctgtctctactaaaaatacaaaaattagctgggactggtggcagaggcttgtaatcccagctactcaggaggctgaggcaagagaatcacttgaaccccggaggcaaaggttactgtgagccgagatcaggcctttgcactccagcctgggcaacaagtgaaactccgtctcaaaaacaaaacaaaacaaaaatgagtccttggtaactagaatattcggttcccagggttacagtatctagatagtaaataattcagggaagttagtggtaagagatttcttgatcatttctactgagaattttatttaacaagcattccttatgaaaaataatatctatgaaaaatttccttcatgaggaacgaaaactttcatttaatgaatgacaagggtatagttttaaaataaagggcaaaaatcaaaggttggtaaacgtgtgatctcagctctggaaaccccattatgcttatgtcaacggtgatgtctgagtgttgaggtttgggaaaggtgagtttccttgacttttcaaaaaattttagattttcgtatggtccaccatagacaaatgagtttaatcaaaagtcatagcttttttttttttttttttttttgcgacagagtctccgtctattgcccaggatggagtgcagtggcacaattttggctcactgcaacctccgcctcctgagttcaagctattctcctgcctcagcctc

SEQ ID NO: 134522 - DNA, 2247 bp, Homo sapiens
ggaggcaaggacgtacacaccgagatacttcccggtcaccgttactcagcactttgtggggttcacgtggctgggggggccggggcgtggcggcccttttcgaggaatccagccctgcctgggcggtccccatctcgagcgtgggcgtgttcgattcaggcccggcggacgcatccccaggtgacccgggagggaccttgtgtctctgggggtgactgtccgtctccccgcctcccaccgtcacgcgcagtgctgatccccacttccagctggagtgcgagctgggcttggggttacaggagccgaagccctggagctccgccccacgcttgcgccagccccgccccgatcccggctcgcaggctccaggggcggggcgtggccggggcgcagcgacgggcgcggaggtccggccgggcgcgcgcgcccccgccacacgcacgccgggcgtgccagtttataaagggagagagcaagcagcgagtcttgaagctctgtttggtgctttggatccatttccatcggtccttacagccgctcgtcagactccagcagccaagatggtgaagcagatcgagagcaaggtacgcgctaccggggaaggccagggtgccggcgccgcgcgcggcctctgtaactggggaaggcggtggcgggaggtggggaaggcggtggcgggaggtgcggaggccgcccctccgcatcgccaggggaaagggacgcggcgtctcggcctgggactgcgggaagcagcggcctgggcgcgcccgaggcggtggagcctgccctggaggaagggaggagaaggacgagggtcccctggagggcggagtggcggtgcccagcgtttctcgcaccctgttcctcgggggattgcacgcacgcggggagcgtccgggggatgtgagagcgcagacagcgtgaggagtccccacgctgcgcctcctgcaccctcccgtccgggcagccccgactggaggaagatgagggaatggaaggggtccgcccttggccccccatctgtatccagattcaggccccaggcaaggatagggagggcccttgcagaaggcacgggtcggtggccgccgctgcctttccgtatgtgaagtgatccacccgcagcgggggtagtgatctccctttgggagcgggtctaggccggagacccccgcctgcctccacccatgcccgaccccaaaggtgacgcgtgctgtatccgcactaagggggcggattgcggctggagaccccctggcacgtgcaggtctgtccaggaggcccgagggccccaggtgaccgcgaggaagtgaggtccgggccgcgcccacgggactcctgtggcgcagggcgcgtttccggcagcagtggctttggaatgactgagtccccaaggttgggcccgggggcctcggctgccctgcccgtccatgattcaccctcagtcggtgggttttgctggagccagggttcctcctgggagcagccgcgccctgctgcctgctcgccgacctatcggtatcccgatcgttgttttgtcctcttaaaaatgcccaaggcgaaacagccttcccatgtttgaaagttattgcaagcctaaaaccttgtagactgggaaacccagagcctaacgcgcagtgtctagtccaatgtagccactccagaaatatttgttaaatgcagcgtcagaaaagtgagtggaggaaattgatactgctcgaacggtagaagacccctcgccagcgcctaccctgcgattacccctccctacctgcgggaagcagaggagggcgggtcctcgcccgcctcgggtgccctgacctgtttggtgccgggtgggcttcggaaacagaagtgtgtctgcaatgtgtccccgatccttttgttcctttgattattattgactctcagtgttttttcctcatatgttgattgccactgtcatcttttatcttcctctcaatcagttttttcttagtgggattctcattttagcagccctcatgtgttgaaaagatccttagtagtgaattgtctttcatatactttttttccaagcacctattgtgtgacaaattattaatccattcctggggaagggagtggggctgggattctgttctccagggtctggcaacctcagtataacccaactgctaagaaccccctccactgagccagaagacctttgagtggtctatgttagttgtcccaaaatccagacactacaaacaaagttgattagga

SEQ ID NO: 134523 - DNA, 1096 bp, Homo sapiens
agctactgtgagaggaattcagagagagtctgacctgccttgattagttcaaggcttagcctgcctttaccagagggagttagattcatctttcacccccaaccctcacccccaatacacacacagggacttcatggacttgcatatcagctttggaggcatttgggactggccagttgccccaacagcttgagatatgactggatataatgtaacagggatagaggggtgtggttagaacgtgtcacaaaaatgtataaggaaggtcacgttcagaggcagagaaatgctgctatttgtgtgagtgctgggcctcccaaatggaatgatcacagacaaagtctttcaatgactgacttttctgagcagaaacatctcattacctttgaccaacaggaaaagtgattaggactcatatctatgctaattcttaatacttttgggaagatccaccttgtttacactgtcagagctctcctctgaggggctaatgaatgaaacttggaggctagaaagcagccagataaaattcatgtggtgccagtttatagtcagaaattatcaaacccatccagaactttactgctactctgaggaccctctaagtctgtctactggtgaagaagaatagaattaaggaggaaaagcagtcaacatgaaaagctctctggacataggatttcgttccagaatgaagttcagaacttaatgctgggacacagcgtgcaggctcccctccactccttcaagacagagcccctgaaagaaccgtgtatggcagccaggctctgactcagaactgcacttctgattactcacgaggaggttctgcccacccaggtactcattccccctacttgtcacataccttgcggtgaggtgaagactcattcctctgtttaggttgaggggatgagggacatctagtggcagtctgcaaccaggaggactcttaccaggaaacatcacttccgtgccaaatatccggaatggagctatgaagtcagggccgattaaatacggaattgactgcgtttgcttcctaggattttgcctgtcccttagtctcagtcaagtttgataagaaggggctgtg

SEQ ID NO: 134524 - DNA, 1029 bp, Homo sapiens
cttggtagccacacctgcaatgtaaaatggaagaaaatgcaaagaaaccaaatgtgccgagtgaataaaggattgtcatatcaattagtgtgggtccatctgtagcaaatgggttgagtgtgtcagtatgtggttggttactgtgtattcgccaggaatcaccccgataggctgccaccctattaggtgatacctgtttaatatgttgtccaggtagactagtagttgcatcagtttgctgtaacaagtaaccagtgaggtaacacagtggtgaagcaggtcaggggaggtcaggaggatgtctgagagaaagaagtccgggagatgaatggctgtctaggaaggaggatgtcagtgcacggttagtgtttgagcagagggcagacttgtaaagtacctgtagtgaaaagaatgtggggacccgattagcagaaaggtgtttgcacgtactttatacaaaatacagaatactttatattggaagtgaaagaaatgaacgtggacttttacacatgtgcatatttttctggaggctatatggattatttgaaatgaaaagcatactaattggactttaataaatcattttcaatcagcgtttggtaatgtgtggttctggtcagtgctatttctcttgttcgagagtcttccagcttgcattgcgtgggtgtttttcccactatgacctcctttatttctctgtaacaagggctgcttaaccctgaggcggagcaaccgtgtgctcccccagcccacaactgctttttttcaatctgagtaataaatcttgccaatgtctgggaggtggtagtttatgttccttgagaggagacaatttattaagatggtactttagctcaacaggataaccgttagagtgggtttctttttgaaagactgattttacaaaaaattttgacaactttatgaaacactctcactagtttataaagtcacggtggtatttctacttataggtttaataaccaacaagataaaagttatatatatatcttccaatgatataac

SEQ ID NO: 134525 - DNA, 1672 bp, Homo sapiens
ggaaagaaagtagtttgcctaagttcacccagtttattacatgtcaaacaaagatttgggcccagacaacctgaatccagaaactatgccttaattaaacattaaaggacacttatcattcgtgcttatcttttgcctgaaaataacactgctattaaaaaccatgttgttatgtgaggtgaagtgtttcctgaatgcagtttttcatatctcaattgcttatcaaactctttgtgttttgctcaaaataataatcatcaatgtctcataattgcttgattttagtaacgtccaaaataaaattttaagttgactatcgttaaattttttctgattttctcaggaaatgagtatttcatttgcgacaatggtggcttccaacttcagtatttttatattgaactgaaatcatttcactttatggtcgcatgttttataatattttttcattctctttttaaaaatccttctgatccctatccttgtccttgtaggggcctttatcatctgctggactcctggattggttttgttacttctagacgtgtgctgtccacagtgcgacgtgctggcctatgagaaattcttccttctccttgctgaattcaactctgccatgaaccccatcatttactcctaccgcgacaaagaaatgagcgccacctttaggcagatcctctgctgccagcgcagtgagaaccccaccggccccacagaaggctcagaccgctcggcttcctccctcaaccacaccatcttggctggagttcacagcaatgaccactctgtggtttagaacggaaactgagatgaggaaccagccgtcctctcttggaggataaacagcctccccctacccaattgccagggcaaggtggggtgtgagagaggagaaaagtcaactcatgtacttaaacactaaccaatgacagtatttgttcctggaccccacaagacttgatatatattgaaaattagcttatgtgacaaccctcatcttgatccccatcccttctgaaagtaggaagttggagctcttgcaatggaattcaagaacagactctggagtgtccatttagactacactaactagacttttaaaagattttgtgtggtttggtgcaagtcagaataaattctggctagttgaatccacaacttcatttatatacaggcttcccttttttatttttaaaggatacgtttcacttaataaacacgtttatgcctatcagcatgtttgtgatggatgagactatggactgcttttaaactaccataattccattttttcccttacataggaaaactgtaagttggaattatcttttgtttagaaagcatgcatgtaatgtatgtatgcagtatgccttacttaaaaagattaaaaggatactaatgttaaatcttctaggaaatagaacctagacttcaaagccagtatttgtttaggtcatgaagcaaacaatgctctaatcacaatattaactgtttaattaaaatgttgtaacaagtataaaacagggaatgtaagtttattaccaaagtgatatgtattccaaaaaagtcatagaagatgaagcactataatattgttcccatatatttaaaatacccaagtacattctaattaccagtatatcagaggaaaattttcgtagtctttgtaaaa

SEQ ID NO: 134526 - DNA, 1717 bp, Homo sapiens
agaagataaaggagaggaatccaggttcctcaatgaagcatccatacatagaagctcctgtgtcaggctgtggtgtttcccacttcctgccttcagtctagcagggttccttgcatttcttggtctaaaagtaaggcttatgggctctttctggaaagatcttacaccttttaaattttaacatgggaagaaattataaacaacaaatgacagtgtttgaattctctcacttttgagcaaagtcaagcagcttaagtatgagagaataaagatattcccttctgttgcccagaaggagaaaaagatcattttatttaaaatctagctattgagatgcatgttccttgtgtctaatcaagttctgaatttgaactcaattagagctttgataaaaggaaggggaaaggaaacttgaaagaatgctgttccattcatgaagggactgtgtgtttttagtttccaagtaaatggcataatgggaccatgcattttccatccaagcattttccatcctgagaataattcccttcctggcttctcaatgaataatgcattatttctgaaacccaagaggcattcctttgattttcctttatgtttagctttctgagtgattttcaagcaaggaaattcaaggacttggaatgaatgctttattaacatttttattgaagttcaaattgctccttggctattatctcctgatatttgaaatatttttttctctccaaggaaagtctaaggtgttgtatttattagaaaatgaagtaccttggccaatcttcaaagtgaacagcagtttaaaaccaatacacatttgtgttgtagaacaaagagctttatgggggtacttttctcctttattttcatttccctgctgaaaagtttcacaaaagaaagctcagattcaaaagtgggctgtttggagactaaatctcatttgtttacattttgtgaaactaattccttgaggctggaccaaatccatgaccccagtccaagcctgcatccaccaaagccagcgccatttaaatctgaagatgcaaatgcccttctggggttgctcctacttccgctctgcctgattacacatatgtagcctgcctgattacacatatggggcccattaggtgaggtgtaatgggacacagtggtgcccaccgctgttggctcatgttctttcagtagaagatccccagcagagtctggagtaacacagtggtaggatttaatgctattttacaacctccattttcctgggatccaaatgatgagtgatttcagaaactaaatgaaatagaattaagcatctcatctatattttcattcctcttacagttatagtaaaattgtaatgattcagaataattgggggaagaaagagaacaaagttgatctaaattagtagaacatctgaaatagtaaatttggtttaaaatatttaatgttatcattttcaagatatagaaatgtaatattttctagagcttgaactctggaggcagcctctaagaacagaaactctgggatttttctgctttccagtactgtggccttgagccagttatataaactttctgggtctcagttccttcatctgtacaatggggatattagtttctatgtcatatggctactgtgaaaattcaataaattattactggtaaagcatataggacagcactatgtgggtagttgttgaataaaaataaaacat

SEQ ID NO: 134527 - DNA, 1131 bp, Homo sapiens
gtgatatctgtgatctcccaaagttaatgaaagacattgtgacagtttcaggtaggagaggatgagaaaaatatttggttaatggcctaggttggtagctagctagccagatccttgttctttctttcacttattttttttattcattcaacaaatgtttatagagcacttactatgtgccaaaaattttgttaggtaataatagacacagtggagtaaaaatagtctgatgacagaagtaaacaataatcacattataaataaaaataaattacacctgtgataacttctaccatggagtgttttatagtgctgagagcatattacaaagggatttttgacttaatcagggaaggcatcccagaagtagcggtaagtaaagtgtgagtaggaattagattgcgaggagagcaggtaacatcccaggaagagagagcaaacacgtacaaaggcccatggttagggggattgtgatagactgaaaggaatggaaaaactaatatgtccagaaagcagacatgcagtgcaagacaaagcttggcgagtaagtaaggactcgtactatgcaggtgttttacacaaaaagaatgggaatcatacatcagacttctcacctgcaagactaaatactagaagacagtgttctgagagaaaatgattttaagcttatgcaaactttctagaaagaatgctcatggatacactctagaaaatgggggtgggggagggagaagaaaagagattccaaaaaaaagatgtacgttagaagaaacaatgtgccacctaggtatgtaaaataagcagccctcagtggaagctgagaagcaggcctagaaatcaatgggttcgattgggttagtaagtcagcgggctgcaggaaatgtctttggggataaattgtataattaaaaagttggaaatacatctgtggcatgcttctgctgtaataaactgtgtgtttcttatctgtaacaaaagagagaataaaaagaaaaagcagttagaagttcaagggaaaacaaaaatctgttcaaaagtcatggtgttgaatctgttttttagtaagagaattaagggcatcacatttatgatatctagtcacatgtttgggcttattcttgacattctatt

SEQ ID NO: 134528 - DNA, 1040 bp, Homo sapiens
tacttttatttatattgagtcatttgatatgcagaatcccaaatagatattgaggacttttgggattatacctctatttatttactatgtctttgagtatacctctttgaatagttttccttttggttgctatctcattacaatacacatgtgacttatcacagtctactgatatcaacattttaccactttgagtgacacatgggggccttatttccatttaaatgcttttacctttcccacttttaaatattattgtcttgagtatcagatggtgttataatgtttaagtcatctaatatatcttatgaaactcatgaggaggatcatctatcgtatgtagccatatttcagcttgttttgttgttttatttcctaatgctccatgattccatcttccatcattttctttctgttcaaaaaacttattttagccatttttaaaaggtctgccagcaacacagtccttttgtttctttcatctgtttctatattcccttcattcttgaagtatagttttcctggatatagaatttgaagatgacaattctttgttttcagcacttggaaaatgcaccttttccttctggcctatatggtttcaggtaagaaatttgctgttattggagttgatgttccctaataggtaatgtgttgttgctctctcagtgctttcaagacttttttttttttttttttttttgcaattcacttatcaaaattttaattatgaaatgtcctggtatggatttctttgggtttatcctgtttgagatttatacagcttatgaatctgtagatttatatttttttgccaaatttagaaaattttaagccattattttaaaaacaatttttcaagcccactctctttttctccctctattctggacctttgatgatgtgaatcttgaacattttgttattgtgctacaagtccttgagggtctgttttttgtcggtttttagtctattttcttcttgttcatagtgagtaaatttggtaattctgttgatctgttctcaggttcactgattct

SEQ ID NO: 134529 - DNA, 1062 bp, Homo sapiens
gctcctataattcccatgtgttgtgggagggacctggtgggagttaattgaatcatgggggtgggtctttcccgtgctgttctggtggtagtgaataagtctcatgagacctgatggttttacagggggaaacccctttcacttggctctcattctccctcttgcttgccgccatgtaagatgtaccttttgccttccaccatgattgtgaggcctccccagccatgtggaactgtgagttcattaaacctctttttctttataaattatccagtctcaggtatgtctttattagcagtatgaaaacagattaacacaaagacatttgtgtacacagtgataaaatggtttaaaagttagggagacagctacataagacaaagggaaacaggattagaatcaggcaaaggagtttgtaagttcttgggtgtggagcttgctttctcctgggaagagttgccttttgagatgctgtcatcctttgaggacaggaaccaaaggaaaaaagcaatgagggaacttctttttgtcccaaatcgcctgccaaaaataagtcagtgatgcttgtcaagcttggacgtgtcttgttcatacagtctggtaatagccagctttcttgtggaaaaatatagcaggcacccattgaacttcttagatgttctctcctctttgagcatgtaacctttcatctacattctacaaaatagccactttgatcttcctactcaacaatttaaatggatccccactgcctaagaaggaaagcagaaatctcttaccctaatgttctcgtccttccaaaatcacattgcagcctgtcctttagtcttattttccataactccacttcacttggtttgttccattcagaatgtgctttttgtttgtgggcatacttaattaggcttatctgctggtctactctgattattacatagttttgtaatatctaaagctaaaaatggatatatatatatatacttattaaaatgaacttgatacacatgtgtgtgtacatatacatatatatataaatacctttcatcaatacttttgcaaaac

SEQ ID NO: 134530 - DNA, 1059 bp, Homo sapiens
tgacccagggtaatctcccttttgagcaatttattgtcaatttaattacatatgcaaaaccccttcacttttgctatttgacagaacctaatcaagggagtggcatcctataactgtattctatggctagaagcaagttacaggttctgctcacacaccaggggaagggggactacacaagagtgtgactcattttggaacatcttagggtgtgtccaccatagatgtaccattttgagtacagatggaaaaaaaaaaaccagcttttcaaaaatgctgttttaaaggaattgatgttgttaggttgaaggctaaaggatggaatgttatgtatttaaatgtatacttagtttttaaaaagtttttgccaggaatattagtcatctgttaaagaatgtatcatctagtactttctttttgaagttttctttaattttggctacagagacattactcttctctgagtctcatatctctttacctgttccttcacttccccttccttcatcccttctgtttgtttttgaaatgctgcatctctaacctgacagttccttctgtccactcacctcaaggatggctagaaatcttatatccagaccgcttacttcctgaacacagtggcatggaaacacataatcatgatgtaatcatgagcctgtacataagccagctactctgttgggttcaggttgtaacctgagtgtctgcagaatggcctgtgggtgagagaccttagattgtttcaatctcactgttaaaatataaatgaaaatttattttctttttggtataggaaacatgctggtttcattcatgttgggtggttcttatgtccaatagcagtcttacataaacagtcttacagaagtgtacagagtatgtgcctgtttatttatacttaatcttttatttaaaaaaggatttggctggtgcagtggctcacacctataattctagcactttgggaggccaaagtggatggattgcttgagcttaggagttcgagaccagcctgatgacatggaaaaaccccatctctacaaaaaaacaaacaaa

SEQ ID NO: 134531 - DNA, 1367 bp, Homo sapiens
gaggatcagaagggaaaaggaaaggaaaggagagttaggggaaaaaaaacacaaaaccactcggacaaaattcttggctcttgaagagctatgaaagaaaatagattgtttcacactaaatagactttcctctcaaaatatttgaaacatccacactaattagttttatcaccctaggaaaatttgtcacctgtaaattaatgtctgaaaatcacctgatctactaaaaggtatcttgagaaattatggggtatctaagaatgtttcaagtaggcatatgattttatattatcctgaggagaaaccatttgtttcccccaagaatgaggatggagcaacaatgtatatttatttttgcattaacctaatacaattgtatgtgtctgcatggaaacttttgtagaaaaagggtaaatcaatcatttgcttgttcataggctttaatttcttcctgagtcagcatggtataatctgaagagcttgggagtcggactcacatgtccttgtgtgcaaaaacccagttctgggctgggcgtggtggctcacgcctgtaatcccagcactttgggaggcctaggcgggcggatcacgaggtcaggagatcgagaccatcctggctaacatggtgaaaccccatctctactaaaaatacaaaaaattagccgggcgcagtggcaggcgcctgtagtccaagctactcaggagactgaggcaggagaatggcgcgaacccgggaggcagagcttgcagtgagccgagatcgcaccactgcactccagcctgggtgacagagcgagagtccaactcaaaaaaacaaaaaacaaaaaaaaaccagttctgatgacatgttaattgtgtgacctagagcagtatatttgacccttctgagcttctattcccatctataactgggtagagtactgtctcccaaatgaggagattgttgagaaaattagatttgttcaagtgcttagcatgctgcctggcacatgctgcggtgaatgtaatgttctcatactttacctgtggctcacatacatgaaagggccacctgtggcctgctgtgattagtggttggagctgccttcccaggatgggcattccttgaagttatctagcttcttttataggcctgtataatgatgagtggcattttcccattctctgcctgtacaaggtgatctgaaggttctatatggggattccactcgttagtttgtatatttatccagaaattcatcctctagtcattcattcaatcaatgatgtagaatcccagcaggattctataaactgtcatctatcaggattatgagactatcaggaatatgatgttcatacaatcttccaaagccaggcttgaattg

SEQ ID NO: 134532 - DNA, 1014 bp, Homo sapiens
caatttttttcttctgttggtacctttgatattgtttttctttgaggcctaactagagcctgtgcctctgagaagctactttctgttcatgtattttagtgaagatgatagtgtctagactgaatgtggtcatggctttacttaaaccctggcagggctcctgcacccatagaggagttattataatgatccaaagcaaatatgaggttctaatagggtgacacagcaataacagggtctttttgaagaaatgggatttaatctggcattgggagactggaaattcatggcttcacttatttattctgcccaagtagacttttgttgacacaaagaacactgcattttaagttgggttttccatgagttcattctaaacaggtatttctgtgcttcaaaaagcttctcatatttatattgcaggcatgaactcattcactcaagttattttcctttctcttgggagagagaaggtagccacttaggagcctagccttaaagaacatgcagaaaagatggatgaagtgaacagtccagaaggttttgctgtagccagcaagtgattcaccattttatgctgaagggattgggtttgctaaccttgccaagcacgtggtactcctttgtatattggtccagtctgagaggaaaggccaagctataaattgaggagctggaatcagtgagtttctgaactaaagcaaaagaggctctatttagacattctttaaaaggtgtgtgtgtgtatatgtatgtgtgcgtgtgtataaaacgatcagacggtagagattagagcactggctttgtttaatttggcaaattctaatgttctagaagaaaagtgaagatgttttaattaaaaacactatttctaaggcaccatacatatattctagagtaccagtagatgagaactacttatttagagtggcagagcatgctatagaaacaaaatatgagtaattctaactgtagttatgttatattagcgtagtgagatagtaacattaatag

SEQ ID NO: 134533 - DNA, 1957 bp, Homo sapiens
atcatcaggcattagttagattctcataagaagcacgcaatctagatccctcacatctgcagatcacaatagggttcacactcctatgagaatctaatgccgccactgatctggcaggaggcagagctcaagcagtaatgcttgcgcatctgctgctcacctcctgctgtgcagcccgattcttaacaggctatggactgttactggtccatggcctggggatttcgaacccctgatctaaggcaccattctgttattctgtttccttttgatcagcagtgaagggccatgtctggcatgtatggaagaaatgacgaatggctgggttcatgagacctgattgctgttctctagccggtcctagcttcacagtttgaccacctgtgaatcctttagtctgggattcatcgtcatttacttacaaagaaaatgctatttattaataactcctaatctctcactgctacctcatgaatctctgtgaagaatcatcatggctgttctatgatgccagggctttatcttacttcccagcacctagaataggtcctggcactctagatatttgctgaatgactacatgaaatatacctcttgttctggattgggagttttacaggttgcctagttacaatagtaatatacccaggtagccaaaaattcaatgcgatttgatagtggatctcattcaaagggatatttgccataaggtcgttataattaagcagctacaactcctgcctctcaggactttttttaaggctaagttccagtgaaaacttcccgcattgccaagtcaatcctaagccaaaagaacaaagctggaggcatcatgctacctgacttcaaactatactacaaggctacagtaaccaaaacagcatggtactggtaccaaaacagagatatagaccaatggaacagaacagagccctcagaaataatgccacatatctacaaccatctgatctttgacaaacctgacaaaaacaagaaatggggaaacaattccctatttaataaatggtgctgggaaaactggctagccatatgtagaaagctgaaactggatcccttccttacaccttatacaaaaattaattcaagatggattaaagacttaaatgttagacctaaaaccataaaaaccctagaagaaaacctaggcaataccattcaggacataggcatgggcaaggacttcatgtctaaaacaccaaaagcaatggcaacaaaagccaaaattgacaaatgggatctaattaagagcttctgcacagcaaaagaaactaccatcagaattttttttgcaaacttgttaataatagtttattttgtcagcaaacatgcattgaagtcttctagactctctgttaatgagtatgactgcaaagatcaacaaaaatatgtatcctgctttcaagaagctctcactgtagcagataatgacagataatttaaataagtgcaatataacatggtaaataaacacaatataatatgacaaaacaggcaaagtgctatgtgaatgctgtatttcaccgggcaatgtctggaaaagacttcaagatgaaattgatgttggaatttcatcttagatgatgtatagaagtttgctaagtaagcctaggcaaaggaattatttctattagatattctttataccctgaattgaatgaaatattcaattacttttcttgtattgtaattagtatttcacttagctatgacaatagccgttgttaggcatgtacatcttgtataaatccttagagtggaaagggaagcttccagaattgtcagacaatatttacttagaactttctggctgcattttgcactggcataatattcacctttttttttgtttttgtgacggaatttcgctcttgttgcccaggctggagtgcagtggcgtgatctcggttcaccgcaacatctgcctcccgggttcaag

SEQ ID NO: 134534 - DNA, 1255 bp, Homo sapiens
ctagccaggattaggtgtaaacattgtggctgtgaaggtaactggttctcaaaggaagagtttccttgaataggtcttcttataaccaattggtaatctccctccctaattaaaccttgaaaaaagttatctgaaactgaatcgcttgtacattattagcatcacatatagtagcttttcacatatattagcatcctgttagctttcttgacaacagcattatgttactatttttcattccacttggtttttatattaagtttgtgctctctctctcctctcctctctctctcactctctgtgtgtgtgtgtgtgtgtgtgtttgtgtgtgtgttcagttatattcactgagtcagggcacctctggaatctactctttgacaagaactatctggatgattctgggcaagttactttccctgtgttaattttttccgtatgataaggtgaccaatttgatttccaagattacttaggattctatttattctgtaaataaaattataaggacagtaactactgtggatcaaccatgtagagctttctagaggaaaacttgaaaggggactgggacaaaaataagggactatgattcttctttgtatgaacggtgcattccaccttcttttttattttttaaggctagtcaagtagaacagtgggagtggagaaagaacaaagaaatctgtaattggttataatcaattagttgtacacgtccctgcactcagaccagccattaccttctctcataataagcttttagatgcactatcccccattaaagggagtggcgagtgtataaaggatcctctcaaagagatgaatctgggggctttactttcctgtgggagagccatgtggcaggaagggaagacttcccaattggtcctgttgctaggggcagggaatggacacagagtctcttattccctggccacaggtgaccggctacacattctgttactctgaaggggaactaaagctaccccatgtctcctcaggtcccagtggcatccctgtaaaggcctctttgaggaagaacctgagcgaatatccatgagagcctcgattgtttggccagccattaggctgcttggcaccatgggtggtggccaggagacagtccttgcaaaagtcccacagtgcttcccagaccccacatcctgggcttgggtcaaaacagaaaacaactttcaaacaccagctctttatacccttttgttgcccatctccattcaaatattttttctca

SEQ ID NO: 134535 - DNA, 1008 bp, Homo sapiens
ggggtggggagttcctgaaaccatgtaaggttaacttccaagtcattgccattgcatttgtaaaccgtcatggtgctggtaggaatgtctaatgcaaatgtattatgattcctggtccttgctggtttggattggtttctttgctacatcctgttttgatcagcagcgttgtgaaaacaagtcctgctggtctcccacttcagtaggaacaagaattctggtctactcgaagttcttctctttgtaaattagtccattgataatctggttattttactttagtttgtgtacatttggtttttagtatttgtcttcactgccagattgccaggtttgtgagggcaggcaggattgtaatgattgtttgttttctccacgttgccacattgcctgtcacggctatctggtacaaagtaggtagtcaataaatgctgagggaatgcatgtgatgacaaaaccaagtttctctgccttcaaaactgaagaccagagccgtagtgaattcactacagtaaatgccactttattcagctatgtgggagccaaacctagcgacacctttatgttctatgccttctaaaatacaacagcctggaaaactcctggctacaatgggtgctcagtaaataatatgtttgttttacttccatttattctgggaatgattactcagtttccattttcacttcatcaaaatgatccctgggttttagacctattcagtcttcatgatcaaaagaagaatttgttggtcagcaactgacttgttatgagtcaagttatattaaaataaagtcatctttgagattaataatgggcaataccaatggctggtttttaagcatgatcttgtattaagctgcttttgagtgagtactggatcttaataattatttttagttgtgaaatacttatttggcataaatcatgtgctaccttagaaattagtatttgtaaattacaaccctatggcgtataggtactgttattgatttgttatccttattt

SEQ ID NO: 134536 - DNA, 1049 bp, Homo sapiens
cacctactatgttctacgctctgtgctggctccatgaaaaggacagatacagacatttcctttggagctgagagtagagtgagagttttttaaaataattacccaatggaattatacattctccatagactatattcaggttaacgtttgatcacattaaaaaatcttttttgaaaaccttttatcatttcatctttccctatggaaattgaaaaaaaacattttatcacctcctctttccccacagaaattcaatggaaagttcctataattctctgtgctccaatttatatagcatttttgggtgaatgtaacatgggattatgtggctcctctgaaactctgggaattaccttaattttagccactggaaggagacagggtcctgctgatcattatataaagtagtattcagattgatgcataggtctcgtctgttttggttaggatgactgcatcatggacatcattttcagctatactcattgttgaccctcttgtagacctgtgagaatagcaactaagccttgggatcactgacacacctaaaaccctgcctaactaactgaaacactgaggaccccatcacctcagatatgagattgtcttattgcatccaatgaagattagtagaactacaaaaatggtttctctgtatgtttattaacaggaccttaagcacacctgtgccacaaggccacattttccatgatgtggataaaacacatctttgtttaccatggatgctatttttgtatgaaataaaacatgagacattaaataacatgagacttttttcctgtattgactcaaatatttatttgctgatgacctaaatgttggttgacattttttatatgcatgaactttttctattacgacaagtgctactcatagtttgcagaattgccagcagcaaatgactactgaacttggactattaacctgccaagttcttgttttaattttgacctttgtataatatcttgtgtattccagtgtgcaatgtactgaatgattcacatacttttgtgcctctttgggttgtt

SEQ ID NO: 134537 - DNA, 2102 bp, Homo sapiens
tttaggggtcccaggtaaacttagagcttcaagaagaatgacttactctatgtgatgtatacttttctaatttctagtttgttacttattttctaattttgtttaaatatattattatatataattacatattataattatatataattatatattatatattatgatagataaataaacatatattattctgttttaaactgtctcaatcctttttaaagtgattattataaatattgtaaataataagcaaatatattcttatcaatgatgttgaagaataagtaaacatgttataaagcattttcactccacactttaaaaaatatgctgcatctaatctaagtatattttacttgtagaacattgtcaaagggtcacctactctttggaggttacgttgggtcctccaaaaagaaaaaaaattctcaaatgtcatagattggttgacaagtcctattctgaacttaaggagttgtgggggtaggcagtgctgaccacaggaatgttgagcagcaaatgctggctttgggcaaaaaacctttgatgcacagtgacttgtttgaaatgtttggaatgatggtccttgtgggaacctgcattacaaaatgtctgtcccacatggaacatactgtgtgagaatagaaatgcagaataatagggcaatgataccctatctagaaaccaactgtgtttacagattccctaaataacaggtcaaatagattttactatggtaaatattccaattgcaatgttctgcaaaatttttgtctgtctcatgtattttaagcaagatttcttggccatgtggcttttgtagtagacttcaatgacataaaaccactaagcagagaccttgtcatttatttaactccaactgcctttaatcttaaggacagtaatattgtgagaaaccttggagtttcaacataatcacaagatggtatgcaggatcaaatgttcaaattatttgcttttgtttttctgttgcatgtactataaaagtcttgtgttatctatataagctttaaatttggacctgtgccttctttttcatcatcttttctcctttttcttttagttcacagccatgaatgaaccacagtgcttctacaacgagtccattgccttcttttataaccgaagtggaaagcatcttgccacagaatggaacacagtcagcaagctggtgatgggacttggaatcactgtttgtatcttcatcatgttggccaacctattggtcatggtggcaatctatgtcaaccgccgcttccattttcctatttattacctaatggctaatctggctgctgcagacttctttgctgggttggcctacttctatctcatgttcaacacaggacccaatactcggagactgactgttagcacatggctccttcgtcagggcctcattgacaccagcctgacggcatctgtggccaacttactggctattgcaatcgagaggcacattacggttttccgcatgcagctccacacacggatgagcaaccggcgggtagtggtggtcattgtggtcatctggactatggccatcgttatgggtgctatacccagtgtgggctggaactgtatctgtgatattgaaaattgttccaacatggcacccctctacagtgactcttacttagtcttctgggccattttcaacttggtgacctttgtggtaatggtggttctctatgctcacatctttggctatgttcgccagaggactatgagaatgtctcggcatagttctggaccccggcggaatcgggataccatgatgagtcttctgaagactgtggtcattgtgcttggtaagttctgtcttgactgtaacttactttatagattctcagtgactaacataaaccacattattttatgtcagaggtaaccaacagtatgaatattcaccaggtaattcaccaggaattacaaggggatgaggcacctttatattaaatgtcagcttatgagtcttcctaaaattatagaattagcgttagggaaacatgggtcccagtggtgcagtataaatgatgatgatgtaaaagatgtcattgaagagtttggctatctaatat

SEQ ID NO: 134538 - DNA, 1054 bp, Homo sapiens
aggagcatggggatatcaccaactcaggaccttggtttgtgttaatttcttctcctgagggttctcagacttgacaggtagtctaagttcaaatcccagccttgtgtgatttatgggactagagtcatgatttcttaagggactctttatttattttccaatctggagcctgagcttgacaaaacttccttgttcttcccagtgcaagtagggatatctttttttttttttttcttgatctacacacttaccaatacgaagatcttagagactgctagcttggtgggtgggtctcaattccaactcactgcctcagtcaagcccaagggctcatcttctgtttcccaatagtattaaagccctgtcctcatgatctctgacaatctgctgcctggacagcctttcaccttggtttaagttccctcttagcttagcagtgcatctaaggactatttattatactttatccagcacatcttagtgtttttagtgaatttttccattccttcctcttaggactgacacagaattctctttggaaatttgacaagtatgatgatgtgtaccttttctcagcatggtagacaatgggctataatagataaaaagtacttttattaacttacaatttatgtgttgcacagtttctttttgcatatgtgtatatcacattgatatacattattattttataagaagtagcattttatgtactttttcagataaacctcctaaaatttactagttgcatattcttcagcgattttaagtattctagtttaaaatcatttttagtggatatcagtattgttttgtggcccattttctagttattgtgacaaaacatctcactttttaaaatgtccaatttgaagctctaagaagggtgaggacttttttcttgttaatagagacttaatggaatttaattaaattctatgctgtctcttttctaatcttttttggagaaagaaaataggcctgattattttgaatttaagaataagaatttaaaaagtcttagaggtcatccttaccttaatttacaaatgag

SEQ ID NO: 134539 - DNA, 1023 bp, Homo sapiens
tttgtatagtatcagccttttgatagatacctgacgtatgttagttctttcccttttccccatgattagtctggaagttcttttttttttaaattttattattattacactttaagttttagggtacatgtgcacaatgtgcaggtttgttacatatgtatacatgtgccatgttggtgttctgcacccattaactcgtcatttaacattaggtaaattctggaagttctttacagggagaaagaggtaaccactacatatggtctgtgtatgtggtatgccagaagacccatcaaaggaaggccacgttggataaacactctatggaaaactccaacgtattgccaggaataaatgcatgtggagataaacattgagacttctgacttcatcttgaaccatgtttctattagaagttaaatttgttcccatattgcaatttaaattcatcttgtgcctccttttgtgtttataaactcagataaggtttgagaagagatattattttggaatctgaaagcccattttgaattttctattcataagatgaaattgtacaggggtacctagggtaaaccacataagacacctttcatgtttgtttatttttctttctaatacatcctttttaattggtttagtcttcaatggttaatggagctactcctttatctttcaaagtgggtctggctttttcccacttcttgcccattagggaactgtttgcccaatctcgttttcatacccctagattctccagctgtctttctttgaacttttgttgcagctttgctgtgaatacacactaaggtgggacagtggcctgctgtttttttccacctgagaaaatcatagagtccaggggatttctgtcttttaagatctgtaccttgccttaataagactgtcatttaaaaaaaatcaacctttccctgctgtgtgaaaatattaatactgccatttggtaattgcataacatcacttaagagctgcccttaagttaaacttatcccatttcataca

SEQ ID NO: 134540 - DNA, 1070 bp, Homo sapiens
agcttgaaatcagccacatggaatagttatactgcagaaatcggcaagtgctagaattagcataaatgggttaggttataaagttggagattttacagggtctttcaaaccgtattaatgaatttaacattgatcttaaaagaagtctttgttagcttaatggtcccagcctttgaaatagacctgggttcaagttctgactttcgataatagttttattgagcaagtttattaattaaccttaaccagggtagttgcattattctcaccgtattttgggaatagtggcagcctctgatggttggggaactaagcccacggggaaggagtcagctatacactgggacattaggtcatagagatagatagcttcttctggagagatgcagaccattgggtcacttggttcccaggatcctttggccaatgatgggcctcctaattatatgtcaattcctcacatgtaatttgtacagtgaaatttagtccaaggctgacttgcccttgccccgaagcttctactgatgtcttctctcttattatcagttttgcccaagttcaaagaaggtaaaaataatttagatatagcatcttcttaggcaagcataataagcagctcactcagtcaccttagcctggtattgtctggcacatcaacttgctttcttttccagtgaattcagggaccttgtaaagataaatccacattcaagtgtgaaaggcctgaaaatccttttctaaggccaaaacaacaattttttagaaaaacttttggttttgtttgttactctattcattgggtaacaaagagcatttttctaatcaaggctgcctaatactacatataaacgaattaatatgaacaaatagcttgtgattgtttcaaacaataatagggaagaaagcttgcattgtcacgcctgctgggattgctgtttagttagttgaaagatatgccttgttttttgaagtggggcaagtttgtattctctgctttacccctgccttgactctgagacagatttttgttttctcatgctgagagagcacctagctcttacaaagctagg

SEQ ID NO: 134541 - DNA, 1258 bp, Homo sapiens
tccctgtaatttcacagccccaggtaagggcttcaaactagcagaggtctgaggtaatcgtaagtttgtcaaatatttaaactgggtttcaggaagtgtatttgactctagggatcatgtatatctctctcgctatcatttggtgtgtattcgaataatggtgcttttgtgagtgaggtgccatttcgttcaggaagcagctggaacaatgaacaagtgattttagtgaactggcctctgttcataggaggccttggttttcagtgcttaggatgtctgacattataggcatcaaactctaaatcaaagtaagtcagtagtaaaccctgctgcttttcctctcttggcttttttgtgggccggggggtggggtggggtttaatgaaatatatcagaatggatctaattttataacaagttttctgagggctgtcttgttgtcctcctcctatacttactcttttgccttgatctgttctaggaactttgaaacaaaatgcaattccagaaacttctgagcagcaatcgtatgagttatttttttctgtccagtgaagagcagtaatacggcagggacatggtctttgttcagatgattttacagcctgatttaatcaggcattggctggactctttcagattcaccaggcagcagggtacaatgtggaaacagactttggagtcataaggccacagttcacatccctgctcctctgattgcaggataaagagccctagtcatgctagcttctctcagcttcagtttcctctcatgtaatcattcctcacatgatggttatatggataaaatgatggttcatatacatgaggcatacagaggtgctcagcaagtgtagtttcccatttactcttcatttatcttctttctatagtgtgacctcctttcttatttgtgacaatcattttttggccaactttatttttatttatttatttttttgagagagagccttgctctgttgcccaggctggagtgtagtggcatgatcttggttcactgcaatctccacctcctgggttcaagcgattctcctgtctcagcttcctgagtagctgagattacaggcgcccgccaccacgcccagctaatttttgtattttagtagagatggggtttcaccatgttggtcaggctggtcttgaactcttgacctcaaatgatccacctgccttggcctcccaaagtgctgggattacaagcctgagccactgtgcccggcctcgggcaactttgaag

SEQ ID NO: 134542 - DNA, 1053 bp, Homo sapiens
gaggtagatcgcgccactccagcctgggtgacagcaagaccctgtcctaacatgctcttaggagtttcataaatgtgaccccagaagagctctctagccctgtttccacttatgaggctaaattgagaagatcgcagaccacaaccccgaagaggcctcatcagagcccaactttgttgtcaccctggtcttcgacttccagccttcagatctgtaagaaagaaatgtttgttgtttaagccacccagtctgtggtagctttcatagcagcctgaactgactaagacaagtggatagctgtctggttgttttagaaagcagggctgcatggtgtggggatgctgctgctactcattcctgctcattccagtgttctggaaaatgaggtagggtgggggaggtctgaaccttctaatttatttctagctgttcttttttagcaattaaagcattcgttggacaccagttgcttttaattcagttccatctgcactgtacttaatagatattactcccaggttcttataaatggctggttgttattcttggtttcagagctattttgagtttttgtcttcatttgtattttgactggaaattgggtgtggacatattggggagttggggctgacatcatctttattcagaagtcactttatgaccatgtgcgggatatattaatttcactacagcttttgatcttaataaaatgtctctgggttgagctgactgatcacgaagattttaaactttaatgtttcctaagaggattgatacagccatccagagaataacatagtatataggagttatcttttgacagatcaagttccatttccaaatgatataaaacccacctgtgtccacatccttatgccttcttttgaatctatgatttgataacttaagaaatctatctatgcattagatattgcctttccggtagagctatggtgtgatcttatgctcatgaacagaaaatgaatttaagaatcctcagacctattgtccagttcttttctttaagaagaacttgctattgactttgtcaaa

SEQ ID NO: 134543 - DNA, 1044 bp, Homo sapiens
acaaaatgtcattgttttgtgtcacggctccctgatcaccctttttttctttttctttttggaatcagaatagagcaatctgaaaaatgccatctaacaatcccatttttattgatcccattgtaattgtaaatgtttgacaggttatagcctctttaaatgcccttggaatccattaacgcatgtttcatagagttcacacagggtaaagtggtactttggtcagaacatggtttgctgaatgtcactgatttgtctctaccacacagctggcttctgaggcttataatgggcaattaggacaggaaggagttacttaagttctttttaaggtaacattaattagattcatctcttaccacatggtgagggtcatggttattacatttaccattttgggtttggtgtttaacctctttattgtggattggttggtcctggacattttcagatttagttttgtggtaggatgttttgtctgtagtttgcgtgtgtatttagaactggaatgaagtgtactttttaaaactacgaccccaacagcaaaaaggattttacaagcacttttggccttcattgttagagtgtcttcttgttctatgaggaaataaatttgatccttatcctggaattaaaaaaaatccttgaatgtattttttgttgttcttgttgcagcaaatgcagatatcagcgattttcatgacgagtttgcttatttaggggagaacattttctaaatcacgtaaagcttaacattaacagaagaaaatttgaaaattaaaattttaagagtgaaattctagacctttcacaaagttacaggctgaatccagctggtctgtcctgtccagtcacaggaattcccgcttactattaaacgaaattttccttccttcttcctctcctttctctttccttgccttttcctctcctctcttctggcatatttctctcaattgaacagtttcttagttttttaccaccaacctcaaaggatcaagtgtgaatgaagtaattgctttattttaggctctttattttgcc

SEQ ID NO: 134544 - DNA, 2019 bp, Homo sapiens
ccccacctagagatagccattgtcaagtttatgggatattcccttttaatattttctctgtaaattttatctagttggaatcctactgggcataatcagtactttgtcctttctcttaatagtatgcagtaaatggaagtgatgttaattccattcagctactgttatagtgaactcacttcagtaaatatctttgcaagcctatttttgcatttcaggtaatttctttagagtagattcctggtaatataatttgttgccttaaaaggcagggatgatttttatggctagagatagaaatgattaaattgatttccaaaacaatgataatgcttcatactcctaccagcagagtttgagaaaaacttaaagatggaaattagtataagtgaaatgtgaaatgattagagcaatgggaaactttaataataatctgtcctggatgacattgactagacctcattggtggatgttctctccactgtggtcatgtctttcactcatccacagttttgtcttctaacagagaactttatgtttcaagcttcccttagttttatgtcctttaatatgctgtgaaaaagtttttttttgtttgtttgttttgtttttttttagacagagtcttgctctgtcgccaggttggagtgcagtggcgccatctcggctcactgcaacctccacctcctgggttcaagcaattctcctgcctcagcctccctagtagctgggactacaggcaggcaccaccatgcccagttgatttttgtatttttagtagagataggtttcaccatgttggccaggatggtctcaatctcttgatctcgtgatccgcctgcctcggcctcccaaagtgctgagattataggcgtgagccactgcgcccagccaagctttgtttttaactgtatacactgcatcaactgatggtagggtattcctgatgagtatacttctgtgaaataactggttaactactagaaaatggagcaagtgctctaaaaatgaatagcaaagaattaaaaactaaatggtaattatacctgtgctggtttagtgtgtattttgcatatttacccgcataagctcaattttcttctagatgccattgatattacagtcagggaccacttttgtgccttggggaaataaagtgagcttccttaggaggtaatagatttgcaatttcacccattactggaagtagtcacatgtaatccaattaaatttgatatctcattagtgatggaggcccaccttcaaaaaactcagactcgagggatgggaactgaatgaaggtaccatgtgataaatgcaatgttataagttagttgcatgtctgttttcctactaaatatagtgaaatttaataagcataggaaggaaatggggtaagaggaagtgagtgtgaatttaagcagagaccgagaccaagggcccaccttagggtgctattcatgtattagaaaagggccacgcattttgctgttcttcctcatagttgacatgaagaggggactcaatgagctgtgttacccagaaagcccatgaagataaggactaaccaggggggacaactcttcatgtgctgggaggagaactcttcatgtgctgggaggagagaggattttatccatggttctccaaacgttaggtactttaatgtattgagtcgtgtctccaaatacaatcttacaatgaatgtgacaatggggttaaaaaaaactgtattgctcaatataggttaatggcataatgccaattgcttatctcagaaaagccattctgtaagagccaaagcaagacagttcagacaagcagctcactgctggctctgtccaagcatagacattccacattctttgtggagtgctgaattagatacttttcaggatgtttcctatgaatattacttcatgcaaaaggatatttttgataagaactgagtagcagtaagttcaaggttattaagctcaatactgcatcctctctttgtggtcagttaagtgtgggttc

SEQ ID NO: 134545 - DNA, 1093 bp, Homo sapiens
actggaaattgtgatgagttttattgggacatttagttcagtggctttcaaactttttagtcatgacccatagttagaaatgtttgtccatacatttgaatgagacattagttgtatatagtttactacacatagtaaactctgacattttcttttctattttttcctatgataatttgttcattttcattttaaaaagtactggttataactcatacattttgaaaacacttatctagtcatgaactgcagtttgaaagacactgatctagtctgttgctgtgctgtctaaaatcaggttcattcatttttcaacatccatttgttaaatacagtatcggttattttgctagtagctgggaatagagtgatgagtaaagcagtcgttatcactggtggcatgaagcatagagtctagtgggatggagcatatgaaccaaaaaaaaaaacatccaaatgtataaatactctgcatgataaattctgtgggggaaaagagcaaaagcgattaaatggggaacctcatctgactttgggggtgattcaggatttccctggggaactgacatttggttaggtctgcagatgagaatgtgttaactctgtgaaggactgagcaggggtgtgtgcgtgggattgcagagtcatggaagaaatagtaacagaagcaaaatagaaaaccggaagggaaagacaggtggaaggcaatcttctttgatgagttggcattttttgtgatacttagtaggccttcctgtttgtggcttttttttcttacttgacaaaagtcaaataggaatgtcaaggattttttgggggagatgggtgttggtgtttgttgaagtagttttgtattagagcaatatagtatattgctaaatagcagggttttttttttttttttttttttttgttgagacggagtcttgctgtgtcacccaggctggagtgcagtggcgcgatcttggctcactgcaagctctgcttgccgggcacgccattctcctgcctcagcctcctgagtagctgggactacaggcacccgccaccatgcccggctaatttttttttgcatttttagtagagacagggt

SEQ ID NO: 134546 - DNA, 1044 bp, Homo sapiens
gaggtcaggagttcaagaccagcctggccaacatgataaaaccctgtctctactaaaaatacaaaaattagctggatgtgctctcttgaacccaggaggctaaggttgcagtgagcagagtttgtgccactgcactccagcctgggtgacagagtgagattctgcctcaaaaaaaaaaaaaaaattcttattccattttgggataatttcttgcagttttaaaaatatttgcttttacggaatatttaacagcattctcctttgtatcataagtatgtacacaggccattaaaatctttcatttttaatttctaatgactacatattagtcacactatttaatgtgtgtgtgactgattaaacatacctaattatgtttagtcattccctttctccgcttgcttcttttttttttttttttttttttttttgaggacttgtgcttctctgcccatatttcagtgttgatgttcccagagttctatccttactctaaatgatctccatttttgagcttatccacacagtggactgtggtttcctggtctttgtccttctgcctaggatgttctttcctaggtatccacatgcctgctctcattattttcatgtcttaactcaaaggtcaactttgagttaaggctttctatcactacatttaaaattgtgtgacctttcctgtctacccagcttgcctgatattttcttctccattgcacttttcttctgacttcttagatgaggacaggacttaaaaaaaattgtatttttattttctgctgtttccccaaaatatttttcttgttttgtttcttaaagaccatgtcttgttctgtcacccaggctggagttcagttgctcagtcatagctcactgtggcctcaaactcctgggctcaaaccatcctcttgcttcagcttcctgagtagctgggactgtgagcacatgccaccatgtttggttatttatttatttatttatttattttttgggtagagacagggtcttgctttattacccaggctagtcttgaactctcacctt

SEQ ID NO: 134547 - DNA, 1347 bp, Homo sapiens
aggggcattttggagcacgtgtttggcatctgtgaaccttttgttaggtagaaaacaaggcctgaatgaaaggcctttcaaccacttctggagcagagaagataggtagagttactcattataggcaggtttcattgtaggagtattcagtgaggacccccgccttggaagtctgtaatcagcagatgataaggatggtgtgttcttactaagagaataacacaactgaaacagaattgccttttgttaaggggatgctttgccttcttggactacgattgtggggagaaggattattgtcaactaagtgaggcattcattctgtacccactatttattgtagttccacagagaactgcttgctttactttctgactaggcacagaaaagtaaaggttcaaaggctagggcaagatgactgacttttccagatttagcacaatctgttctctggtcactttgagacgctgtcagtttagtttcatgcagctgatatcttggagaacttctgtgtccttacgtttggctgaggacactaaatttttttttttttttttttttttttgaggcagagcctcactttattgcccaggctggagtgcaatggcacgatcttggctcactgcctcctgggttcaagcaattctcttgcctcagccttccaagtagctgggaccacaggcgtgcaccaccatgcctggctaattttttttgtattttttggtagagatggggtttcactgtgttggccaggctggtcttgaactcctggcctcaagtgaaccacccgcctcggcctctcaaagtgctgggtttacaggcccaagccaccgtgcctggcctgaggacactaaaattaaaaaaaaattaagaaagtacggtccccgctcttgagtagctcatgaacatggagcgatatggactcaaatgattaagatcaggtaggtagtgatgaatacggtaaaccaagtttcaaacaaagagctgtctgcatatctgaggatggagagggtaagtcagccttagaggagggaaatgacttgcagcaggatgccagcctcaatggtctgtggagctcattccatgcagaagagtaatgaggaagacccagtgagtgacaggcttggggaggagtgcctgaaattgacggtttgtggcaggaagtggtgggaccaatctcgaagcttgtggaggtagaagggtactggagactactgtggacaaaaaagggcatgttgatgccattaccagacaggacacgagagcatgatgattgttgcagtgaggcttgttagttttagacatgtctaaaaccatgcaggcagagattttcagctggtggctggc

SEQ ID NO: 134548 - DNA, 1030 bp, Homo sapiens
ggggtggcatggtggtggtgatgattttatttaaactctttggcattttttagcaggttagtatgatttcaaagtagtgttgttgttgtattatcaacttgtggggctgggccaaagaatattgtcttaatacttgcatgtccctgtcatctaatcagtgctatagaaactttaaccctgaagtccatgtaaaattgtaattatttttttccagaaatgaaagagaactattttactacattcatggatttaggttataatttattttatttttgtgatactgttttaaaaaagtgatataatgacagggcagacccttaactttagtccagtgctaaaacaaacgtgcaataagcctgcatgaggcagggcaagctgtgtttgttgtattatgaaaataaaggaaaatgttttcaaaaccagcatttttctctaaaagaaaaaattttgactaataatacctggccatgggtgggatttccagctgttggttgaaggaaattttgttcattatggccattatgtgtgctatgtctcttagagtttaggatttgctatgctgagattgctactgtgaaccattcctgttatagcaagtttccctatattcattaacttatgtgtctaaacaatgctctagattagactttatatcgatctgttctactaaattttcttcccctatgcctaggtggttctctttgaccaacccttaactgccctgattctgaaattctgctctaattgaaggatattcctgggtctttggagggagaaatggttcaggggcagaggaaactttttttccccccatctcaggagcacttaactgactgcctgctatataccaggctttgtgctagttttactaggggtgagtgtgaataaggcaggattcccaccctccaggaggagcttacacacgattaacagataattacaattcagtgtaacaagtgttatgagagagaagactttgcgggagcaccaagcgggggcacttgaccctcagcggtgaggtggtggaggt

SEQ ID NO: 134549 - DNA, 1084 bp, Homo sapiens
attctgcaggcacagagctgtccaagaaaacattttttttcccctctcttttttgtttagggaagggcttgctggttaatgctaatttaaacatgactcttctggcagctggcattcttgaccctgtttatgttatacatggtatttaaccacagtgattgggtatttgcagcacagaagaaaaagaattattattagtttgaaaccggcattaatgcctctgtaaatgatagggcaaggcagtagatggaaggagagagggaagccaagtagcacactcggtactgcagtgagagatgacataaccatgagaattctttaagtttaacttccagtagaagtaacttgctttctatatattttaaatccctagagctaaagcatttaactcattatcttcactctgtgggatccatttgggagaggtattcaggagctttataggttcacacttgctccccagtacctctgtgtcacaggaggatatacactggttttcagttgcatgtcagaggtggaactgacttggatgtctttgaattgctgttgaatctggagatgctagggtacccaggagacagacaggaaaaagaagaggctgggcacggcggctcatgcctgtaatcccagcactttgggaggctgaggcgggtggatcacctgaggtcaagagtttgagaccagcctggctaacatggtgaaaccctgtctctactaaaaatacaaaaaattagccaggtgtgatgctgggcgcctgtaatcccagctactcaggaggctgaggcagaagaatcacttgaacccaggagggagaggttgcagtgagccaagattgtgccattgcactccagcctgggcagacagagtgagactccatctcaaaaaacttaagaaaaagaaaaagaaaaagaaggtggctgaatttctttcaattaccttgtgaattcaatttaatgaatgatcttcccagcagtttgttttatcttctgcaagggaacttatgtttggcatgtttaataaattaagttaattaagttggagaagcccaaggttagtatactttattttaggatacatttttggt

SEQ ID NO: 134550 - DNA, 1037 bp, Homo sapiens
gggagggcttgcgaggggccctcgaaattctcccaaaacctcgtcccgctggacttgcacctccgaggggtccctgcgcccctggggctccgcacctctcgcttcccactgacgactcggttgtcccccaccaccgggctgaggacttttaactaagtttctgtccagccgcctaacaaacgtgcttaacaagtaacaggaggttgtaaggcaagggagggacctggctttgaaagttgatggttttgaaatcgacggctcctttgacttgcgtaggactcctttgtggtgaatggatttaaagtttattcttgtttttctttgctgccatttggtctttgcaatgttaagagtgaaggcattcaggacttgctgctgcctgctgtctggggcctgaggttgtggctctccgcttctgctctcctctcttcatttttgttgaaatccgtggattttttcataaatgtgggtgctggcttgtttcactatggacgcgtcgtttcctatggggttagatagatattggtaaacataaatattgaaaatgtgatgatcacatattgatgatcacagcgaaatcctctattccttcaggctctaacagtttgtttttcacgtatttgcataagtgtgtttgctcagctaagcataattggtaagccagaggtctgtgattcagagtctgcagttctggttaaggggagactgtacacttggaaaatgcgaagttttttaagaagttattcccttgccggatagaagagtgggtcccaaggaaaaagggtgtattttagaggtatggttatttgaaccaaactaaacatcattaaaatacacagggaggtagaatgtcacctagttctttctgcccttgatttccatatcccagtaggagcgagtataattgccccaaatgcaaaattatgaataataatcagcattgtaagtatattaaggttgcatttttttcttgatacttgtctgatttgaggataaaaacaccaagtggcaagagaaggaggtagcttgaggcagga

SEQ ID NO: 134551 - DNA, 1005 bp, Homo sapiens
aatgtcaaaactgtaatgacaaatttctgttcacttttatgctaccagtatgactttataggggagaaggaaagccttttaattagccacctgggaattactcttttaaaaaatgccttttctcaaaagaacatgataccactccaagtaaatcattgccactaggggttttcctccttccttctgttgcccatgcccctgcctgaaagtgtagggtaagaggaaaaacaagtaaaaccttagtgttgatggtaaactgagaactctgtagcttaccttggattccagagcagaagactggtttacattcagtactcatccttattgacgttaacaccaggaatctccatgtttattatttttcgtggaaactccatgtttattatttttggtggtctctattgaccaatgtatttcaaacttttttgactgcaagtcataataaaaataactttttacatcacgacccagaacatgtgtgtttgtgtgtgtatatatgtgcatgcctaaatacaaaatctttaaaacatttcatgaaataatacataactgtgtgataccctttagtgtctgctcccggccccctgatttaatgctcttcagactctctaaattcatttcctgactcacaacggggttgctacttacagtttaaacaacactgccgtagatagcacctagacttggctgaatatgctggggatttgtttctgattgaaaagggagtttacaaataaaaatttaagtgtttattacaaaaacatcctctttgctgatactgaacgtcagttttagtagcatcatgaattttaaggaatctatctcggattttcatttgagaatggctattgcttggggaaaaatcaacttcggatgttttttagaaagcttatggcgtcttttaggacttggtgtttttcatatcagtatttccccctccaccaagtactccctgactttcatttatggtacctgggatattcttccttggcaagaatacaatgc

SEQ ID NO: 134552 - DNA, 1003 bp, Homo sapiens
gttgaaatgacttttttgctgcagtgtgccttgccctgataattccttcttcctactatgcttcagtgtaattatttctcttactcccactgatactgggggaaggagaggaaactccctgatgtgcctctacgctactgtcaagaattaggttttgagacacatattgacagtatgtaatgataattatatactgatctgttatcaagaggttgctttgcatttatttgggggataggatatttttaaatttttttcttgcttgttctataaggattctttggggttttttctttttgctttgttttttgttttttttgtttttgttttttttttttcatgcagaatctaaacagtgggaatgtttgacatctgaatgcagagtgctcctaattgagtctttagctactatggagccagacagcagacctgaactgcaggagaaagcagcgttactgaagaaaacacttgaaaatctggaataaattagaaggggaagaaacaaacaagtgccatgttcattgggggttgaagtggtggtgttctttgaaaaaccaagtgggaaaaagtaaagattaatctgtagcatgcatcattccttggctgaaataaaaagaaaaagccttaaattttgttccttattagctttattttactttatgtttttaaagtatctgggctgagtgagcttaatggaaccttggatgtttgaggggtggttgtaaaggaaactggcagaaatagttactaaaagagttcaagctgttattaaaggaattaatagacagagttgcagagcaagctggataaaaatcttagaactgcattcaaattagttatttcaggaaggggccctataaataacttattttaacctccctcttacacctgaagaaataggaagctgtgtcatctcagaggctttctgaggcctgtgccaaagtcagaacccaggtgtttaatgtctggccctggatactttcttttatggccatctgccaaa

SEQ ID NO: 134553 - DNA, 1052 bp, Homo sapiens
caggtttagaaaaatcagttaatttttcttgtcacttaaaagttgttttaattttgctttcctaggatcctttggtggcattcgattatacctgcaggagttaattactattacccagaaggctttgcagtctcagtcctggaaaatgaaagcccagggtgcaattgccatggcatcaattgcaaaacagactagctctctagtacctccatatctcggaatgatactgaccgcattgctgcaaggcctggctggaagaacgtgggcaggaaaggtaaaggaaccattcatacccagttaaagggattctgacttcatctttcattttgcataatagtaacgatctggttttgtgtaacttttccaatggattatttttgtgaactagatttcctagacagtggaagctttgggtaaaccttgcctgattaactgtggtatttcctctcaaactgcaacccgtgtggccttgcataatggacagtaatgctggagatagatacattttccatattcagccttccaagttacgtcttaaaccaacttgtcagcattttgtacctgttgacctcatgaacagatcaggattgggcatagaaagatcaggattgggcatatgtgaaatagagtagcaaggtagcctgcctctaaacctggggctgaagatgcccatctctgggacctatgaattagtaacagttatttttttacacaagagctttagtaggattcttaacagtgaacactcagtggggaacatgagattgtggtaacctaatgatctttatgttgtaaaggtcaatagtggcccatgcaggaatgaagtagtaccggactgggagtcagacatcattccaattctgtggttgacactgttttctgtgagacctgggtcgaatcagttctttaggcttctatgaaatggaggtgaagataattatcctacatccatggtttggagtaaaacttggtggatgtgcttaaaattatgcattaaagataaggtgactgttgttaatttttgttgtcatagttatcaaaaattcctaagg

SEQ ID NO: 134554 - DNA, 1047 bp, Homo sapiens
gcaacctcagcctcctgggctcaagcgattcttgtgtctcagcctcctgagtagctggaactacaggcacgtgccaccacgcctggttaatttttgtattttttgtataggtggggtttcgccatgttgcccaggctggtcttaaactcccgagctcaagctatctgctcaccttggcctctcaaagtgctgggattacaggtgtaagccaccacaacccagcctgctagaaacatttctaattgattttacctgtttgttttgctattatatgagttgaacaatagcctgtttagatcagttacccttaaaaacaataaatatcgtaaagattttggtttctccttttcagaacctatctacaagacctcttgtgctttgactattcatgctattggacgatacagccctgatgtattaaagaatcatgcaaaagaagtcctgcctctggcatttttaggcatgcatgaaattgctgatgaggagaaatccgaaaaagaagaatgtaatttatggaccgaagtgtggcaggaaaacgtacctggttagtagtgtggcctgagttaaacctgcttcttaggaatcacagctagaattttttacttgcattcgttattcataaactcctctgaagttactttcccaggaccttaatatgcatcccatttagttttaaacccatccaaattgctcatcccatttagttttgaacccatccaaattgctgagttctcaaggttggcactcaggatttttgtctttactcattcatcactgcccacatgagagaatataaaccctgtgagcaaggagagctttacatttttaattaagagtgtgattttatgtggccttagagtattttagagtagttttctaaatgtgtttttcaccttgtcgcatattaattgatgatgcccatttgtgtgatacgttcctgtgggcacccaagttcgtaaagttctactattgtgagaataagtcacaacaccaacacactttctctccctttgagagagtggtgtgttttaacagttgagagtcact

SEQ ID NO: 134555 - DNA, 1059 bp, Homo sapiens
cacccgcctcagcctcccaaagtgctgggattacaggcgtgagccaccgcacccagcctgatcagagtcattttttaaaacttcagatgaaacatatttattgtgaaaagttaatacagaaggatagaaagtaatcccatagaaggtctcccaatcaccacagtatcattccctgaggagcacctgctgtcaaaagtttcctgtgccttctctcaaattcctttttagtcataggctaccaaaccaaacaaacatactaatttaaaaatagtatcagaccgtgaatgttgttctgtgatttgttttttaaattaacagtatatcgtgtctatatatacacttattctttttaatgtatgtatagtgttctacagtgaggtgattttgaatttttgatggagaggttttgcaacatcaaaggttttaagtgttctttttttctccgtacctttggcactgttgaataacgtatgtgtgataacaagaatctcatttttctgatttgcactcttttcctagcattgtccattgccttttcaatattgtattagtcgtttatatttcttctgtgattgtgtttatgttccatgtctatttttctatttgactgtttttttaatttatatatttttattagaactgttaaaccctgttatatacaacatgtttcctctgttcactatttgatctttaacttgcctaaacttctctaataacttactctctttaccctttgcctctaatattgctgtttcttcttcattcattatttttccctctttcagcagtagacttgcaccttcctgggtgcccataggatgtttactaagcattgagaatttggaaacataaattctagtctaaactttgtagccctaggcaagtcacttgtgtatgccttacttttctcccttatcatatctggatagtgttaacctctccttcagcacagttgttagattaaaataccttcatagatacgaagggtaattacaaagttaaagaactgcacgtataaaattttctactgcttagacacaattttaaaaaccttagaaa

SEQ ID NO: 134556 - DNA, 1071 bp, Homo sapiens
tcatctgttttgttctgtatttcacaaattggaggaccagtgcttagagagtgaaatgcattaccaaattttctgtttagttcttggcagacctaggactcaatctccgatctcattcctctgtgtctctgtagtgtcagagaaagtagattcacttattcttccctgtagatatgtgaagtagaaagtcttttgtcagatgaattctttattggatgcgcggtcactttcactaacgtccatgctctttgtatgtgaggtctgtgtgaaaatgtgtgaccctgccaaaggagcagctggccagagaaccatcgctgcccttctgccttgccttctggacaaaggaatgatgagcaccgtgacggaagttcgagccctcaggtgtgcatccgttgatgaaatgaatgtattggatttgctcagttcctagaaattgtgtttctttcaaggttagattctggaaaatatggagaaagaggtttaggagaatgacccttgggtcatttgtgaaaacttgtgagtcacaatattttcacagaaacattctcatgagaccttatttttgcctagcattctgagtcaagcgtgttgttctgttgtcatcagcctctgctcccaacaagcacgtcttcctgttacactgtaggtcctcaggagcatgtttgttcattataatatttagtaatatttcacagattattagatttaagagaagctgtttaccacctgcaacgatgaaatattcaaaaaatgtacttacacgttttgatataatatatgactactttaagttaaaaccaatagtgtaggattctagtttgtatgttttgtttgtttttaaagtacagtgctgtctaggaactttatctgttccattgttatttcactcttaagagtagaacaaattattaataatactgccagtggtatttcatggcaagtagatagttgatgaaagagttttttttttagaaggactcacctaacaaatgcaaaggcatgacgcaattaagagtgtcactttggctgggcctggtggctggtgcctgtaatcccagcactttgggaggc

SEQ ID NO: 134557 - DNA, 1840 bp, Homo sapiens
tgtaagtatgaaatcaaagaagttgaagattacctgttaaattggtagacaccaagatgtattttgtattgtcatgactttatagtatagcatttctgtatacaagttagattcattcggtgcccagtgtgtatgtggcagtgtgctaggccttggaggcacactggtgaataaaaaacgatgtgtcatctcaaagggattgtattatagttgtgggaaacaagcattttataattgtaaattacatatatatatggtatatttgagggacctggagagaagtcattgctgttttggggtgaggggatgagaactcgaattagaggcagaatctgtattcttttttagtataaatgtttcatagtaaaatactgacctttttcatcatatattgaaatgaaattttgattttcagctgtttagctttgaatgatttattgagaggaagacccttagatgacatcattgataaacttccagaaatttgggaaacgctttttagagtacaagatgatatcaaggtattatagaaataaatcagcatttatatatacaaaaagttaaattggaattattaaaatatttatgttgtgtatgtcaaaattccatttccagataattttaagagaccaacgttttcccccaaagtttcagtcttaatgtgtctgtgaagttgcaaggttgggtatccttagatctaaattaaatagacttagggaaaaaaaaggtggctgtataccttctttcaatagagatctcatgattctattggattagggacaaataacagttttggacatagtaacagtattttgatcagttctgtaaatgggattaattattctcaagtaatgtggccaattcctctgaatttttcttgggcaatcttaattttaggtattttggtattttaccattaaaattaggcacttcagttttacctttctttttgctttatttattggaggcttttaagtgtttcagaattctcacatagatctttatgtatttacttttataatacatttagtttctcaactgttaatagctaaattttttaaggtcaaaataggttacagttaatgtttaaaaattaatagtatggcatggtaatgtgttccttgatgggcagagagtctgatgagataccaatttttttaacatgatatgaaatgtaagattttccaccaaatctctgtagggcctgaggcaattaaattgcaaattgtagagtagatgatagtgaaactctctaacttgtatgatgtcacacttttgtcatttttaggaatctgtacgaaaagcggcagaactagctctgaaaactctgagcaaggtgaaaaccccgtcttacattgggaatggagtggagcagggttctgggtgaccatgacaatgatttacttactgtcataggaaaagacatttagttgcagtataattggcttcatgttgtagttcactgctcttagaatgaatgagaaagtgagtgctgtaaacactgcagtactagtgtgttgaacagagtatactgtggtctctttaaatggtgaaattaagataaaacttcgacttaaccctgaagagcacatcactcagatcaagcaacacctgtcttttctcttgcttttgctgtgtttatatataaagctacctttcatatttgtgaggttggaaagctttttgaaactaaattatctcccacttgaacttgattttgtgatatatcaggaactttacattctagttgcacaaaccttgccataggtcacataaatagtaaaaccaggttttaaatacaggtgttttcctgtttcacatgtgatcttgaccactatat

SEQ ID NO: 134558 - DNA, 1048 bp, Homo sapiens
tggagtgggcatggaattacagaatgtaaatcttaaagtgaatcaagattcagcttctcaaaattccgttagaaactcaaggtttctcttgttccctaagctcgatgcattagcatccagtgaaacctcgagtgttcactttattctttagccttatgttttgttggagagatgatcctaatcgacacacagttactgccatgtattcttgcgtatatgagagagagccagagatatgctattgtttttgctaaattcagagcccggagatacagcatggatccttgcttgcattgggattcacggtgggaaggtatttggctaaaaagaaaatgagaatgtcagagcaacaagacctggagagaaatgctgacaccctccctgatcaagaggaactcattcagagtgctacagaaacaataggtaattaatgtctttatgtcgatttgggtgttgcagtttttgaattatgttaaattttaatatggcgtttcagtttctttttatggcattgtatttgaaaagacacaagctttttcacaaaaaacttacttgataaataatgtatttttagtaacaacgaaggctgggtgtggtggctcatgcctataatctcagtactttgggaggccaaggtgggaggatgacttgagtccaagagtttgagaccagtctagtcagcatagtgagacctagcctctacaaaaaaataaacaaaattagcttggtatggtggcgtgtacctgtagcctcaactactgaggaagctaaggtgggagaatcactggagcctgggaggtccaggctgcggtgagctgtgatcatgccactgcactcccgcctgggtgacagagctcgaccttgtctcaaaaaaccaaaacaaacaaagcaaaaaacaaagcaatgaaagcactctattttttttctctacatttttttcctacatgtttttataaacagagatgatcctattatgggaacaaatttatacattaaaaaaatactactctatcccctgttaccatgttgtctttccactgaataaatg

SEQ ID NO: 134559 - DNA, 1048 bp, Homo sapiens
aaaaaaaaatcaagaaacgaataatgtttcatgacacaaacattgtcgtgtccatgttttactggaacccagccacgctcattcattgtgtattgtctgttgctgcctttgtactgcagtggcagagtggagtagttgcagcagagaccaaatggcccataaagcctttttgtttttttacagaagtttgctgacccttgttttagatcatctgtgaataaatttcacctgttttgtacttgtgtatctttgacgaaaatggacctaagattttgttatctaattcattcagctttcattttgttttcaaataatggcttgtttttttctcaatatccatcaacagattgaacgttcttttaattttaaaagatgttgtcatcaggcacgtggttctgtgtcatgtatatatttgttttttttttatactgctcagagtctgatgaataacagtaaagaagaaatgcgcgaactggcagcgttgttttattctgtagtggtatcaacagtgtcggggaatgagttgaaatcaatgatagaacagcttataaagactacaaaagacaatcacgtatgttattttgttttcattcttttttgtgggagatagggttttataaaaggatctaacttatttttgacttttatgttctcatttgtaaaatgaacttacaaattccttgcttttatgaccataaagagtaaatgagataggtgatacattggttcagtcagctcacttaacagatacgggtgctgtgtctgataagcactgttttaggtgctaggagtacagtgattcataaatacatgagaatccctggtacaacaggatgctcagagcctgcagccgtaccaccgtgaacacacctaatctcatctgatcttggaaactaagcagggtcgggcctgatgagtactgaaagcgagaaatgttagctccttttttcttcctcatctactgctgccagtgaaaaaacaagttttacttcacatagtttgttggttaccttgtgtttggaggttttggcaattagaaataggatct

SEQ ID NO: 134560 - DNA, 1122 bp, Homo sapiens
ttttctgctcctctccctcctcccaccctctctcctcaagtataccccagtgtctgttgtttgcttctttgcgttcagaagttcttatcatctaactcccacttataagtgagaacatgtggtatttgattttctgttcctgcgttagtttgctaaggataacagcctccagctccaatttctgactttaaaagttcagtttgtattttaacaatcttaaaaaattctttggatttgcaaaccttattatacaaattttgctccattatggcatattttctgccttccatgaggattggaatagctttataaagaagtgtgggtgaatcaaaactagaaattgttactttgaagagtaccttcccacactgacttttcgagaagcttatgcagtcttcctctccgttctgtttgtagatcgttctgtacttgcgcatgtgccttgcgcacagtgcgggggtggtgcccacctctcagagtttggctgatatgcaggatcatgccccagccattgggcgctacatacggactttaatgtcaagcgggcagatggcaccctcatcatctaacaagagtggggagactaaccctgtccagatctacattggcctgcttcagcagctgttagcaggtgttggaggtaggaatatgtgacgcgaaggaaagatactgaagcacttaagcaaaaatctaattttaaactttgctaagaatttatagcaaaattattctttttcttctgtaactgaacattagcctttgtttctttttaaacttacctgattcattctggatacactacttcttttttcggaaagaaatgctaacaatagataaatacatttttacttcggaagtggatgtgaagaacaggatatcctttttatagatagctcatctgtaaatttgctgtagtgaatcacatactatatttaggttgtgtaggttttcttttttttttttttaatagaaccgaaagaatgtgtgctaaagcagtggccttatactttaaaggaatttagtgatccctgtatgttcattacttttcttgaaatttaaggtgattctgaattcttatttaggtttgccggttatgtactgtctattggaagctgtgtcagt

SEQ ID NO: 134561 - DNA, 1113 bp, Homo sapiens
gcctcccaaagtgctaggtttacaggcatgaaccaccatgcccagctgactcataaagtttctagcattaatacttacaataagaagaagatacaaagtgaggaaaaaaaattgtaatcctcacctgtaattgatctgttttgcctaaacttgaattacttataattcctttcatgcttggcaacattttggctgtgttaaatattttttcccttaatatgacatgcttaaaaatacatctcctttttttaaaatttttttatttttttttgagacagggtcttgctctggtcacccaggctagagtgcagtggtgtggtctcagttcactaaaacctccacgtcccagactcaagtgatccaccctcctcagcctcccgatagctgggactacaggcgtgcaccaccgtgcctggctaatttttttattttttgtagagacagagttttgctatattgcccacgctggttctcctttttatttttaagggcacgctttagggtagtgtaagtttaaggatgcttcagggaacagttcatgttcttcccaccgtgttcataagagagcatcccatctgcttttgtaagtttttgcttttgcacagtgttttctgctagtagatccaggatattggcagtaatgaccatccaccccctccaggccttgactctgtcccactttgccggaggacaccttcctaccttttacctccactggtgatcctagctctttgctaggtaggcaccttaagggagttgaaggtcagtatgcagcggccatgattctgttttccacatagcagcacagtctatttgtggtcagaagattctctgcttgtagtttcctcctactttgattattaatgaaaataactggcatgcagtgacctgagatgaccatattagtagatgtctggaataggtttattatttttaaacaaaccagaacaaacatggaaaaagggcaatacacttgtcttttagtgtgtgagggacatgcacgatcagcatggttaataggaaagtggaaaatgtttgatcagaaaaagaagcaaacttaggacatgtagctagaaacacagttgtttttgagttgaggaagggcaggtatgc

SEQ ID NO: 134562 - DNA, 2028 bp, Homo sapiens
ttccagatatttgctgctactggctgcaggagatccgtaagtttcaaaaggtgttaatttgaattttggtttattttgaatttatttgaaaattactaaaagttgtattgtttacaatgttggtctatgaaatttagaagctatttattaaagaaagtatggctcttgatgtgatatagacctgtactcatatacctatatatttatatagtaatataaatattacatgtatatatctatataatatacattatgtagatatatatgtgtaatatatgatatatagctaatacagaaaatggttatgaaatggtcaagtgtaaataaagcaaattatatgattgcgtgtgtaatataattatatatctaaaaacaagccctatgtaaggagaaaaaaggctgatgttgatggtttgacatatgtattaatattttattaaatatggagtatcattttatatctaatatatttttaaatgaggtataagttgcattttatattaatgaattatactactgcattttctagagtgtgtaatgctttttaaaagaatgtttaaatggttttgaaattgggacatgcctttaaaagtcatgtacatataatgaaatatatgtggacatattaaaacaactcttttcaaatctgttatatgtcttacagtcaatgccatcttaaaatccatgcagcattctaatctatttcataataaaccattactacatttaacgtttagaatttttgcatcccttaagtgagattcttgtatatgtttttcttttttgttatcagggatagccttatttggggagatgaaaagcttcatttattctgaggaatagtttaaataaaattatgcattctgtgatgatttgaacacccttgcccataaacttttatggtccattttttaaaaatgggtaattccttgataactgtttcagtgttctagttggccagctgtgtgcccctcatgccatttattttctttactataagttgtatatattttgctgttatttatttggttggtattttaattggacatcacaagttattaccaggtgctggtttttgacttctgatcttggctgctgcttctcatagagcacatttcaatctggttaaagtggctttggattgttaatgttgattctggtgctctgttgcttcttaatttttttacgttagtttcccaaccaaggccagatgtactggggcctggcagccaaggtgtcagttcatgttagagcaaggatttaagtctagggagttggacttccaaatagagctcttaactgctgtatcttactctgtaagtgctgaaaattgtttttgtttaagaaaccaaaaacaaagcataactaattcaacagttttccttcttaggttagaaccattcaggtcaaatgaaaatcctctgacaacttaaggaattatttattaattctttcttttcggccctttatgtgttgtttggaaaatgagacacaatcagaggcaattgaagaattaaaaggcctttatgtggtatctggataagactattgctgagatcagtctctaggtggtctgaaattggttgggtttatatttttacactttaatgtcacttatgagttattagttgtacagaattgtagctgaatacatagagatgtaagactttgggtggagtgtgtagaccactggatagtcactgacttctaaaatatgtattatagttgtttatggtttaactctacgaggtaaagcatacacatagatatttacataataatttacttaaagtaccctatcttgttttttaatgtgagtcaaattcaaagatgtaagccagatgagtccccggacctcatgcaatttctgaaaagaagtgatttcttataatgtgttatgttgactctgcttagatagccaagaatgtatttaagacattttctgagaactctagctgccaaataaaattgctgttcttattcttcaaatgatcatttcccattggtgacatttattttttattctta

SEQ ID NO: 134563 - DNA, 1555 bp, Homo sapiens
gcctcggcctccctaagtgctgggattacaggcatgagccaccatgcccagcctgctgtatctttaaatagcattttttcagccagcaccttttgtgctacttctagctattgtgcaaaaatggaattaaaggaattgaaatttatgttgatttccctatgtgactatttggatttggcttgtgttgggaaactgttaattctcaggggctaagatactttttttcttttatatttttctctggtaaataatggggctgagattttaatgattcaaaattctgtcaaaacatgcattcagtaaatttttgattccttaagctaaatgggatgaggattccttggactgtggatttttgaatccctttccctgctgtatttctcttactataatatctccaatatttaaaaggaatttgcttaaaaaggtaatatttcaagaattcattagcattattttccccagtctaagctaaacatgaatgcatgtttgcagtagtatagtgagatcaagatcttacatctgaaattagaactgagtttgaatcctagttttgttctttggtgagttacttaaattctttgcaccttcttattagaaaaatgaaaataatactgcttgattagattactgtgaagattgaatgagttaatctacctaaattgttcaccatagtcaaggcacgttagtaggtattattagtgaaaggcactttatttactgtgcagctgtgctttggggtggtaagtaggcctggttctcatagcttctttctcctattgagtgatgcttgcatggttaagatctaggggaccactcagattattttatggcatagatggtgaaatgctttagagtcattggtagaaatgaaaatgttctggggctcttggggagaagctgtatatttaaatgtaagttagagaggccagacaaaccacagggtgtgagtccccttacctgcaggtgacatctgcatgtcttcccaacagatgaatccataagagtagccatttagatgtggaagggcaaatcctaggataaacacataaactttaactggtagaagtttattgtgttctgagtaatcagattattagtttttgtaaaaccatgtaaaactctatctgtatcttgaggagagaacctcactaattcacctggtgattatgaccctcttaattttttatggtagaaaatatgatagaaagctgttcattacagtgtagatttttagaagatcacactacagtttattgcaattttggtgagagacggaggatcctagtctgttggaccggtgatgtattttctaatgagttaatgttttttagtgtgttgaagatgaactttggtgtttggaggttacatagtgttgaaatatcttgaactcagcaccagctaagagaaacctttcatatctatgaccactgcattttctttttggagcgattggggatgcaaggttttgtcttgtttttccttttagttagtgtgatggattctgggtttggacatttttgttgttgttcaggtgctaacaccatgtagttag

SEQ ID NO: 134564 - DNA, 1081 bp, Homo sapiens
aatattagccctggttagattagattgagtgtggtaaagcagaaataacaatgaattgggaatcaggacctatgaattctagccccaaatggctgtacacatgaatgtgctggggaggaaaggtttggctgatcacataacttttcctggcctcatgttcttcatgtagaaaatgaaggggttggattagattagtggttctcacagtgtggtccatggacctttttagggtcacaaaacaccttttaggcagtctgtgaaggccttttctttttgtactgtgtcaatatttgcactcatggtacaaaagcaatggtgagtgtacttgctaggttcctaccacatatcaaagccatgtcaccagatgactaacagttattctattcttcagtgttatgtactcatttaaaaaaaaaaagagaataaaactcagctttacttaagaacatccttgatgaagcagtaaaaatgactttacttgaagagtagacaggcaaattatagctaccgagatgggtatttggtgcatactttctctaaaagggaaaaaaatgagcttgttacttcaagaaaaacaacatgatttattggcaatgataaaagttagctttcaagcaaaaattagagttttgagaaacttgtattcaccacagtgatttgatagcttatcagtacttagtagatttttctgatgccgttagaacacaggtgatatgagcacaggctttgtgaaaaaaaatgtatgtatgaagaaacatttgcttaactcagtgagccagtattgtgcacatgaagaatgatgttacaaaagcatataaggacaagggagccattcagagtaagataaccagtggaatatagtataagagtatacaaaagttcattgatatggtttcaactccaaattgcaactaaccttttttttttcattttttaaaaataagcaattaactgttaagaaattattatttgtcaagttttggtgtagtatgaaaaaagaatgtccacaattacctaagaaagctaaaatcatctccacttttccaaccacacatatctgtgcaagcgaggtttttgttac

SEQ ID NO: 134565 - DNA, 1206 bp, Homo sapiens
tcttcagcacagggttcttcttcaaacagtggcggaggttctggaatcccacagcctcctccgggaatgagcttttatgcagccaaacgagttattggtgataacccatggacacctgaacaattggaacaggtatcacacaaggcttgctcataatagtagttgattgtggacactttcccctatgaagttcatgaaccgtataaaacataattctagtatattcaggctctccagtgaaatatgtttgaaagaagcagttgatgtaatgtgttcttttcatgctagttatttattaagccctaggggcagggaggagtgggacatactgtttagtttttctaatactgcttacatatgtcaagtataaagcacaactcacttataaattgaatatgtttaacttttgtcattttatttttttttattttttaacttttgtaattttaattttttaattataggtttaattttcatctagcttttatggtgcagttaaaatacaatttttcttacattattcaacttttaagggctgtacgttttatgtaaagtgaggagccccagcacttcacaggtgacaatgtggggaaaagcatgactccctgttatattacttcttgggaatttaaaaattggcattaaggattttattctggatttaaacaggacacagatgttctctgagcagcttttaaaaatgactggtgctctacagagaaggtgccttactgtgtctgtgtcatcaggcacttcagggaagaacagatgagatcagtatgtaattattttggaattcaagcaacatgggttagtcttctaatccttcctttatttctccatggcagtctaaatgatttgatccctttttttttgggaaatgtaagtgaccattgattaaaacagtattcccaggagaggggaaaagaggcaagtggggcattcttgccattcacaaatttatagaatgttttattgagtgagggatataattgatttgatttccttcttcatgttttatggatcttttttttttttcctccttaaactattatgtaagtaagaaaggtaaagaattaacagaggccgggcgcagtggctaatgcctgtaatcccagcactttgggaggccaaagtgggcggatcatgaggtcaggagatcgagaccatcctggctaacatggtgaaaccctgtttcttcttaaa

SEQ ID NO: 134566 - DNA, 1060 bp, Homo sapiens
gaattgcttgggatcaaaaatgttttggattttggaatatttacgttatacttacctgatttagcatcccaaatccaaaatctgcaatgccccaaggagcatttcctttgtgtgtcttgttggcactcataaagtttcagattttgtagtatttcgaatttcagattttcaaatttgggatgcttgaccttgcagaaacacacagtactcagtttcctttggttcatcatgcattggtgagttactggagtgaggaaccacagagtgctgcagtatactaagtttgttttagtcatttgaccagtgggaaatggcagcctaggatttgtcaacacctgatctcctcctagcttgtaaggattaatgcaacagactgggagatctggtgctaatatgtagtgtgtaggtgtaaataggttgattatttctttcttcttcatgataagaaattgcatatatgaatgctttagattagtccatgctacctcacattaggcctactttaaagcaagcattttgattaagttggactggaatttttcctctgagatacagtagttggtaaaggtgcaataaacgtggagggaggatgagtcacgtttacaatgtctttgttgtaaccataactctctaagttatcaatcatatattttcattgaaatcatagagtatttccttcacactcacttgcttttctcttattgcattagaattttactataatttatgttaaaatgggctatcctcgcctaccagtggaaaaacaatgtgaactggcccctacgcttcttactgccatggaagggaagcctcagccacagcaggataggtatgatttcctcaattaactaatttccctcctacaggagtcaacaactgcctttcaaatattaattcacatatttggttttacttgagcaaatgggaggtcttgagctgttttagctgacaaataatagaattttccgtggtacctcaaagttaccgttttgttaatactatcataaaatttcttgatgtgaacattgaaaaatgtgcagaactaacatttatctaagtc

SEQ ID NO: 134567 - DNA, 1078 bp, Homo sapiens
gaagtatggatgacaatgcaagtttctagcttcttggaaggtatcatgtctcactgacaaacactttcgctgatgtgagttcaaatatcagtgtttgaaaaggttaaaaaaaatgggctctggagtcatattttgactttgctatttgctggcccagtatccttggacaagttacttgaggcttctgcttcctcatctgtaaaatgggaatgacaccacctcactggttgttgtgagaatcgtattagataaggaatgcctgggggaagagtgcatagaaactgtgataaatattagctattttaatattactatttatcattcattcaacaaacattgattacagagttgttattattcttaaacataattcacctatttcattattgctgtagatctcttggaattttttgctgtcggtgtcaaacatctctacagctttctttatgcatgctttgaggctagagcacgaatttcagaaatgagggagaatagtgtaaacctggccctgcagaatatttatcttaaattcttgagtctttcttaggcaaggccttctaaaaatcttatttctcaatgctcgatttcttttctgttggcagaaatctttttattgtagtataattgaggccatttgatatgagcctctgtacatccctttctatccatgcaaactgttgacttgtcaattcctattttgctctcttttcccacttaaaggagaggaagcttgttatttcttacaaattatttgatagtatcagatgatattcagaatacaataaaaatgcctcagactattcacaatagcaaagacttggaaccaacccaaatgtccatcagtgatagactggattaagaaaatgtggcacatatacaccatggactactatgcagccataaaaaaggatgagttcatgtcctttgcagggacatggatgaagctggaaaccatcattctaagcaaactatcacaaagacagaaaaccaaacaccacatcttctcactcataggtgggagttgaacagtgagaacacgtggacacagggcagggaacatctcacactggggcctgtt

SEQ ID NO: 134568 - DNA, 1404 bp, Homo sapiens
gggtctttttacgacttggccatgctgaaacagatgaacaattacagaatattatatctaaattccttcctcctgttttgctcaaactctctagcacccaagaaggagtacgtaaaaaggtaagcatgttgggacagctgggggaattaaatgatgaataaatgaatatacattatcaagtgagttttctgttcccattattgagttctaggtttgtgatcttaattatggcctttcaaaatggagagtaagtctagaaccagcttttatgatttaaaagtagctcttgtatccttagcacagctgcatttagcaccaactgtctacttggcatcagtgtcagataatataattgagataattatcctggaatgtatggaggcatgatctgaaatccatgccattgattccaatatgaaaggcatgtggtaatggggcaaaaatattctttagttaattgttgacaatgattataaccttaactaaaagtaagcaaaataaaaaaaaatttaagcaaaataattttatagctcctgtttcaggattctgcaaagtactcttacaaaaagttggataactgtcacatcagattttcattttctttctttttttgttttttgagatagggtctcactctatcacccaggctggagtgcagtggcacaatcacagctcacagcagcctcgatcttctgggcttaggccctcctacctcaccctcccaagtagctgggactacaggtgcagaccaccatgcctggctaatgtttaaattttttgtggagacagggtttcgctttgttgctcaggctggtctcaaactcctgagctcaagcaatccacctgcctcggcctcccaaagtgctgggattacaggcatgagccactgtgcctggccagtattttcattttttaacgaaactgttctacatggaacatttcccccttgatttgtagaatatttcattagtcttccagtatatttataataggtcatccagtctttgagctatggtcaggttttattccttgggccacagtaattggcagtgacttcctggaggtctgccctgagagggattccaaggtctgatttgggttcagtgcagaaagagaatctttaggaatgtcttttatgtttatatctctttacaggagggaatgggcattcttgtcatatatttggcatgtctgcagttaatccttctttgctgagatagacgtgcatttgattatgtcactcttctatttaaaacccttctgtggccttctcttactattaggatagcaaggtctaagaggcccttcgtgagttgatttctgtatacttcttagccttatcagttttgttatttagcaaatatttactgagtgccttctatatgccaggtcttggggatatgg

SEQ ID NO: 134569 - DNA, 1027 bp, Homo sapiens
tgtctgactcatctttgtcaaatttttacattttctgctatcagcttcaggtcttgtattttattttaattaattaatttatttattttgagacagagttttgctcttgttgcccaggttggtgtgcagtgggatgatttcgactcaccacaacctccacctcccgggcttaagctattctcctgcctcagcctccttgtatttttagtagagacggggtttctccattttggtcaggctggtctcaaactcccgacctcaggtgatccactggccttggcctcccaaagtgctgggattacaagcgtgagccaccacgcccggccttattttatttttttaaagaaataaacattgcagatgcaattcaaaccccctgtgttactccttatcatatcatttttcttttcttcccttttttcctctctttcctcctcccctccttccctctcccttttcattcagagattgtcattactgtgatgtatcgtacccaatatgttttgtgtttaaaaactttccataaatgggactaaactgtacatatccttctgcagcttattttgtttgatcttagatttttcagatatggtcttgttggctcatgtaacatgtaatccttgtttatttatttccatcgttgtgtgactctgcataatttattccttctcatgttgactgatatttagattgtttttatatttttgcttttactaatcctgggctgtgaacactttcacacatgtgtccttgtgcttgtctcttcctgggagagttctttttttttttttttcttttgagataggatcttgctcagttgcccatgctggagtgcagggacacgatcacaactcattgcaggcttaagggattctcccacctcagcctctcgagtactgagtagctgggactacaggtgcataccaccatgcctggctaatttttttttttttttttggtagagatggagttttgtcatgttgcccaggctggtcttgaactcctgagctcaagcgatctgactacc

SEQ ID NO: 134570 - DNA, 1004 bp, Homo sapiens
tagtttcttattcttttcttagtttctgggctcccacttctgaaaatgtttcagcttggacgtgaaacacacacacacacacgtttgagcttggacatgaaacacacacacacgctcgctctctctctctctctctctctctcactcactctctttgcccagaattggtatgtcctaggaaaaggccttgttttaagagtgcttgattttctgcccttttactggttcaccccttcctcttcatctttttctgttctcttcctttccttctctcggcagtaactgctgcatctctgctggtttggagtcacgtcgtatacagttgtctagtaagatttagtatcttctccacctactttctcgcttaaaccatgttataatttagtgtgctagaaggagcattggactgtctagggtttgaatcagccctgccacttagtagttttggaatcttggtcaacagaatgttttcaaggctctgtttcctcaactgtaaattggagctaatactacttgctttactagaagttctttacaggcaggtactgtgttccagtgtgcgcttggagggtaaagccctctctgggttcagcttgtttgtttttgttttgttttgttttttgaggctgagtcttgttctgatgcccaggctgaagtgcagtggcgtgatctcggctcactgcaacctctgcctcctgggttcaagcagttctgtctcatccttcctagtagctgggactacagtcacatgccaccacgcctgagtaatttttatatttttaatagagatggggtttcatcatattggtcaggctggtcttgaactcctgacctcaggtcctgggttcagcttctgaatctgtgtatcattcacatggtgacctctggcaggtcagttaggtggtgagtctataaatgcatctataagtgcacctcacaacatttttctgaggctcagaaggccatgtgaaactgctttgtgactgtgatgtattttatatact

SEQ ID NO: 134571 - DNA, 1071 bp, Homo sapiens
agattctttaactcctagagcttttgggcttgtgattgatgtgttaatgtcattatgatatactgaaggcaaagtgaagctacaactgctaggatttaaatagtgatttaaataaagaacattctagggcttacacacccatatgagcattgttctaagtaattagctgctttgggtggatcttaacgatcgtacattagacttttatgcagtctgaactcttgcatagtatatattatttcctctaagctagctttcacaagctgaagtaatctttcctgcttgtcacctcctaaaaccgatttctaactgagtatctctgccagctgctgtctctgggggaaagggccttgtggacctcagtgttgggagtctagcacttactcattaaatctagggcttctgtcttgtcacctggcccagtcttgccaagctactcctatgatttcctccccttcctctgtgtgtgtgtgtgtgtgtgtgtgtgtgtgtgtgtgtgtgtggcgggaggagaggacatgatggggttgtggggaagtgggtgcggggtggtaagcaatatgatcagggaggggtagccttgttttgggctatgctggattggcagggagtttgaagtagcctggaatcatatgcaaaaggctgggcacagtggctcacgcctgtaatcccagcactttgggaggccgaggcgggcggatcacgaggtcaggagtttgagaccatcacgggtaacacagtgaaaccccatctctactaaaaatacaaaaagttagctgggtgtcgtggcacatgcctatagtccccgctactcgggaggctgaggcaggagagtcacttgaacccgggacggggaggttgtggtgagcagagattgcgccactgcactgcagcctgggtgacagagcaagacttcactaaaaaaaaaaaaaaggccagggaaagaaagactcttttcctcttccctgtttaaagagcctagcctgtagtagatccagatgcaagggtttccagattagggtatctgcctgggcccttgggggacagactggtggactagggaacagaaag

SEQ ID NO: 134572 - DNA, 2168 bp, Homo sapiens
gcaagtctcagtttcttcctcataaaattggaatgacaagattcactcatagtattgttaggattaatgtatgtgaaaatgtactgtgtaaacacttaagctcttataaattattattatttttggtgtgggatgtaatagcagatgatgctgtggagataggttgggaccagcatgttgtaggaatgccaacagaactagtttggactttgttctgtagacagtagagaaccatcagagcttttaagcaggagcgtaacatgagtaggtctgttttgtacgggtaacaggtggcattggtgtaacactgattgcaaggatccggagatcaagagcagcaagactaattaggagggtatcacaatggccaagtaaaaagaaacttagggtctgagttgggacagtggaagtggatttggcaaggagttaatataatgtaaaatccctaaaatagggagaaattgttggctgacgagatgagggttgttgaagaagggaggagttagagatgaatctaaatctgacctgagactagaaggtggaggagtaacagagagtgtagcctctagacagatttaggaaagtgaaggaaagagagaacagattcaacagataggtagtctgtgttcagcagaaagattatttgttgaatgaatgggttgaattattgagcccccatgttgttcagggagactgctttgagtagtggctaaaacctctggaactggaatcagagacagttttgaatcctgattctgatacttcttaatgtgttcttgaacaagggacctaacttgtaggcctcggttttctcatctgtaaaatgagataataaaacttacaagatttttttcttttcttttcttttttattgagacagggtctctctctgtcacccaggctgaagtacagtggtgtgatttcggctcactgcagccacaatttcctggtctcaatccatcttctgacctcagcctcctgagtagctgggactgcaggcgggtaccaccatccctggctaatttttgtattttctgtagagacggggtttggctatgttgcccaggctggtctcaaattcctgtactcaagcaatctgccctcctcggcctctcagagtgctgggattacaggcgtgagccaccgtgcctggccaggattgttttaagaatgggaagagatagcacatcttggcacatggattgcgggtgtgtgggaaccttggttctgaagctagggagacagtgtgggaatgattcccatggtagagctgtgggaatgggcatattgttcacagtcagctgactgggagccacgtgtatacgtatttaagagcgagaggaagataatcagagaaaggagatgaagagtgctaagagaggtcagcggtggccggggttatgtctgtcagccatttgcgttctcatatgtaatgtgctaaaaacatgtatacatgtttagtaacacttcttataaaactattatgtaattgaaacacttctaattaatgtaacagtttatatatttatgatatatatacacacatatacatatatgataaaatatgttgcattggtattagagattttaagtcttcagcaaatgattatcagtgtattttttgaagtattagcatgttctcagtaaatttggtttgtggacataggccttattctttctcaaatttgatagtcattataattttttttcctcatactgaatttgcaaagcagggcatcaaagatctaacaagaaatgaaaagtgcttatttttttcttaaaattgtagctatgcatatacatctgttaattgtatttttttggtgttctaaataatagattctttatacaattgcatatgtacgagtggatgaacgtaccattggtgatcccgaggatttttgtcaagattggataaaccatgtatcacattgattgtagaggttagtagatttagttccttaggatgtgtgcattttttttgtagcagcatttaaaaatgcataggttatcaggtagcaatttccccccaagatcttcatgttttttttttttccttttctagctagcctgagaaaattggtgaagttcatgttaatttacaaatgcctgaagcctctattctctgtaatgctaaacataaaaataatttgcaaaaagaagaaaaa

SEQ ID NO: 134573 - DNA, 1590 bp, Homo sapiens
atccacccgcctcggcctcccaaagtgctgggattacaggcgtgagccaccgcgcccggcccccactgtactgtttttgacagtggttgtaccattttacattaccaccaacaatacacagagttctaatttctctatatcctggccgacacttatctatattgtcagtagtaaccatcctgttgggtgtgaggtggtctgattttttttcaattgctatgctgtatgacatctgagttcctgttgtagaaccaaacacattaaagtctgaattgatagcaggaatgggaacaaaactagaggaagaattggatattctgaagtggctgaagtatttgtgtctatgcagtgtgcttccatacattcaggtactggttaagatgctgatagttaagggatttcctggctctagtacctaatggaaagttaggaacaaataattccaatccttgccttcttcttgttttgttcagttaaattgtcagtcatcagccacagatatcggtggacttggtttctgtatttcttcaggagagactgaatacgttgcagttgataccttagaataatttaacttgaaagcatatacatgtacactggttaagaagtttcatataaaccacttttagttttagaatgggtataataaaatagcagatgctgataaaatgtgcttttggccaggtgtggtggctcacacctgtaatcctagcactttaggaggccgagatgggtggatcacctgaggtcaggagttcaagaccaggctggccaacatggtgaaaccctgtctctactaaaaatacaaaatttagcctggtgtggcggcacgtgcctgtagtcccaggtactcaggaggctgaggcaggagaatcacttgaacctgtgaggtggaagttccagtgagccaagattgtgccgctgcactccagcctgggcaacagagctagactctgtctcaaaaaaaaaaaaaaaaaaaaaaagaaaaggtgcttttaagaattccactaaaaaaaaaggagagaattatccaaatattttctatcatttatgactagtagatgatagtaaaagcaaactactagatgccagcattgttctcttccactaacattttattgtaaaaaatcttcaaacacacagaaaagttgaaagtgaacattcgtgtacccaccacttagattctatcattgatagtcaaataactttatcatatttactattatagcaaactttgtcatttgtccatctcagtagatttttaaaaattgttaaagttttttttttttttttttgagacggagtttcagtctgtcacccaggctggtgtgcagtggcgcgcgatctcggctcactgcaacctttgccgcctgggtttaagcaattctcctgccttagcctcctgagtaactgggattacaggcacctgtcactgcgcccagctaatttttgcatttttagtagagacgaggtttcaccatcttggccaggttggtcttgaactcctgacctcgtgatccccccacctcagcctcccacagtgctgggattacaggcgtgagccaccatgcttggccaattgttaaactt

SEQ ID NO: 134574 - DNA, 1060 bp, Homo sapiens
gcccgcgatccgccctggcccggggtcgggggagcccagccccctgcccactgagcctcggctggcgggagggccggagccccggggtgacgggcagtgtccgcccgtcccgtctgaccccgcctggccccgggtccccgacggctggttgagttatagaaatggagctttcgggaagggggagaaggtgcctttttgtgacactctagtaatcagccgaaaggtcacgaataggcggtgaccctcagatggagcagggagggcggagagggtcgccggtcgaaccgcaggagaaaccacggggtgacagcgctttcagaaaggagagttagtgccccctcgatcgtacgcggtgcagccttcccggggacggcggtccctgtctggggagagcggtggtcaccctgaatcccaggccgccccgcccgccgccggggttcgcctcaatgctttgtgggaagtgtagttccggggcgccgcggacccacgctggggtcataaataccgaagtttcataggacataggacatgtgagataatttctgattgcgttttgagtgttctcccccccaagggttttctttctttccctttttttttttctcccaatgctgcccttcagtttatggcaaaaacaagaaaggtgttatttgaagatgatgtgggttttaaatggaataaagcatgggtgaggtgttgcaagctttatgaagcttacgttgttaaagccgcttctgaatttccatatgaaagtagttatacacgtaatgtatgtttttctggtgcttgtcagtttaaagccacttttatatacatgatctcacttttgccctcatagcaaccttgtgaggcagataggtaggaattatccttgttttaaagaggaggcaggtttggagagattaagttccttgctgctttgacacagaactggtggagcaggagtactgtttgctttttttgaagctgaagtaaacacttggtgtgatcctgagcagattggagagtcggaggagacaaggtctcatggtgcgattagagagagaagcgggctacagat

SEQ ID NO: 134575 - DNA, 1076 bp, Homo sapiens
accttttcccatttttgtctcaagttccagtatttatgtctgtgtattttggtagcatgtttttatcttccttggagaaccagaggctatatgtgaatgctgggatatctttactctatgcaaaacagcaattttctgttcttttctctatgagcagactttccagtttcaaaattagagttgatttcccagctaaagtgggttgaattgccatggctgctggaagaagtctcaaaaagctcccgactaggtgagttggtgaaaaatacacaacgaaattaaagcagttgtttagcaagtctgttgagaagactctttgaaatgttgggctgcctagatactaaaatacaaagatgattagaatagagcccttgccttcctgaaatgttcattttagtgggggagacttggtttgggtcctctgaatagatgccaggacatgattagccatgtaagatctttactggagaaagattcagtgaaggaaaatgaggaaggaactagaagaagccggaatagccatcagagcataatgctggtctaacccctgtgaatgagaacaggaaggagggcagattgggtaggaaaagtcttagactaaagtgtcgttctatctttttttttttttttttttttttgagtcggagtctcacaccgtctcccgagctagagtgcagtggcgtgatctcggctcactgcaacctccgcctcccgggttcaagtgattctcctgcctcagcctcctgagtagctgggattacaggcgcctgccaccaagcctggctaattttttgtatttttagtagagacggggtttcaccatgttgtccaggctagtcttgaactcctgacctcgtgatcggcctgcctcggcctcccaaagtgctgggattacaggtatgagccaccacgcccggctgcagtgcagttccaaaaaagtttaggcagggccaaacaggagtccttgccatagttacctatcagaggagtcctgtgtctcaaagaaatgggcctgtgtaagtatcctgtactccatcattgactgggagcaactcgtgggaatttgtgtgaatgca

SEQ ID NO: 134576 - DNA, 1090 bp, Homo sapiens
aagcctgtttatttatttttctttttttcttgagatggagtcttgctctcttgcccaggctggagtgcagtagtgtgatctcagctcaatgcaacctccgcctcctgggttcaagcagttctcctgcctcagcctcccaagtagctgggattatgggtgcccaccaccatgcccttctaattttttgtatctttagtagagacaggattttaccatgttggccaggctggtctggaacgcctgacctcaggtgatccacccacctcaaccttccaaagtgttgggattacaggtgtaagccaccgtgcccggccgaaaatgcctgtttctaatgtctttttctaactgcagtcttctgcactgttgggctaattcagtcagttttgttgctgctaaaacaggtattgtaaaataatgcttgtgacttaatgattctcctgaatctctagtatttagattatttaacattttgtctttgctatctgtttaggtaggtggagagttttcaaacactgttatcggccagatgaagaaatttggaaggattgccatatgtggagccatctctacatataacagaaccggcccacttcccccaggtaatgagcacatgcacacgatcccatatgtcacaaggctggacaaggagaaaattcacagatatgccataggccagtgactctgaaattattagaaagattttcatatattcttttttttttttttttaagacagagtctcactttgtgagtgctcaggagtttgagaccatcctgggcaacatggcaaaatgccgtctctacaaaaaatacaaaaataagctgggtgtggtggtgtacacctgtagtcccagctactcaagaggctgaagtgggaggattgcttgagcctgggaggcgaggctgcagtgagctgtgttcctgccactgcactccagcctgggtgacaaagtgacagcctgtctcaaaataataataacaaaaacaataacaaaagaaataaaaatatatataatttcacatattttgtgctaaatcagcttatattagatttttatgtagagaaacagcaagatctacaaatataaaag

SEQ ID NO: 134577 - DNA, 1044 bp, Homo sapiens
tctgtgatgtgggagtcacagagctgagacaaaataatagtctgaagaatgactgtaccaagagatggcatacactgcattgcaaggaagagaagcccagaaacaaagaaccaaggaagtcaaatggatcggttgtgaaaccagctggtggaactatgaaccaaataaatgcagaagggacctgctgggtggtcagaagcaagctgaagctgagttgtaggatggtccggggactgatttcacctatgggatctgttggcccattatggtattccttttatatgtggctcagcacctaagagagtgttcctagggaacctaggcatacgagaccaggaaagtagtgttggtccatgcttgtgacttattcatggtttcctttttttttttttttctacttagggctgcaaagttgttggagcagtagggtctgatgaaaaggttgcctaccttcaaaagcttggatttgatgtcgtctttaactacaagacggtagagtctttggaagaaaccttgaagaaagcgtctcctgatggttatgattgttattttgataatgtaagtacaaactggacttaatatctaatttattatggaagtactatataaagcaggagtctcctacccctgggccatggatggttagtggtccatagcctatcaggaactgggatgcacagcaggaggtgaggggcaggtgagcaagcaaagcttcatctgtatttacagcccttccccattgctcccattactgcctgagctccgcctcttctcagaacagtggcagcattagattcccatagaagtgtaaaccctgttgtgaactatgcatgtgagggatctaggttgtgcgttccttatggagatcgcactactcaggtgcctgatgatgcctgatgcctaatgatctgtcactgtctcccatcacccccagatgggaccgtctagttgcaggaaaactcacccactgattctatggttatggtgagttgtataattatttcattgtatattacattgcaataataatagaaataaagtgca

SEQ ID NO: 134578 - DNA, 1100 bp, Homo sapiens
aaggagctaggggagggatgggattataagatggcagacttgagcatgcttatattttgagtgaaagggacagtagagaggaaaatctcaacgattctggaaagtggaaggctaagggaaagagagcgacacctgaagaagagaaggctagtgtccaggtcaccttgagccacaggacagaggcctcttgcttaaaaggaagagatgtgggtgagaacaggcgctcctcaccccatgagccactccttcctcaagtggctgggccagttgagagttctctggtgacccctatgccgatggctaagaattaagatggagaggggtggtggactatcagttgtggaatatcaacctcagtgcacttttgtcaacactaaccacacagcatcctgactcccttgaaagggaagacatgtcacatgccttaatgccttaatgtgctttatctttcagagttgtggaaagtaaaaatgtagccctaccaaaaggaactattgtactggcttctccaggctggacaacgcactccatttctgatgggaaagatctggaaaagctgctgacagagtggccagacacaataccactgtctttggctctggggacagttggcatgccagggtgagtttcatggatatattccatttgtttgaatgtctgacactctgattttccaaaatggtttgttcagaacttggtcaacaggaagatatttgatgcatgataggctcaggggctgatcagagaagagggcaggaccaagatggcagatcaacctaagtgtccatcaatgggtgaatggataaagaaaacgtggtctatatacatagcagaatactatccagccttaaaaaagaagaaaatcttgtcatttgtgacaacattggaggactttatgttaagtgaaataagccaggcacagaaaggcaaataccacattatttcacttcagtgtggaatctaacaaagttgaactcatagaattagagagtagaatgatagttatcaggggccgggaggctgaagggttggggagatgttggtcaaaggatacaaaatttcagttagacccaccatgcccggcatgaataaacatttta

SEQ ID NO: 134579 - DNA, 1086 bp, Homo sapiens
aaagaaatgtatatttttaactgaaaaggtgatgacaaattgttcttcagaaaaattacatgaaggctggacgcagtggctcatgcctgtaatcccagcattttgggaggctgaagcaggaggatcacttgaggtcaggaatttgagaccagcctggccaacatgtcaaaacccaatctctactaaaaataaagaaattagccaggtgtggtgatgggcatctgtaatcctagctattcaggaggctgaggcatgagaattgcttgaacccaggaggcagaggttgcagtgagctgagatcacacctctgcagtccagcctgggcaacagagtgagacttggtctcaaaaaaaaaaatgtatgaatgttcactcccacaaatagtattaacctgtttcccttatactgttcatcatcagtctcggcaacctgagataaatataatgatactttatgcttagtttagtttgcatttcttttattattagtgatgttgaccttctttttgtaagttaattctcaattttcttctgtggattatctgtttatatcctttgcccttttcctttaggtcttatcattcgttatattgatttgtaaaagcttctcgtatgttcaggatattagtgttgcaaatgtttgggcctttgttgatatttcttctgtgtccaattacagtttaaaattttatgtgataaaattgtaagtatttataattatggtcctttggtttcatctcatgcttagaaaggggttccccactccataattactaaaatatttattcatgccgggggcagtggctcacgcttgcaatcccagcactttgggaggccaaggtgggcggatcacttgaggtcgggagttcaaaaccagcctggacaacatggcgaaacctcatctctactaaaaatacaaaaattagctgggcacagtggtgggcgcttgtaatcccagctacttgggaagctgaggcaggagaatcatttgaaccaaggaggaggttgcagtgagcagagatcgcgccattgcactccagctttggatgatagagtgagactccatctcaaaaaaaaaaaagtattc

SEQ ID NO: 134580 - DNA, 1072 bp, Homo sapiens
ggggctctactgcggcacgcgggactgctacgaggtgctgggcgtgagccgctcggcgggcaaggcggagatcgcgcgggcctaccgccagctggcccggcgctaccaccctgaccgctaccggccccagcccggagacgagggccccgggcggacgccgcagagcgccgaggaggctttcctgctggtggcaaccgcctacgagacactcaaggtgaggcctgcgggcgtggaggggcttcgaagactggccgcgggaagcccacggcgccttccgaccccggtccgcggagcgtgggcctctgtgaccccgaaactgagcacagccaccaccgcgacctttaagatactcacgtttcccacgtggccctgtgaaagagccgagtcggccccacggggccttggggggcacagctagcctccttgccctcttcctttttgtgacattgttatgcaaaactttggccatcttacgatttcgtgaaaatattttaataacgtgcatttcacattcgaaaagcagggtgatcattattagtaggatctggggtagcccacaacagggaaagtctcgaatatcaagtgacaactgtgatcgcatcagtttgatatgacagaaaattggtttctggaaatagtgttaatggtgacgcttagtttgggtttaaggaactaagaaaacactgagaagaacaatgaacaccagtcaaaaggctggatgtgagtctttgctgtgacacccctgtatgaccttggatagtgacttattatgttgaaatagctgtttcttcatatgcaaaattaaggccatgatacctcctctcagagttattatggggattaaatgataagtgtgcgaaccgcccccctttccataggatccataaataggtgcttaatgacttgggtacaaaactctgagaatttctagtaggaaatattttgtgaatatgtatttgtatttcatttgacaggttttattgagtcttgtggggatgagagatttagcccgatgctgttttcttctactactgcaaaaaatcaaaccatctaggacatcacgaagtataaa

SEQ ID NO: 134581 - DNA, 1437 bp, Homo sapiens
gcttggcccctaaggtggatgttagagtagtgattttggtcagcgtgtgtgctatttcggtgtttcaggtatgtatcaatggatatttttatctacatttatgtgcattgagtgcacattgcctagtgctagtcattaaaacctaactgcgagtatcttcttgtaaaattttacttctagttgagatctgttttagtcattggcaatgttggaatctttgtcagtggcaaatctaagaaattgttgaagaatgtcattactactacaaaacaacccctcaaaaatccagaccctttttcattgttccctctggagtattttctacataatagccagagtgaacgtcagctaattcatatcatttacctctgtaggacttttccatgacttaccattaaacttgggagaaatctgaattccttaacctggcctaacaagtcctggcaccagtcaccaaatgccagtagtgcttgccatcattattgtaacaaccagaaatgtcccatgcatttctgtgtgcccctttaagggtgcttctgctcaggttgaaaaccactgaaatagattaaaagaggcataggaactttctgtttttgtttttgttttgagacagagtctcgttctgttgccaggctggagtgcagtggcacaatttcggctcactgcaacctccgcctcctgggttcaagcgattcccctgcctcagcctcctgagtagctgggactacaggcgcgcaccaccacacccggctagtgttttgtattttagtagagacggggtttcaccatgttggccaggatggtctcaaactcctgacctcgtgatcctcctgcctcggccttccaaagtgctggaattacaggcgtgagccactgtgcccggccaggaactttttatgttgtaaagtatcacaaaaatttaacttctgcctgaaataagttttccctgttattaaactagccattcctatcacatgctcctttaaaggaaatgaacaagtcaaatgactagaatgaagcaatctgcttgtttgaaaattacttctccagtttcattcccagaaacgattcagttttttttttttttagagatggagtctcactctgtcacccagactggagtgcagtggagtgatcatgactcactgtagccttgacttcttgggctcaggcgatcctcccacctcagcctcctgcatagctgggactacaggcatgtgccaccacacctggctaatttttgtatttttttttttttggtagagacacggttttgccgtgttgcccaggctggtctcgagctcctgggctcaagcaatccactcaccgcagcctctcaaagtgctgggattacaggcatgagcccctgcacttggccgacattcaatttttatgaataaaaactacattggaaactaaggtggtatgtttaaaatg

SEQ ID NO: 134582 - DNA, 1053 bp, Homo sapiens
catgtccagcgtttagtcagttggctaaaaggcgtctgttgtagagctgtgtttagctacgagtgcagcattatttgcagaagatctgtaagaaggaacacaaccaggatagtccctgtgcctcagtttctcctttgctgtgtgcctggcactgctacagggaatagggtggttctggaggggaaggtaaacagcaacttaacggatacatagcatcgcttcatgtactaagtggagtgaagataataaacagggtaaagggagagagggctgtggaatgcagaggtctggtggcttatgtgttagtaaaagcagaatctggactgtcatagggtaggcagacgttttttctttttaaagaaacctagttttaaagaggaaataacgtgtttttttaacttaggaaatgaaaagccatgttttagggttgagaggaagtaacaaattatatttttaggttccagggaagaaacaaatggaagccaattgctggtagaggagacagggctacgggggggtgggggattggtggcacagcttctgagacaggaagaaagaaggtaagggtgtgtgtaaagataagtttctagatatgggctaaacttgtatggtgacacttttctttgtgaaataggaggccaggttttcttctaaggcagaggaaaggggactaagggagtggcccctgagcaggcacgcagatgcgctgtgactgaagacccagctgctgtgacaagggagactgctggtcatatttgtgattttttttttttcctgcagcaatctttaccatcctggaatgtgagtgctgaaggtgaacggtagttgaaagaggagtaagttagcaggggaggtatgccagaaaggtggaggtggggccggagggcaaggcgtgtgaaggtctggccagaaagaggctgagcctagatggatagagaaggaatgcagccagcctcctggtgataggtgagacagaaggggaggaggtgatgcctggtgatctcggtgaggtcagagcagaataaaggaagaataaaggaggcagcaccctgg

SEQ ID NO: 134583 - DNA, 1053 bp, Homo sapiens
tttagatgtcttttgtattcacctgttactttcattttttttttgtttgagacggagttttgctcttgtttccaggctgcagtgcaatggtgcgatctcagctcaccacaacctctgcctcccgggttcaagcgattctcctgcctcagcctcactagtagctgggattacaggtgcccgccaccatgcccggctaatttttttgtatttttagtagaggcagggtttctccatgttggtcaggctggtcttgaactcccaatatcaggtgatccacccacctcggcctcccaaagtgttgggattacaggcgtgagccaccgcgcctagctcacctgttgctttctatttcgtgaatactaaagtaccctattaaatgatgactagttaattttataaagaaatcttactaaagtgaaaaccaaacaaactctttttccagtaggagagaagtttgctgaggaatgccttcaagcacaaagtgatgaatgactgccttcaagtctcaagaaaacacttttccctaacttttagagatatttcagccctttcctgtggcctggtcctatagccaaaatcacagatattcatgagtttctacttgagtgagaaaactgggtgaaggaatagaattttaaatagtaataactgcttgttttttttgtgcaagtacttttatacataagataaacaaaaaccttaccaccaaacataccaaaatgcacctctttcataagtgagttactaagatttctatacctggaatatcatgtatgtttcatttactggatgtttacattttaggaaggaaaatagttttgtttatttaaacaactgaatacttataaactgttgttcctggaagttatttattccataaaaaatttgttcttttgtcatgaatttataattcctaaatgaagaccagaaagtacaaattgctgggaggaagaataggctttattaatcaactgatgtcttgatttttctaaatgggaagattgctttatttttaacactaattatgggagcagattcttagcaaacttcttt

SEQ ID NO: 134584 - DNA, 1039 bp, Homo sapiens
cgcggttccgggggcgggacgcgccgaggagtggggcgcgagccgccggttttgattagtgcgcggagctgcggcggtggagctgctcggccgggagcccggcggcgagacggagaggcggcggaggtgcccgcgcgcagggtctggtgggcggccgcgaggctcgggagaggcgaaccggagcgcgggaccgcggtcgccccgaccagagccgggagaccgcagcacccgcagccgcccgcgagcgcgccgaagacagcgcgcaggcgagagcgcgcgggcgggggcgcgcaggccctgcccgccccttccgtccccacccccctccgccctttcctctccccaccttcctctcgcctcccgcgcccccgcaccgggcgcccaccctgtcctcctcctgcgggagcgttgtccgtgttggcggccgcagcgggccgggccggtccggcgggccgggggatggcgctgctggacctggccttggagggaatggccgtcttcgggttcgtcctcttcttggtgctgtggctgatgcatttcatggctatcatctacacgtgagtgagggaccgcaggaggggctcggggcaggggtccgggcctcggagacaggcgagaatgggaaacgtttgcgctttgaaggggactgggctcgggcgggggtggagaaagctgatcgtcaggctgttccccccgttccctcgcccctcggaccggcggtggcggtggtctttgcgagggaaaagtgttgggcgtgggaagggtttgctgggttgcaggcgactgcccagccaggctaaaggagactgctcttacgtgtcaggctgaaggtggtggcttggtttgattgtgctggggattcgtgtaatttttcatctgggccgagatgtatggtgtattgtttttttctcccgacctgggccacgtttctgttagggtggtgattgtgtccacttttctgggagctgctcacagctatctggacacctctctgtggattttcttcttcctggaagggctctatgcgcttagataggtg

SEQ ID NO: 134585 - DNA, 1685 bp, Homo sapiens
cacatcaagggcttaaaaaaaagaaacaactgctgcctgggtctcacccctacagacatggttaaattggttcaggcatcagtattttcaaaactccataggtgacatggatgtgcagcctaggctgagaatgattgccccaggctgtctgcccacagttgtgtccagcacctgccacctcttggcttcatttaattctccatttagcctagagcccacagttcatcacttcattatcttgcctcttgcctcacctcgtatcagtctgccctgttatcttgaatccatccaataattatagctgctcaactttgaaaatcctacagagggtaatcacacagccatgtggactaatactactacacattggtagtctcagggctcagctaaacctgcattgcggtgctgcctggcagtgcttttttttctgtgtttagctctgacatccatcacttaaaaaaacctcttctaaatcttcattctaccgcattcttggtagatgaccttagctcctacttcatactgtggatcccatcatgccttaaattagttttttctttttctctctttgcccttcggctagctcttcttgaatttttaaagaatttcaagtagtctttaaaaaattgaactagaggctgggcttggtggctcacacctgtaatcccagcactttgggaggccgaggcaggtggatcacctgaggtcaggagtttgagaccagcctggccaacatggggaaacaccatctctactaaaaatacaaaaaattagccgggtgtggtggtgctcgcctgtaatcccagctactccggaggctgaggcaggagaatcacttgaactcgggaggtggaggttacagtgagccaaggttgtgccattgctctccagcctgggcaacaagagcaaaactttgtcttggaggaaaaaaaattcaactagagagccaaggcggggaggatcgcctgaggccaggagttcaaaaccagcctgagcaatatagcaagaccccatcgccacagaaaaattttaaaaaattagccagaggcagtggtatgcagtgagctatgattgccactgcactccaacctgggtgacagagcaagattgtatctcaaaaaaaactagaaaaattaaactagaagccgtctgttccaccctttggccctttcactcactgtcaggtttcagtagaaactagtgtttgtttactgttatcacatttcaactcccattcatttactttttaaccgatttttagctgtctacccttatcctccatgaactgccccaattcttgccaaaagtgctcagagatagcagcaagtacatatgtaatctactggacattaccattcttaccttggtctctccagcagcattcagtgttattctttcttgaaccctttgagaaagaaaacagcctggccagataaacccttctgtcactttacttgcatcctggctgtctttctgcttctttgatccccacttttagtctccttcatgcattactctttttttttttttgagagggagtttcgatcttgtcatccaggctggagtgcagtggcacaatcttggctcactgcaacctctgcttcccaggttcaagcagttcttctgcctcagcctcccaagttgctgggattacaggcgcaccaccgtgcccggctaatttttgt

SEQ ID NO: 134586 - DNA, 1032 bp, Homo sapiens
tattcatggtgggaaatctctcttagcagttttcaagtaaacaacatgttgttatatactttctcatgtacttatactttatttgtggtgagaaatctactcttagtcattttcaagtataccatacattgttgttacctatagttgccatgttgtacaattgccattaaatattgactcatacttaactactaaggcaaggacttaagaattagaaaaagtgaaacagtgaattttcaaagataaatgatacagttttccttttgagaatggacagttttttcctaaatatattattatgaataatagagaatgttaaataatatgaaagtatgtttaattattaaatatgcaagtattctcatttctatcatgtatctttatactataaaatatttttaatgttgcataaatcttttactactgtacctttacatttttaggtggcaaaaaagttggcattaatcctaaaattaataatttaatgccaggatatgaagttgcaaagtatgatcttatatggatttgtgatagtggaataagaggtgaggtttttttcttatttattttataaaactattaatttgaagataaaatgctaaaagcaatctcagatacattcatgagttctttttatttgcctaaaagagtaatttatttcatcatcatttcatggtaatatgtccagttatgcttactaagattttgatttttttaatcctaaactagaatgttacatgtattaaaatgttttcattttgaagagaaaatttcaaccattaaattaaaaatggttgtggttcattatataatctgcaagctttcccatgggtgtaacttttcccttgtttgcctgacacttatctttaatgtgtttcggcttgcgtaatacaccgtctcacaaagggacagaaattaataggtgcatattttactaaaacacatacacttatcggactatacacatgactttttacttaaatgattttagcaagaagcctttcatatactgaaattataacttgcattttc

SEQ ID NO: 134587 - DNA, 1023 bp, Homo sapiens
gcacccgccgccacactcagctacttttttttgtatgttagtagaggcggggtttcaccatgttggccaggctagtcttgaactcctgacctcgtgatccgcccgcctcagcctcccaaagtgctgggattacaggcatgagccactgcatccagcctaaaatacttgtttttaaaggagatcactgccttgtgtgagaattcttttaaattttttaaaaactgaagtgtgttttaaatacaaattctgtcatgattgtgttcatgtggttcatggtttcctagtgtctcccatgagatccataatgccactttctgtttacatgtcttgttgtttggttagtagtcatcagagactaatctattaaatatggagccctctccattttttttcaaaatgactgcattttaagtttcttaaattgtaaagtaaggtgggtacagtttcttctagttcttagatggtgctgtcacgggccagcataattgctaaaacatccatacgtatggtagaccttaagtcatgtgctaatcatgaaagctgggctcaccctgaataccggcagttgcctggtctttataatgattactgaatgcataaccagttacgcttgcatgtgttcatcatcataacttattttctaattatcttaattttcagaggttggaggtttgcaatgtccactcaagttgcaatgcaaaactctggctcatattcaatttctcagtttcaatccagaatgatcaggtaaatcaactgttttctttttatacttcgttaaaaggaaagtggggaggggggtggtaatttttacaggtttaatgtagttaaatgaatgtacctaaaggttgaagatttttgtttagttgcagaaaatagagtttaacgtctgtgtttaagataaatttaatgtctaaatgtattttatttgctgtataacactgaaagcactcattagagaaatgttgagactgaattttttaatatgctgatctttattttctaactttctgtgctgattaa

SEQ ID NO: 134588 - DNA, 3566 bp, Homo sapiens
gtggataggcatgaaaaggttggcagtcccttggtggaactagaactatttcaatttagaaaaagttgaaggaaatgtatctgagccattcttcagcttcccattgtaggttagtctcgggtttgaacatgactttctctagtggaatgttgatgcaaaacttaagtcgatttgcaactttctattggttatataatcgcttttattaagtttccaaaaacatgaagttaattaaatcagtgagtattgaaactaataagacattaagatagcagttattttaatgcttcattaacaattagcattttcttgaacggtataacatggcagttaaattacataaggaagcagacttgattttacatagtatacttagaaaagtgaaatccaagaatttaattttttaaccttgtctttagtttgacagtgagtgaaattaaaaaatttttttttccattcctagggtggcacactgtgtttttcaaaacttgattatgcagtcgcctggttcatccgcgaatccatgacaatatacatttttttgtctgcattatgggacccaactataagctggagaactggtcgctacagattacgctgtgggggtacagcagaggaaatcctagatgtataactacagctttgtgactgtatataaaggaaaaaagagaagtattataaattatgtttatataaatgcttttaaaaatctaccttctgtagttttatcacatgtatgttttggtatctgttctttaatttatttttgcatggcacttgcatctgtgaaaaaaaaaaaaaacacatctgtagtcttggccaaatgatacactttattttgtggaagtagagaatcaagagaattggttctaggaacctgggttcgttcatcattgttgtttatttttttaaaataaataaataaatatatatatagatgctctgcaacaaactctgtgacagtatccttcagtagagaaagtttcttacttgtgagtacactcttttagaacatttacgggtggcagcagctttgctttagagtttagaagataatagaaggaatgactattcatgtccaaagtgaatggttttgtgcagtgaacaacacatggcgaggtactaactgagaaactttttcatgctttatgcctacctcttgtagttgttgcagagcaaatataaattgtaataagatagctaggccttgcagaaacaaacagaaaaacttaaaaaaaaatgatataagagctggagtctagtatttatatgaatctgtgagagataatttttttggtctcactgcaatgaaccaaaagcggctgagtttggtttttaattgtagccatgtattgaaggcatctttttgaccaactcttgttggttctgtcttgaaccattgttaatcactgtgctgtaattagtatagctaaatcttttccttccttgctcctcccccagcccaccccgtcttcccttaacattttttcagggggggttgggagtggtttcattttagtgtgagtggatgttttgatagttgtaaggaaaaaatgcatttcagacacatttcacacatgagctattttcttacacagtatgtcttattgttaataagaatgtaatttcatgatacaagtatttaataccttttttaagtcagtaaatattctagccatcaataaattgcagtagagtattaagaggggacaggatgagtttactcttaaaattaatcagtatcaaactaagtctactgtgtgtgttttttttttttgttttttgtttttgtttgtttactattatagtaagtctagtcttatttaaattggatttttgtattcaagtttatatgacaaaatagactagatcagcgctggttgtaaatgcatgctgtacctcactgttttctccccatcatgccgctaaacttgctcgccaggttgtgcttaacttgtggtgaactggacttgattctgttttgttttgtttttttaaaaaaaaaaaacaaaaatgtaagggacagtgcataagccttttctttgttaagtagtggtgttttgctttttcttcaggattggatggcatgttgtccacaggaatgcctactgcagggctaacactggcaatatggcagctttaaattctgagttactacagtctccatgtcaaagcataatgtgtagcatatcagcaataactacatatttatagaaaacactttttcactttactgagccaattcatttaattgtcaaatgtctatatccatggtttaaatggcaacatatctataagtatgtatacacattatatttaagcttttctctgggccaaactgcttcatccttttttctttctttttttttttttttagccttatgatgaatttgtttgaagggcattttctttatgaacaaaggcttggatgcatattcctttctttctgtgaatgggtattattccctgaggaaagttgcacagtgaaaaccagtctggttgtgacccactacatgttttgtttttaatcactattacctgagttgaactttgctcaccatgtttgtacttgttggtctgtttaatgaagtttggttgatgccatcctttgcactgccgaagcgtaatcttgtgtattacttagctctctgctgatctcagtatggacagtgtaacaacaaaaccaaaatggctggacagacttcttgtgttttgtaaatataaactaggacagttctgtaggtttgttcagtgtgctagtggagtatttccttaatgtaaaacttcacttaacagagagattctttgtttagcaagcttggagtgatgataaaatggtaagaaataatataaatgttgaagaaagcatcacaacagaactataggagtctaaatttaataaatctttaaaaaaaaccagtgtctagaatatataccatgttttattatttaaaatcattgtcttaaatttttgttcaaaaaataaaaatttgaatacaatcaaaacgttagcaatagtgtattttttgttcttctgtatttttataagtagcatgttccaccattcacatcagaattattagaagagttctgtcaagtattccttttgaaatcttccttttacctgagccataggtaaaataaataaggacataggcagtcctgtgacttaagtatggcttttctacattggttgcctgttaaaatcacctggagaacttgtaaaaaaaaaaaaaaatacacaacacacaccctgggccctgtacacaacacacacacacaccctgggccctgtacacaacacacacacacaccctgggccctgcccacatagattttggtgtaattattttgggtgaggcctgagctcttctacccgtgattctactgtgagaatgactggctcgtaatgacctttagaaaagagccagtggtcctttgggcccctctccccccgggctcacagcttgaactcagccttttagatcttaccactctaatggctagaaaatgtaaatccaaaggaaggaatggagtggcattattacttgagacccagatgggag

SEQ ID NO: 134589 - DNA, 1022 bp, Homo sapiens
tgatgcctgagggtcagctcctctagacattgactgcaagagaatctctgcaacctcctatataaaagcatttctgttaattcattcagaatccattctttacaatatgcagtgagatgggcttaagtttgggctagagtttgactttatgaaggaggtcattgaaaaagagaacagtgacgtaggcaaatgtttcaagcactttagaaacagtacttttcctataattagttgatatactaatgagaaaatatactagcctggccatgccaataagtttcctgctgtgtctgttaggcagcattgctttgatgcaatttctattgtcctatatattcaaaagtaatgtctacattccagtaaaaatatcccgtaattaagattgttcttcccttggttaatttttctgttactaagcgtcttctaaaaatgctctttgccccctgttagaaactgagatttggtggtagtgtagtagcaatgcttaaaacagtattgagcccatggctagactagagtccatgtgtgtttcaggggaggggttgccatagagggtgacacttcttttatctaaacttcagtaactatgaatgttactccattatgaactatgaaacattagatataagcggtgctggacctactgtgaatatgctaagttgacagctggagtctatttgattttacttttaaatcatgaattggcattctttcctcttttttttttttttttttttgagatggactcccactctgttgcccaggctggagggaagtggcgtgatctcagctcactgcaacctctgcctcccgggttcaagtgattctcctgcctcagcctcccatgtagctgggaccacagggcccccccaccacgcccaggtaatttttgtatgtttagtagagatggagtttcaccatgttggccagggtggtttcaaactcctgatctcagttgattcgcccacctttgcctcccaaagtgctgagattacaggtgtgagccacacgcccggcactaa

SEQ ID NO: 134590 - DNA, 1050 bp, Homo sapiens
tatggagaaaatgacaggtgactcaacaaaggatattcctttgctctatctgaccatcagggctatcagttttggaaaccaaattcaaataatatcataatgacttgtccctccatgcaaaagaaaacggcccataaaaatctatcaaatgtaattgattgtgagaggaccaacaaaaaatgtaacacgttgcatagtatttgtgtgctcaacaagattagctgttttctcccttgtaactttaacatggtctggctttacacttccttttcagaaataccttgtaactgtaatttcctgaggctgcatatccacagggccaactcaggggacacacaggcatgttgggcattcttgggattctttgttaaatggggccaagctctgggttaaaatggattgagcacagtggggtgtgtgcctcctgggaggtggtgatgccgtgcactctgggctaagcctgtggttttgtcccacagattcgtcactcatgctgctgcagatggcgggtgttggactgggttccctggctgttgtgatcattctcacattcctctccttctcagcggtgtggtatgtgagggtgtcatttttgagaaatgactggaatggaggggaggatgggtcagagtcacgaagaacagctggggatgaggggagtcaaagggagtgtgggtggaggttgtccttggctcagcagagcacactcagcggtgaaaggcatgactaaccctgtacctccaggtagcatgggggatgccttcccaggaaaagagcaggaccagtgatggctgccctggccacacacagaggggtggctgagcttccatgctgctccccctcgcctcctcccatgggtgtgcgtgtgagctgtgcatagagatgcacagtgggaaaaccaaagtgtgttcatatttgtctcttttcttttcctcctccatgtctagatggcagatggacactgagtggggaggatgcactgctgctgggcaggtgttctggcagcttctcaggtgcccgcacagaggctccgtgtgacttccgtccagg

SEQ ID NO: 134591 - DNA, 1045 bp, Homo sapiens
agtggctcacgcctgtaatcccagcactctgggaggccgaggcgggtggatcatgaggtcaagagatcgagacaagcctggccaacatggtgaaaccccatctctactaaaaatacaaaagttagttgggcgtggtggcatgcacctgtagtcccagctacttgggaggctgaggcaggagaattgcttgaacctgggagatggaggttgcagtgagccgagattgcaccactgtactccagcctagtgacagagcaagactccatctcaaaaaaaacaaaaaacaaaaaaacaaagaaagaggtttgtctcatagcaggtgctcaataaatatgaatgaatgaatgaactccccatgcaagggtctgatggacacttctccttttttcttccagttcatatcaggtgttagtgcttcccctggccctccaaagcacattttcttgtgattctgaaggcgcttcctccttctttagcaacgcctctgatgctgatggatacgtggctgcagaactactggccaaagatgttccagatgatgccatggagatacctataggagacaggctgtactatggggaatattataatgcacccttgaaaagagggagtgattactgcattatattacgaatcacaagtgaatggaataaggtatctttctttccaagctcttgtgaactctgtattttcttcttcgtatgacatttaaatgtttgaacatttattttccaagtatatgagagggtcactgcatgtaacaatcacaaaatgtttgtgaatactttgcctttatgaagaagggacaggtgaaacccttacagatgatatggattctgaaccacctggggaccttgctgaatcaacatttggactgacctggttttgtttttactcttaagctttacagatgccctcattctattgcactgctgaagtctaagttggaaagaaacatctagattctctgttaacttccttgtgcccctgccaggctgctgcttctctcattctcctgggaagccgaagattaagcacagcactc

SEQ ID NO: 134592 - DNA, 1038 bp, Homo sapiens
gcacacagtttattggcatgttgtgcaaccctcaccactgtgtatttccaaaattttttcatcaccccaaggagaacctctgtgaccattaagcaatatgttcccattccctacatgccccctccacccccagcaacttcttctgtctctatgaatttgcctatgttagatttttcatctaagtggaatgatagagaatctgtccttttgtgcctggtgtatttcacttagcatgttcttccacattgtggcatgtacagaataggctcctcgcttctgaaattaaaactttctttttgatagccctcacgaggacctcttttgtcctgctgtttacttgttccaatcataccccttttcttcttttcaacatgttttcagagcctcccctcccggaagtagaattttttacggtgcacagaggacctctaccacgcctcagactgaggaaagccaaggagaaaaatggaccaatcaggtcagtagctgtcctttctccacggttgcccagtgatccccatggagtgttttggaaactttgattttggtgaggagaagacttctgtgttggtggctgcacttgggtggttagaacaatgcagttggggcctcttttgtttccttgggtacagactggcctttaatcccaaccagcatcctttctaatggtgagagagacttcttttttttaaaatttaaattttattttttatttttttgagatggagtgtcactcccatcatacaggccggagtacagtgttgcgatctcagctcactgcaacctccacctgctgggtgcaagtgattctccttccactgcctcctgagtagctgggattataggtgtgcaccaccacacctggctaatttttgtatttttagttgagacgaggttttgccatgttggtcaggctggtcttgaactcctgacctcaggtgatccaccagcctcaacctcccaaagtgctaggattacaggcttgaaccaccacacccggccacatagagagacttctaaaggaccctatatacaagc

SEQ ID NO: 134593 - DNA, 1017 bp, Homo sapiens
ttcaagagattcttgtgtctcagcctcctgagtggctgggattacaggcttgtgtcaccatgcccagctaatttttgtatttttagtagagatggggttttaccatgttggccaggctgatctcaaactcctgacctcaagtgatccacctgtcttggcctcccaaagtgctgggattacaggcgtgagccactatgcccggtcccctgtgagttttttggtctttagaatttggtttaactatatattaggaacattttcttttattacatctctgattattgctttttttttttaaagtttgttttttgctcttcaaatacccctgtgtggaattgcttgttcgtccacactggtttcccattttctcctttttatcgtccatgtctttttcctctgccttctttgaatatataacaagtttgttctctatgtgcacttacacaaatatgcatttttgcattgacatttcctatctttaccatttccaatgcactttaaattctgctgttgcactttcatttccttttctttgggtctcatctagttccctttttatttctgcttctctctaccagtttcctctctgctgtcacgttcttttattatctaatcctttatctcttgtttgaatctatttttaaaatttttattgaaccgtatgaaacagatgctgcctaattttaccattcttttgctcaatattttcttttttataaatatgctcattctttgcctgccgagcacaattttcctttccttccctctccttctttgtagaatcattttgcagtttttcccccccattctggattacttatccttggaagataaaagttctgtctaggtctgatatttccttcataataaaatggatggccttccctttgatcctccttttcattggataatgttagtatgtttatgtcagatctcagtatgaaggatttactgctggttgggtgacccagtgtcctttgggcagcagctgtgagaaagcccaccaccccgtgcttt

SEQ ID NO: 134594 - DNA, 1002 bp, Homo sapiens
ttccagtgagtcagatagtatagattttgttttcttttctacaagtgatcacatttaaaaaagacaaattctatttgagtgtgtatttcttttttcaccagtgttaagactgaaatattgttcacttttccctgaatgagataagttagcattccttttatttttaaaacttccttttatttcttcccctctctcttctcttaggttattggtttagtatagcattatattaccagtttcttatttttaacatgtattatctctccaaagagctcactcttatattgatttatagaaaccttggtagcgatgatttaaccttgggtacatgttttaatagtttcagtgcttactgacagtcttttcaaaccacgttctctattatttctctatctctatttctctctctgtgtggtgatttgcctgctcctcagggagggaatgggatactttctgagtccatgatgatctgagaatgtcttttgttgccttcacatgtgaatgagagctcaattgaagataaaattcttgggtcataaacttttgttcttggaattctagaagtatttcttattgacgttgggaactggaagctttgaaagaagagttagaaggtgtgactttcttttaaaaaaaaaatcctggccaggtgtggtggctcatgcctgtaatccctgcactttgggaggcttaggtgggcggatcacctgaggccagggtcaacatggctaaaccctgtctctactaaaagtacaaaaattagctgggggtggtggtgtgtgcctgtagttccagctacttgagagtcttaggcacgagaattgcttgaacatgggaggcagagcttgcagtgagccaagatcgcaccactgcactccagcctgcgcaacagagcgagactgtctcaaataaataaataaaatataaaaaattcgatgtaagcaatttgattttcagcttgtgtatcatgaaggcttctttagccatgaaatttaagacatt

SEQ ID NO: 134595 - DNA, 1031 bp, Homo sapiens
ccaaagtgctgagattacaggtgtgagccactgcactcggctgggaatttgatttcaaagaaataaaaagctagatcccctttcgttcttcctgtctgcacaaccacttgcgggttgactgggaatgctgaaaactatgttacctcagggaaccaaggccttcatatggtttcccacattgctgaattcattagctggaatatatgcagaatatttaaaagaagcagaacaacccagaggaatcagtggcatcctgatagaccaggattaaatagcttcagttacaggagtcccagaagtacctaggaaccttgtggagaatttctttagtttgccccaacctgtttctgaggcatggtcctgtgtggtgagacatgtcattttccccctggggatagcagtgacttgaaggagtttcccatcattctgctgggaagagaaaggtggaagtaggtcttacctgtgcagttgcagggaaggtctcactgaggacccagctctgggcctcattccattctaccagagtggaatgccagtggcatccagtggcctgtcaggtgaatcacaggttagaattctgacctatatccaagctggaatctttcctttccctctaagtcaggtaatgggccacgctcattcatgatgaagagaagttgggtgattggcttgggagagcttgcattgcctgactcagtgtctgcctctgaggatgaatggtgaccagcagagataccagctatgcagagagactgatctcctttagaattttgctaaagcccattgatgcattttgtgagttgactgcctttttctcttttagaaattctgacaaagattaatgatgtatcactgtttaatgatacctgtgtgagatggcaaataaactcaagaagaataaaccccaagatctcatatgtggtaagtaaagtgatctactttttcctgctaggacagacacgtcacccatgggaatatgagtcagagggacttgcttccgtgagagcttctcaatctaattgctgtttttt

SEQ ID NO: 134596 - DNA, 1062 bp, Homo sapiens
gaaacattaaccatctctttggttggttgcttgtgtacacacaaatatattcattcttggaatgccttgggccattaaatacgtctaaaggtttgatgctgggaaaacatgatgagggccaaggggtcttgtgtctggtgaatatgcatgaaaagggaaccaaagctctgtgggcaaacatgggacatgagagatagacagggttggaaattagatgagatcctgctctgggaaacctccctcctggaaataactctggagtcctgcaacagcccaagcatccataatgggatgtaaaagagtgcagttgcattaaatccacacattctgtatcagaggctcatttaaaagaagccatctatttctaaggccaaggatggctgatggggatatggaaacaggttatatgattttctctagtttgaatgctgttatctcaataaaaggacttctgtttaaaaagcctggatgttaggagggcttaattttcttggctttctacggattggggagaaaatcacaaatcagaatgaatgcctcaagtttttttctttctttttttttctctgaccatggaagaacagattttttttttctttctgcgtttaggtataactgggactattggtgacacttgaaattattagagccatcttattttatagttattatactttcttgaataacattgtatccatgagtgctattgtgtgacatgaaacattagtatgctttacttcttcccttcaactcactgctctggttttattgaaataatttgaaaatttatttttattattattttacattgttcaacttttagttctagaatcctttactaatagttatgtcaagctctacagtcacatttaaacgattatggagacatccatacatcttgctgatttcattgttccttggtgttttctgtaaaacctgtctgccctgcacacttattcttacgatatttgttctgattcattttttcgatttttttttcccagaaaagataaacggatcgattttttaaaattctgaaatatctaaaaatgactttcttgg

SEQ ID NO: 134597 - DNA, 1049 bp, Homo sapiens
agcaaagcctgattctctagaggtggccagctctttaaggtgtgtaagttttatagattggtattatttcccatttcacagaggagtttaaggaccaggataaggaagtgacttactgtatgtcatgagcttatgcaccaagatgagagcccgatgcacttttctagaaggcagccccagtcagtgtgccctggagatgggaggtgatgatgaaaaagctggagggccctaggagaggggtgccaagacaaacatgcacgttcatgcacagtgtggtctaggacccggccagaagggtattcattgttgccgagtcaactcttcatcttttgagatttttcttagtagagcctgatttatctctacaaaagtggaaagagtttgaaaaagcttcgacataaattgtaccacaatttagtgcattcaaatgaagagtggcagataagcttcattacacggctgcctgtggaattttagtgctggtatggaaaggatcctgagaccacatccagacttagcacaggtgaatgctgtgattgactaatgatgccaccatgggtgagggaggagcgagtgagagcacatttaccttgtgtctgccatctgtgttccaggtgataggatgtttgctcatttgaaatacattttctggactgggcatgatggcttacacctataatcctagcactttgggagaccaagaagggaagattgcttgaggccaggagttcaagaccagcccggaaaacatagtgagaccttgtctctacgaaaacatataacattgtctgggcatgatggcacgcgcctgtagtcctagctgctcaggatgctgaggtgggaggatcacttgaacccaggagttcaaggttacagtgagctgtgatcatgccactgcactccagcctgggcaacaggggaagaccctgtctctacaaaaattttcaaaataaataaataaaaattaaaaaacaattaaatacattttctggcacctcacgatatactgatcttttaacacatttttaaaaactgcattgacttacccg

SEQ ID NO: 134598 - DNA, 1042 bp, Homo sapiens
gaggtaatgaatttgacattaatttattttcagaaatagactgtggtacccctcctgaggttccagatggctatatcataggaaattatacgtctagtctgggcagccaggttcgttatgcttgcagagaaggattcttcagtgttccagaagatacagtttcaagctgcacaggcctgggcacatgggagtccccaaaattacattgccaaggtgagttttcaaaaaatacaggttcccaattcataccaccttgaaactgttttcatatttttctctaaatttcagtttcagggaataaatgagttaagtaaacctttaaaattcctatttgtttctcatagattttcaggtgattttcttgatttttcaggaatagtatcatatcatctgcaaatcataattccattcataaatttttctttctttataatagttatgtttttctcttgattgatcactttgtatttttagaacaaagacttaaatggtagtgttgcctttgaatattatttttttattcctgactattagggaaatggtttgggtgtttcttcattcctgatgttagttttttgatgttaggtgtatatatatatatatattcccagaagtcatgtgggaatgaacatatatatatacatatatatacacacacatatatgtatatatatacatatatatataaaaacgtcatgtgggaataacatatattatatataatatacaatatatacaatatatgtaatatattacatgtaatgtattatatattatatattacatgtaatatatattatatataatacattacatgtaatatattatatattttttatatatatatatagtttttgagacagaatctcgctttgtcacccagtctgcagtgtagtggcacaaccttggctcactgcaacctctgcctcctgggttcaagcgattctcatgactcatccactcgagtagctgggattacaggcacccaccactacacccggctaatttttgtgtttttagtaaagatggggtttcaccgtgt

SEQ ID NO: 134599 - DNA, 1163 bp, Homo sapiens
taatactgagcttggaatacaaagctagaaccaaatataatgacacattaacatgattgatagggaatgtgccagtgttaggggagcacagaggaagatgcatttaattttccttaagaatggaggaatgggccgggcgcattggctcacacctataatcccagctccttgggaggctgaggccagtggatccctcaagctcaggggttcgagaccagccttgacaacatagggagaccccatctgtacagaaaatacaaaaattagatgggtgtggtggtgtgcgcctgtagtcccagctacttaggaggttgaggtggggagaattgcatgagcccgggaggtcaaggctgcagtgagctgagatcatgccactgcgcttcaacctgggcaacagagtcagactctacctcaaaaaaagaaaaaaatggagtagtggggaagacctcagagggaatgtgacattaagctgggtcttaaaatatgaataggtgctagctaggtagagaagaaggcataggcattttaggtatatagagagtattgtgattgtggcatgcgagtaggatagtagatattctgttagggaaagagtagttagcctctgacatctggcaagtaccatgtgtggttggggctcggaaacaatgaggctggaggagtatgtctggagtgagatcactaagagcattgactgtggcctagctcggtggctcacgcctgtaatcccagtactttagaaggccaaggtgggtggattgctagagctcaggatttcgagaccagcctgggcaacatggcaaaaccctgtgtctacaagaaaaaaaaaaattagccaggtgtggtgatgtgtgcctatagtcccagctacttgggaggctgaggtgggaggttcaccttctcccaggaggttgaggctgcagcgagctgtgattgtaccactgcactccagcctgggcaacagagcaagaccatgtcttgaaaaaaaaaaaaaaaagaaagaaagaaagacattgccacacagaggaagagatttgcactttattctgtgagaaataaacagccactgaaggtttttaaggatgagactaggtgtgtcctgtgttattttggtcttcaaattttggttcttcgttgtaaatgtccactaactacatgtgtct

SEQ ID NO: 134600 - DNA, 1066 bp, Homo sapiens
ctgctggttgatcttggtcacaccagaaagtgaacaggattgggtcgtgtgagccattttttatgaggaaaggttgagagttctttttttgttgtttgttttttgattttttttttttttgactagtcaagtacagtagtgagaagggggaaagagtagaatgagaagtttgatctgtaactgactgtccacaatcaattgagataactcactacctttggaccagcccaactgagagttcttgatggagaatgtcagtcctaaatttgggtgggtgtgggaaatatatgacaatttgaatagccctgcaaatattacattgctggagagagtagagtgctctctgtcttggagggatttaaaagcagagtctatgttttcatttctggattttttttttgtcagggatgttggaaaggagagaacatgagatttctcagattccttccacctctggaatttggtgcaatctcttaagagcaatgcaattttatatagtgttagagaccacttgggaatgctttttcttcctgagttttgggccccgttggcttatttcctcccgttgtttgatctgtctttccaaatttgacagacagaatctcaggaaggttgtgctggatttgtttggtctgactgtgaatggttgagggttaggttaaaagcagatttaaaatttaagcactgcatttgtgcttttttgttattgttgctgttgggtttttagagatggggtctagatttttggccaggctagtcatgaactcctgggtgcaagtgatcctcccatctcaatctcccaaaatgctgggattacaggtgtgagccattgtgcttggcctgcatttgtgcttttaaactaccttcttctcttgactgtgaacatctctttactgtactattaaagtccatcagctaatgtctcagaagtacactgaagttgttgctcgtgtattgaagtaaagagtgagagtgtttctcagaagctggcagcctccctcccatcctgagttgcagctttacttggttgcagtggagaggaaggacaggtgagcagggctgaaaa

SEQ ID NO: 134601 - DNA, 4902 bp, Homo sapiens
cacttatttgtcaagtaatatgatcttggaaaattttaaagaaaaataatcctacttataaactacttttttataattgttttcagaaaaaaagtttacagtcttaaggaaaatattcaggtctatcatatggtttgacagattttttaaaagttatttttggtaaggtcttcttttagaaaaaaattaatctcaagggttttttgtaccactataatctctaatacttactcagaattactgtgtatttacttaatttcttattatgtgccttattatgtgcttaagatacaataggttagagtttaatctaaatatcttgaaagctatattgtgggcttggtaagcattttgttttttctttctctgttttggtaaggatttaaaatttttttcattgcaattttaagtggttttcaataagtaatagtttttatcaaatttttggtgcttggtgcagagacggtgtggggaagggtgaatggttttgggaataattcagtgcacacctgtaggcctctttacattgtgactgataggggttattgcatatcaatttggggctgtagagtgcaatctcagtttcatctttttcacccatcagaatttgtctcaggattacttggtttttctcagtcctcaagcgagaacttgcttttctttgttaatgtgactttcattactgagtacccacgtatttggagtatgagaaggtgggttatttctcatactctgtccctctctttttcattgaatgtaagagtacattttaatgttgcttcagtgattgtataatgtaaaattgtttctttttaataagaaactttgctattatttcttcaattgttgatcagaattttttaaagcagaatttgtcaaaagggtcatttttttgtctaccccttttacacttttcagattctcaaagtgtctcatctcaacttttaaaagaataaagaatatcttgctgggcatggtggtgtgcgcctgtgcgcctgtagtcccagctacaggctgagcctgtaggcaggaggctacaggcaggaggatcacttgagcccaggagttcaaggctgcagtgcgctatgatcacatttgtgaatagccacttcactccagccctggaacatagtgtgaccccttctcttaaaagtaaaaattaagaaaatctcaatctctttgctgtattccagtgattaatttgaacatagggaggtttttacagaagaaattttaccaaaaaatagagactgcaagagatgatacagattgtttaaaaagcagaattcactcaccactgagcaacacttagttggtagaatagaaaggagggatactaagttaagacttttcaaatggatcagtttggctgaatagatagatatactcatgtatgtagttgtgggagtttttagttttttgtttttttacttatgaaataagttttgacctagacacaaggggtatatgaaggaggaaaaaaatttctttgcaaaatctcccaaaacttgcttttttttcccttccacacaggcactattataattttcagtgccatgttaaattggattatttcatttactttaagttaggaattactgtgtaatttattaattcatgattctcataacattcagcataagtgtagcaaagttgctaataacggaaggggatcatagtggtgttgaatgtaactttgaagtagggaatggccttttaagtctgagagagaacatttgaatccttttcagggatttgtgtaggggtgtgtttgtgtgtgtgtgtgaatgtgtgtgtgtgtagataagtgtatatacataaatacactcttctaaagttgtatatacatatgcacattacatacattttaatttattgacaaaattaaccaaattaagatttggagatgtgggatgttcttgttttaaaatagcatgtttgaaaccatcagtttgtgtctaaaattagctgtagcacatggatgttgtccatattaagctatttgctgtttgaattatagaggtctacagtatttgtgttggcatagtttttgtaaaaaaaagattaaaaaatatcaggatggtggaaaaactagatctgtgtatctctgttttggcatgcatttattcagtatcttctagcaatggtttttctctgttgatctaccgtagtatcctatttttaagtttattttatttttaaggagtattgtcatcacttttcaaggtgtcttgacttctacacaaagtatatatattcaggactttaaaaaatagcagtacacatttaacagtagcgaattacaccaaaatgatttactttgagatttgaataatttgcatagcagtaaaatgtgttttgtgtaacatacaaatagaaaaatgacccagtatcttaattgatacttactggagagtatcagaattacccagcagctcttacagaatgccataaattctttaagactaaatattgaaatcaattatttgaagtaatgtttctgatttactgttaaaagttgctgagctcagtttttggagatatcatttatgcctgcctgttcccttatgacagtgaggccttctttggctccacctagtatgataatcatgggttctgttttagttgatgagaagtggctcctatgaatgcctctgctcaatttctttttattttactttattttatttttaggggtctcgccaactcctgggctcaagtgattctcctgcttccacctccccacagtgctgggattacaggcatgagccaccacgcctggctctctgttcttttcagtgtctccgtgccatcagtcagcagtgcttacatgtttagcatattgtcatgcagtttctcttctgttcccacgagatatttttggacaaaaaattgacaaaagtacatgtgtttttccccacctatcccttagaaaacctaatgtgtactgctatttttaaaaccaaaaagagacagcgtgacgatgcgtaaagcatttttcttagcctttcctttgtcttgatctgttaatgagaacaaaactgccagactcaaaatactctactattgtgctgaaagaaatacaatttagattgcacaaaatttgaaaatataactcagctgtcttttaaaagagttgtgttgttatctacaagactattagcagtcttttttcagagcaaattttaacagctagttgtgagtggtttaaaatatagaaaattattaaaatcttagtttgaggggttttatagtgggagaaaaaacaggaccaaagtttatgtgccttcttcagtagtcttaattgaccttttcttcctatttgagactaaagtagtatcagtattctggttttcaggaaatatgtactatatagttttaaaagaatgttgtcccaccaactattcatccaagcaaagaattgtaactataaataaagtctcagttacacttttgcctttatcacataatattcattgtagagcattgtgcaggtccaagaatagagctgctcaaaatctttgtggtagtttccttagtttttgtaacctgaggcatatgttccagagaacagggatatttgtctggtccagtgaccttggtgatcatagtcataattgaaagatgcctatggcatgcttaaatcagcattgtcaactgatttgttgttgtattattttcacttcttggatctatgtagtagttgtaataacaaatatttaaatagctatttttttgatgccattaaaaaaatcatactctggccttttttcccccttactgttgtttcccagatcttttaaaaattcatcccatatccagaaagtaccagttataaagattgctgaccaagcaaagttttgcatcaaagtgtcacctcattgctctgaccaaagactgactgttgtggttttaactcctctctgtaaagcattttgcattttccccaagctcctttctgaaagaagaaccagtgcagagcggcctttactttcaatttctactgctgaatagactacttagagaaaatgtgagtttcagtgtgaacagaatggattaggatgacgagtttgatgggcattttcagtactgtatctaagaaaaaaaaaatagcacagctaggagcctctgacattgtctggtgttttacgtggtctgttcatcaaaattccccttttcagtttttaagaatgttcgtctaacagaagaaaatgctgtaaatatttgtaacaacattttttttaacaaggccaaaaaagaaaaaaaggtttttgggaacaaatgaacttataaagtggttttatataaaacatcaattgtcttgtatattttggataagcagcagtaccagctttcatttgtaacagtctgtggcattggaaaaaaaggagtctgtgattgttgaagtgaattatgttataaatgcaaagagaagataaaatattaaaaaacatattttctaaatgcgtagtgcatggttaattcaagcttctgtacactacagtatattccattttcgttcagtttgtatatttgctgactattacttgatatctctaatctcttttcctaacaaatatagcattgtagcatgccttttaataaatgtcatgacatctgtactctcttaaaatttttctgtgttcttgtctgtactttgggtttccctttgtcttacctgtaattctaatgatgtcctattttcttttcttttccatagccatccatctaaacgtgtcatggttagtgaatagtgagcacatattcaaacaatgttcaaaatgggaaaaacacaaaatctattaactgtctctgtcttcatttaggaataattctcgttttgaggagcaaagtgctttcctaatcttcctatgatgcaccttctctggcactgccccgtaa

SEQ ID NO: 134602 - DNA, 1017 bp, Homo sapiens
atttttcttgccctttatatacctgcacatgtcttctgcaaggattgagacaaaattccattgcttgacgatacatgtcagtttttgaacatctttcagggaacttccaaatcaagtctttgtcatatggcttaataattctgtttgaaatgtactctagagatttgatgattgcaagagttaatctgcttcacttgagaatgcggcccaggtagttgactccctctgatgttttcacagcccttctgttacagtggatgatctgaagaaccttttcatagaagctggatgttcagtgaaggcttttaaattctttcagtaagtctttgctttcaagaaatacattaaaattatttaatatggtatgcaaattttaaaggtagttcagtgaagtcttctggtggaggaaggagtttggaagcaaaattcattctaaatactttctgtatttcttataccattttcaggaaagatcgcaaaatggcgctcattcaattgggatctgtggaagaagcaattcaggccctcattgagcttcataaccatgaccttggagaaaatcaccacctcagagtttccttctcaaaatctacaatctgacttttctgtgaatttttctcctaaaactggaccataatttcagtaaaaccttcagacatagactgaagcagctcaagaccaattttgcctctttcacaaaaataactctgagtttgatattcaagtatattttaaaaatcaagggattttttttttttgtattccccctgcccccgccagtcaaaggtttcttttccctttttaccatggtttctacaaaaataaccttcaggaaaaagaaaatcaggaaaaaaattttttttcaataatcttattccctatattaaattagatttgaagaggattaacgttgttttagtttgggtccagatcagccttatacaacatttctaaactcatttgtacttttaaaaaatttaaacacagacttctaaaattacttgatgtaagtaattt

SEQ ID NO: 134603 - DNA, 1036 bp, Homo sapiens
aataaaatcaactgccattacagtataaataaacttattttcaatttttacttaaattgtcagacacttaactttgtgttaccctttacagcttatcacaccacatgggctttttatcctatttggtaagttcatttttgctattttattattgtctacaggtgtgaattgagcacatttcacttttttagtaatatgtattgattacttctgtgtgccaagtattgtgctgacactgaggataaaacagtgaataagacttagtaagtaattacagtgatgatttatagtatgggaaatataggttttgtaaagggagtgtaacgcagggagacctaacctagcagagggactcaatagaaatgatagttaagctgacttgttcaacatgagtaagaatcagccaggcagaaagggagggcaatgtcttcacaggggaggggagaggggagagatgggtcctggtgcatggaagtgaaggaagcccagtggtgagcataggcaagcataatggagacctggtgaaggtggacagctgcgtagggtcaaaatcgtgaagagctgttaaaagctttgttaaggaatttggtttttacctaagaacaatcggaagccattgaataattttaaggcaagagagtggtataatgcgattcaggttttaaaaatagtctccaaactttcgaacagcatagaaatatgagaacaatgaaataagcaatatttactattttaaagatttttattaaggacagtttatttttccataaaacatgattaacatctaatgagcagtatgattaatatgctttgatattactaaaaatccttgttttcattttgattcagtaatccaagggtagattatttcactacttgattttaatggttgtcatagctgaagaagataaatcataaatatatataatctaaatgcaggggtttcattgttgctgtacttcaataattatttcattatttttttcatgtaatccaccaatttttgtcatgttttatctagaaaagttagattttt

SEQ ID NO: 134604 - DNA, 1084 bp, Homo sapiens
aatctgaaatctaaaacacttctgttcctaagcattttggataagggatactcagactgtgcctcagaattaaatatgacatatatgtgcatgtctatgttttaatgaatgcctcagtacttaaaaaggaacctaaagctgagcatggtggctcttgcctgtaatcccagcacttttggaggctgaggtgggcagatcacttgaggtcaggagttcaagaccagcctggccaacatggtgaagccccttctctactaaaaatacaaaaataagccgggtgtggtggcgtgcacctgtaatcccagctactcgggaggctgaggttgcagtgagccgcggattgcttgaacccaggaggcagaggttgcagtgagccaagatcacgctactgctctccagcctgggctacagagcaagactcctactcaaaaaacaaacaaatacaaaaaaaggaacctaagccctgggaacactaaagccatgtgagtctgagttgggggcagttggtggtagtggtgggtaatatggtaaggagatcactgaaaaattttcttcacaatgttttttgagggttgaaggatagagagagggtgtggaatggggagaattcttagtaacttaagataatgctgtctgtcaatgctacacgcatggtttcccattattttagactggaatttcagatgcctttttaaggaatgcttaattatgattcttatcttgggaaacctttaaaaaattaaaaatgcttcgtatgtttattaaaaaaattcaaaagcgtagattattttaagtaaaacttgatattccccaaatagcactcttttctggccagtttagtgtgattccatacatacaagtaaatgtgacatgaagatgtagataccatgttgatatgtgtgtgcacgtgtgtgtatgtatataaacatgtaaaatacaggaaatacctttacatatttatgtgtaaccttttttcaaaatgtaacatgggtgttaattggaagcatttgaaacattgagtacggagaaggatttggtgacgcctgtaatcccagcattctgggaggccgactggggtggatcg

SEQ ID NO: 134605 - DNA, 1036 bp, Homo sapiens
atctcatctcaccaaaaaaaaaaataaaaagtatagtattgtcaaaagacaaaatcacaacacatttaaacatgatttgattggcttctatttgtgattctagaaccgagcaacacttcattctttaaaatagaatgaatattccaccgggcaagacagaacagttggtttttataaggtgggaacaaggaagtgacaattgttcaaaaagtgaatttgttaacattgggttattgcattttacttttctagtaagtgtcaaagcagtagggacttattgtgctgattcagataggccacgctctttctgattggttgctgtgaatctcctgttttcaggagaaactggtttgtttggggatttacctgctttactttgcatgagtgactccattttaatttgaactggtctgctggggtgtagtgcaggaggctagtccaaaataatgtcctctcaaaaagtctaacagtttattttaggtatagaattaatatgtggcttctttcataattcagaagagactgtaaagagtcttcatttgagaaggtaacaggttattcttaagatgaataaggaaacttgtttctgtggtgaccatgacaaaaaatataatacttgtcatgttgattttaataattgtatgtcctcttgttccaactcagaccccactggaatgaattctttagttctttgcaagtttttggctgtcctaaaaatcttttatactgtttattactgtaaagaagaggacaacaaatctaggccctaggtattttgtagtacattgtgatgtattactgtgtttcatctgcttttgataaataataggtttaagaaacacatggtaaatacatttataaataaatagattagtaagcattgggcatgaaagaggttggatgatgatgtctgagttccctatatttagtaaatcacttatttaatatcctcttaaattcacatgaggttactaagatctggagaagttaagtaacatgccttaatatttggcccttgttgtatttccacatttgt

SEQ ID NO: 134606 - DNA, 1603 bp, Homo sapiens
agataattgggtagatgaatggtaatgaatggttgtgccattcatttctattcgaatgtaggaagaacagagttggacgacacaggttcagatttgtatatattgagtttgagtttcctttggaacatccaaatggaaatgacagataggcagtgggtccctggtctcaacatcatgaaagaaatttgatagtatcatacacagttgacaactgaagccatggacatggagagtttcagagaagggagggtttctttatccagatgtttttggagttgtagggaggtggggatgaatggacctccttttccagaccaggagcttatatggtgtttgggaccatgggaacatagatgttcgggaaagtgaacaagtatagagacagaatgaaaagaactggatctaccaagctcattctagcttattttaatgtaactattaataataattctttttaaaaatgaaagcgttaaagcatacaggatactagaacaatggtacgaaattgtgacagcctcaggcaaactaggacttaacagtcattctatttaggtgttgttattaaaaagttaacatctgattctgtcacctaacactaaaattctgtttaggtgttgttttaaaaaattctcttagcttaatgtgggcatgtctttttccatgtcagctttaaattatttcatcgaattcaggggcgtccaatcttttagcttccctgacccacattggaagaattctcttgggccacacataaaatacgctaacattaatgatagctgatgagctaaaaaaccattgcaaaacagtctcacaacgttttaagaaagtttacgaatttgttttgggccgcattcaaagctgtcctgggctgcatgctgtgcacaggctgcatgttggacaagcttgatctagttctaaaacaaagaatccttcttccccgaacctttacctacaatatcttagggattctgataagaattatgttagagttatatgttaatgtgaaatgttgatcattttttggtattatctttccatttgggattatgacctatgattccatgtttttaggttctattttatgtcctttgacaattttgaaaaagttccacacttttccatataaatcacatagttttcttttaaaatgtatcttaggaattaatggcagagattgtttattgtgtaccccaatgctattcttttttttttttttttttttttaccaacagaacctcaatttttatctgacacattgctacccagatgaaactgctactcttctgttcttcattatagctagatgtggtcatgtaattaagtcttgacaaggtataagtggaagtgtaatatgaaacttttagggcatctctacatgggtacactgtttttccttttttttttttcctccaatcttattgcctgtgggtgttccagcttcttagataatgatgggaatgacaggcatctgtaacagagacagctagagcctgataacattgtcaccattccagatctggaattcctacatttagacttttcatgtgagcaagagattaacttcttttttttttttttttcttttgagactgagtattgctct

SEQ ID NO: 134607 - DNA, 1053 bp, Homo sapiens
gattaatggataaaaagttattgattataaagaatttggccagtatggaaatgaagtatattttctacttaaaaaaatacgttggtattgaaaagtcaggattcttagggaggactgtacaaactatttgcatacaaatatatgctacaaaaacaatgtcataatgcaaccccctaaatatggtttggcactttcagatgttatgttttggaaacctgcgtttggttagaaagaatttaaagattatgtccccatttctgtggtggcagttgtgtttatatagttgtggatttgcagtaattttttcttgctatgcagttcatttgattttgtgattcttgaggagttccccctttaatgtcttcatacaaagatgaagtaatattattagcttttaatacttttagtaaatatggaccattatctaaaacttggtttattaaccaaacattggttttgcttttcagcggggatctgatgagcttctttcttctggcatcattaacggaccttttaccatgaatagttctactccttctacaggtgtgtatggtgagttttttttttttttttaatatttgatttctgtgggtttcaaattgtttttttacaatgctcttattttgcttatatcatgttgaagtgccactgttcataacaaaagctaaaatttgtttcggtaaagtactatatactgtttacataggtgaaatcactagttatacctctcaaattttaaggattcatttggatctaatttgatgattcagttttttgattgatgttctttgtgttacataattttgataaaaatactgtcaataaattggtgacccagaactattgagtaaaagagctagatctaaaacttgggttgaagtcaggtgtggtggctcatgcctgtaatccccagcactttgggaggccgaggctggctgatcacctgaggtcaggagttcaagaccagcctggccaacatggcgaaaccccgtctctactaaaaatacaaaaattagctgggtgtgatggcgggaacctgtaatcccagctact

SEQ ID NO: 134608 - DNA, 1054 bp, Homo sapiens
tgcccggcctcccaaagtgctgggattacaggcgtgagccactgtgcccggccttcttcatgtaatttttatattttgaaatgcttattgggaaactgagacgtatttgctatttttttttttttctttgaaggcaggctctacctctgtcattgcccgggctggagtacagtggcacaatcatggctcactgcattctccacctctaaggcccaagtgatcctcctacctcagcctcctgagtagctaggaccacacccagctaatgtttaagtttttttgtagagacgaaggcctcaccatgttgtccaggctggtgttgaacccctggcctcaagtgattctcctgcctcagcctcctaaagtgctaggattacaggtgtgagccaccacacccaagcataattgctgtctttaattttgaattcttttaaatgaagaaccaactagatgataatgagtgataactgtacatgttttaagaactttattataccagataaatcaaagtgtcagactgtggataacatagcattttgtgtgtgtacagcttatactttaattattaactggctggcttattttaaacttgaatattcctcataatcctggttattttttcaaaatactgtagtagcgattagagtatgattttaagaaaatgacagtcttacatatcaaatatgttttagactttttctgggttttcctattttaagtgagtagatgagtatgaaaaactcacatatatgggaaggacttctagtgattatcatgcctgtcagtatatagaagagaacaatatagcatatttaaattaattttgaggattagttttctgtttgcttgaccaagggttggcaaactatggctatgggccacatttggcttgccacctgtttttgtagttttactgaaacacagctgtgctcattcatattgtccgtagctcctttcacactacaaaggcagtcgtagttgtagtggagactgcaaagcctaaaatacttactctctggccctttacagaaaacgtttgcctgctgctgtgctt

SEQ ID NO: 134609 - DNA, 1067 bp, Homo sapiens
tctttgaaaattttgatgtctgaaatgtgatgtttgtatttattttagttctgagagactgtcttaactatattttggtgagcaattttgggtggtaaatgcagatttgcaagatgccttctatttctgtaaaatccaagcactggttttgtttcatttaaaacctcagacacgattattcatgccagtgacttaaaagaacaaactttggtgattttaagttttggtttggctttgttaaatagaggtaaatggataaacactcatttttattgaagtttgactatactttcctaaatactaaaagataacaggatttgtttcttgcattggtagtaaggatttgcttttgcactctgctgttgctagactgtctcatcatttttctttgtattaatatttcacaactcatcacattcttatttttattatttgttattataatgctttttcccctttattcttactatctctgtcttttaaaaacttgttctctaactttgttttccattttctctttttactttttccatacagtgttgttacagatcttataacagtcggtttaaaggtaggaatcttttactatcctttcatatgcatttttatatcttttggcatattttcagtctcacctgttcataaaattatctgctttattgtgtaaaagtctttaatttttacttagctccaaaataagtagacctgaggtaactttggattttacgtatttataaggaggaactatagtattatgtgtataaaatgtgaacaaaaaatttagcccaaagtttcacttaaattatcaggatgctttttgtttgctttgttttagcagttaaatgtagcctaggcttaggccgggtgcggtggctcacacctgtaatcccagcagtttgggaggctgagaggtgggcgggttgcttgagcccaggagtttgagaccagcctgggcaacatagtgaaaccctatctctattaaaaataaaaataaaaaaattagccgggcatggtggtgcgtgcctgtagttccagctacttgggaggctgaggtgggagaatcacct

SEQ ID NO: 134610 - DNA, 1039 bp, Homo sapiens
gtatctgtacctacggattaaaaaaaaatctccaactcggtttattcccattatgtatttgaggttttttttagcttgttacctacttttgatgacaagatttctgtgaggttgtggaatatatgcaacttgctagaacagtaaaagtcgttcacatgttgccatacagttgatgatatgctatttgaagatgaaatcttccaacagcttttgacctcattagatttcatttattttagtttcacaatattaagtgtatatgacatttcggattgattcatttgaatgcagattgcacactgctacagacatcaaagtggagttttagattttattcatgattgtgatgttctttatttttatttgattgaagcttcaaaaaatttcttaaaattataacttttttgggtacacagtaggtgtatatattttgggggggaattgaagctgtttttattgtttgattgaagtttcttcgagaacattgttgaaaacttatttcacattaccttattcagttgcattttatatgttgaaaaattttgtggtcgtaaagatttgtgtcactaatattttggttcaggcaggctgtgaatttagcatttcattatgtgtagttaattgtctggaaggtttgacttaaataatggaagcaggctatttttttgtgtcgtaaaatgtatagttataataaagaggactcttgaattttgcgtctttgctgttaaactgtaggataactgtgaagtgcaaacttactttttgatagtgtttaagaagtttactctcccttcacgctatttgtggttttaaaggtagtaatgggtttattggtttgaatatgcaaggcagttatacagatactgactggaaggtaagttcatttggaagttcaagtcggagcatgatttgccctttgtatcagaaccaataaccatagtgttacaccattttattttttatgcagcaagcgtccagttacttatcacatttaaattttagacaaatgaatttcaagtttcagaagtttacaaggaaa

SEQ ID NO: 134611 - DNA, 1001 bp, Homo sapiens
gctctggcaattggctatatctccactgtgctagtgacaatcatgcaggtgctattttgaaatagctaccagtcttgcattggtagtggttagtcatattatctaaaggaagtatagccatgcattgcttaatgatggggatatgttctgagaaaggcattattaggtgattttatgatcgtatgaacatagagtatacttacacaaacatagatagtctagctgaccacatacctaggctgtatggcatagcctattgcttccaggctgtaaagctgtataacatgttactgtactgactactgtaggcgtttgtaacacaacagtaagtatgtatctgaacaaacttagacagaaaagagataaaataaaaaaacagtattgtaatcttaagggaccatgttgcgtatatgggccattgttgattgaaatgttaggtgtggtacatgactgtatttgtgaatcaactgagggttcaagagagtaaacgctttttttgtgtgtgataaaaagtctttcattaaaatgaaattgattattttgaaaacaggaattgatattctggtaaataatgccagtgccattagtttgaccaatacattggacacacctaccaagagattggatctgatgatgaacgtgaacaccagaggcacctaccttgcgtaagtttgcaagaagagttgttggggaggaagttgcggtgtttctcagggaacttacatagttgtaaacagatttgagccaaattaacagtgtagttcaaaatctagtcaatccttataagggtctaaaagtccttcattcagtcaatagtattttattttattttttatttatttatttttttgagatggagtttcattcttgttgcccaggctggagtgcagtggcacgatctcagctcactgcaacctttgcctcctaggttcaagcgattctcctgcctcagcctcctgagtagctgggattacaggcgcccaccaccatgcccagttgat

SEQ ID NO: 134612 - DNA, 1045 bp, Homo sapiens
gcaggaactgaggcacagattttggtggctgtgaccaggatgacagcagtaaaggtggtggacagtggccagattctgatatattttcaaggtagaaccaacagtatctgctgatggattgcctttgggatgtgagagaaagagtcaacagtgactccaagatttctggaaaatagcctggtgcggtggctcgcatctgtaatcccagcactttggggaggcccaggtgggtgaatcacctgaggtcaagagttcgagaccagcctggccaacatggtgaaaccccatctgtactaaaaacaaaaaattagcctggcatggtgacgcgtgcctgtagtcccatccactcaggaggctgaggcagaagaattgcttgaacccgggaggtggaggttacagtgagccgagatcacgccagtgcactccagcctgggtgacagagtgagattccaactcaaaaaaaaaaaaaaaaaaaaatttaaaaaaaataaagatttctggcttgagttactagaacagtggagtcgccaggaactgagatggagaaagctgcagatagagcagatggagggcaagcttaggaattgtgtggggtgttgtgtttgaacatccaagtggggacagtcattaggcagcaggcctggtgaatgagggtcaggagagcggtccaggttggagataaaaaaatctgtgggttatcagcatatagaacatataaaaagccacaaaactacatgataccatctaggcagtgagtagaagagaaaggactattgtccatttcaacattgaaaggttgggaagaagaggaagacccacataggagagtaaggtaggaagatgaaaggaagatgaaagaggagatgaaagccgactgaagaaggagcttggggagtgatacagtttggatgttgtctccacccaaatctcatgtcaaaatgtcacccccagtgttggaggtggggtctggtgggaggtgattggatcatgggggcagctttctcctgaacggtttagcaccatcctccttggtactgccctcacc

SEQ ID NO: 134613 - DNA, 1075 bp, Homo sapiens
gtgttttccacccagttctctccgtagaacatttggtaaatcctggggccaggcgtggtggctcatgcctgtaatcccagcactttgggaggctgaggcggacggatcacaaggtcaggagttcgagaccagccaacatggtgaaaccccgtttctattaaaaatacaaaaaaattgccagcagtggtggcgcacgcctgtaatcccagctactcagaaggctgggttcaatcacttgaacccaggaggcagaggttgcggtgagcggagatcacgccattgcaccccagcctgggtgacagtgcaagactgtctcaaaaacaaaaataaaaacaaaaaaacaaaaaaaatttggcaaatcccttaagcaatctggactttgttttcatcagctaagaaatgaaaggattagccttgataattgtgaagggtggtgcttgcttgttacttccatagttttattatttgatttggagttatgagtgtatgtgtgtgtgtgttttctctacagccatacacactgctgctatggatatgctgggaggacctggtatcgaaagccagtgtagaaaagttgatatcattgcagatgcagcatattccattttccaaaagccaaaaagttttactggcaactttgtcattgatgaaaatatcttaaaagaagaaggaatagaaaattttgacgtttatgcaattaaaccaggtaatgcttttatagtttttaaaagtagtgatacgtttttccatattttctgcaatgaacatatctgttttttgtgtgtgtttgtgtgattgtaaaatgaatgtgttcttttaaaagctgtcttcccaatgaaggaagaaaacccataccaacacaacttaaaaaaaaagatgaatgaaaaatagaggtgagttgagggcttttgaagtgatatatatatatatatatataagcacagaaagtcagatcagttactagccacttctaaatctcgaaataagaaatgaaaattattttttaaagttggtcttaaaatcacagagtaaagattttgttcaagaatatgtggtaacagatggtacagtagtg

SEQ ID NO: 134614 - DNA, 1008 bp, Homo sapiens
tagccatacataggagttatatttatttgcgctaaagtatattttaaatattattcattaaactgagcttctaaatgacacaaaccacgtttatatttgtatcatccctgctcatctctgcagttcaaactaaagtaaatagcggattatagttttacaaagcactcttatatgcattatctatttagcctgcataacaattctgtacggaaagtaatgcttagtgattaagaacacgaaatttgggagaagacaacccagcttcatattgcagctctgctgctcactgctatgcagctttgagcatgtcacccagtttgtctgtctcagcctcaatttccatattggtaaacttaagagaatgatacatttcatacaagatttttgtaaaggctaaatgtgataatgtataatgtgtttggcacagtgcccagcatatagtacactcagaatatttagtagttaatatttacaagtggaaaaacaggctcagagagattgagcctttgcctaagagcagatggctaataggtggcagaacctgaccagattcaggtcttccgggtcctggtacccaggaatataattattaccttaggttttaaagacacagtgtaattgtgcgcaagttttaaaattttatttaaattaaaaatcctattaagtattgagaacttaaaatgaccagatactatgatattaggatataacaaagatgaattcattcctgccctccagaagtttgcttaaacttctgaaaaagagagagagagaggcaggagaccgaggcaggaggctcatttgagcccagaagtttgagaccagcctgggcaaaacagcaagaccccatgtcaaaaaaaaaaagagagaaaagaaaaagagaacaattgagattgttaacatctcactgtactacagttttgaaggctttgtggcctttaaatcttctagtgtgcacatgtcttggagttatcagtgtaattaaaacagttaacctatttgctaacc

SEQ ID NO: 134615 - DNA, 1048 bp, Homo sapiens
tttctccatgttgcccaggctggtctcgaactcctgggctcaagtgatccacccgccttggcctcccaaagtgctggaattacatgcatgagccgccacgcccagccttggcctcacaaagtactcagattatagaaggtttgtttatgataaatatttatagtttagtagtattttttaacctaatctgaaagtcagccttttatttggagagtataaagatttacatttatagtcataattgatgtgtgtttgactgttattctgtcaatttgatttatgcttttagatgccacttaatgcatttaaagtcattttggtcaaataggtctaattggtggcaagtctgtcctgctgattaattaattctgtgtggggtccttcactgccaagcattaaggtcatttgcttcaataatatcttataggtgctgttccagaattcaaagaagagaaactgcagctgcaaccaaaaccacgttctggagctgtggaagaaacatttagaattgttaaggactctctcagtgatgatgttgttaaagccactcaagcaatctatctgtttgaactctccggtaaggactgcatctggtaatctgaagtttttatgaaacaaaatggggtgtttcctttggaagaaaatcagcgtccaacagtgatcccctggatagttggctgcattcaagacccttactcttgaatgtagacattcaagaacagcaaccataactattgatttgtttttgttgttgttgtgtctttgagatggagtctttgtcacccaggctggagagcaatggcatgatcatggctcacttcggccttgacctcctggactcaagtaatcctctgacctcagcctcccaatgatttttatttctagattaagatcagtgcgtacggacacatgtaaagtaaaattttattacaaatactcccagtgttatataactctggcatatttgagagaaaatcctgcttagaagggcatatggatcatgacaggtagtatgatacagtaatttatcaaccataggcaccttgcc

SEQ ID NO: 134616 - DNA, 1682 bp, Homo sapiens
agtctttttttttctttaaggttttagattgggactttaaaaaaaatgaacgtggctgtgatttttacaattatatgtatttagtgtgtgtgcgtgtgtgtgtgtgtgtgtgtgtgtgtgttttgaagtttaggagtaaagttttgttttttcccgaactcgttaggattcgcaagacggaatcctctcccgacgaaataaacagctaacaagccagtcaggtagtgacagcttccatggtggaggttaaattggagtgcaataaacaatgatctagctttcccttcaggctgaagcctttatttctgctgatttaagatatgagatctttccctacccatgagaccatgaatgtcagaattgagtttcccctctaggattgtgcctttactattttattccacgtatataacccaacgattgggttgtgcatggatatggatacagtgttttgaaaaatactgtagggtgatgtttctgaattgtcttatttgattagctagctaagtttcttcatgaacggttgctgtgtattgtagatactcaaataataaatgaggttgaataagcacccagaaaattaattttacagattcagatttttaatacgcaggtatggatttatgcctgtatcaatctcaatctactgctccgttctggaaactcttttttgcccaccctgtgagaatttatattgacaaagttaagtctgacagttacccaggagattaaaaaaacgaagaagcagttttgggggccatgcatacaattatatggacagtcatatgtaaaaaatagaggttttcctaaaaaaacaaaaagcattatcatctaaacttgaaggaaaaacgtggaaaattatgtatttaaattttcattaaggtttgaaaattagtaaacagtgtacaatttaatgcacttttttaaagacaaactgatttttgtcattataaaaagtttagtatgcttaaaatagtgcttttttctaggagaaaaatttatctagattcttgtcccagttaaacagattaatattattgcatgcctaattttgtaaatgcctggagcgtagatttgtacacacattacttaaaacctagcagtgatcaagccaatcctttttagttgataaaattttactagtttctgctttgacttccagtctgcattaggtaaatgaatttaaattctgcacagaagcacagctcagtatgtggctctggtaggcccttgactagcgttccttgtccctctccattcctagtaatagcccaaagagaagaggtattgaaatttgatcaggctttatcgtgaatccaggaatggagttctagaccactctcagaatttcagcacttagatatacgtactcttccttagctctttaaaatatttaaaaaagataagctaacgattgaattgcttgtttatatatttacaaggctgtcagtggtagtgataagatttaacaaagagtcactgtgtagctaagcatcgagtgtggcctgtactgagaattgttttggcaaagttgtagttgtgcctgttttctgagatcatcaatgtagtctttatgtgggctggctgaaagataacacctagttttgtttatgtttttgtgtttttttttttttgactgataggtagataagaattttttgttttttgtgtaattagcaata

SEQ ID NO: 134617 - DNA, 1009 bp, Homo sapiens
tggacagtgacctctcattccagcttttatcatcatcctgcattgtttaacaacagcaccaacaccatgctgcttgctgaaaatgcagatttcattcttggattaatattctggtaccagatgtatgaggctggctctaaagaagctttttctcttaagtactgtcaaaaatagagaagctgaagattggagagaagccatttattttgaacagtttattttctgacagtttgtgtttgtaaagaaacctgctcataatatttacttaagagatctacatagttgcctgaggaagccccacaggtttctttttttcctttaaaaaaagtttccattgagcttaactcttacgtgatacttcttgactttgcttctgattagttgatttatggactttatttactagcatgattggagaattcttttgctagactgaaattgcactctgcctgtgctctggtccgtttcctaggtaacaaatgcactgcatagattccataatgaggactgtggttggctagttactgtgtaaattctgttgtttggtaaagcttagtctcaaattcaaataaaggtcaagaaacgaaaagtactgaaaatgcaaatttttgaattttattttgtatccaatgccaacaaagtttaataggcttttctggagaaaggcaaattatgcagccgtattcaagtttgttttgcaaagtcttacacttaaacagttggagagctttttcaccgttagtgttcatagtggtaatgctaatggctctagtgacaaagaagatgtatttcagaaacatgttattacacttgaaaataatatggaaagcaaagaatcttggtctaggacaacagtgatattcttatactgaaaggaagtaacattatgtatcaaaagaaattatacaactttgatgtgagatataacattatgttttttagagacacagtcgcactctgtcacccacgctggaatacagtggtgcaaccatagcttactgcctcttca

SEQ ID NO: 134618 - DNA, 1034 bp, Homo sapiens
ggtacctatctattaagtttagtgttctttttagttttcacttcctttctgagttttttctttcctgttctgtcatgaactttgtcatttcttattgtacatcctcttgttatctggcaagattcattttttagtttttcaatttctgatgtatgctgttcttccatagcttctatcatttaaaaattttttccccttttttcatttttttttctttttgagacagggcctttctctgtcattcaaggctcaagggattcacccacctcagcttcccaagtagctaggactgtggatgtgtgccaccactaccagctgaattttttttttttaaagacaggtttcactttgttgcccaggctggtcttgaattcttgggcttgtgatcctcctgccttggtctcccaaagtgctgagattacaggcatgaggcactgtgcctggctattttcttaattcctcttattccttttgaaatatgttacagttctcatctttttttcttactgtgctttttaattgttctctcttggtcatatttaaattagatggacttacctgtacttttggagaaggtttctgtgatggagatggaaattgataaatacagttttcctggttttatagtttgaagatttcctcctttgttgcttatctgaagtattttaaaaatatggccactcaattaaaataaaaatgaggtaccattgtacactcactagaatggctaaatgagaaagatgaaaaataccaagtatgaggatgtaggatagctgaaattctcctgcactgctattcaaagtgtaaattggaatggaaatgtaaagtggtacagcaatttggaaagctgtatggccatatctactaaaactggacatatgctgcaaatcctgtgactcattagttctactgtaagatccatactcacccaaatatatggactagaatgctcatagcacatttgtcattgctccaaactgaaatctgttgaaatggccatcagtcattgttgttcccttccgcagtgagtctga

SEQ ID NO: 134619 - DNA, 1035 bp, Homo sapiens
atctttgcacaagatcctggagttggagaccttgtaagatcagttataagtaaggtaagggagaaaggaaaggtgaaactgtttgggagaagctggtgtggtatttttatagtgggcagatctgtcagtgggacgtctctgattgtgtgcaaaaaggcctggatggtaattcctacttcctagggtggttgtgaagattaagtgaatcagatgtcatagtgagcatgaactgcttccccacagcaccctgcatatagtcaactctcagtagatacctgcttgaaaagcgaaagcaaaaatctctgggagcccaattcttccagatatttaagcagtcttgattcccacacatcctctcaatcttcagcatgtttaaaatttctctttacactgatcctggcacctgtgctttcagatctgcctttgcatcttaagaaatctctgcttgagcctgccactcctggtccctgtttccctcttttcttttacgggtttctcagataaatgggttacatatactgtctcttctgttttcattaaatcgctttaattccaaagaattctgctgcttatacctctcttctactcaaattctccatgtagctaaacatagaaaatggacacataaacaacaaaatgtactgtcaggtgataataaatgccatggagaaaagcagttcggtgtagggggcatagggagtgccaggcatgtgtaggggaggtttgctaatttttgtacagtagtctcagagagcttttctaataaggagacacttatgcagatctaaaggttgtgaagaagcaaattgtgtaactatatggggagaacagcattccaggcagccagtataaaatccctgaggtggggacaatgttggtgcatttgcaaaaaagcaaggaagatttttacagatagaacagagtgatcaagcaggggatggtgtgtcaagagaggtaggcaggtagaggtagatgtggcactgagagcatgtggaaattatctgctgcttgcttctgtttcctcagcaagaggga

SEQ ID NO: 134620 - DNA, 1416 bp, Homo sapiens
tgcaacctccgcctcccaggttcaagcaattcccctgcctcagcctcccgagtagctgggattacaggcatgtgccaccatgcccagctaattttctatttttagtagagacgaggtttctccttgttggtcaggctggtctcgaactcccgacctcaggtgattcacccgcctcggcctcccaaagtgctgggattataggcgtgagccaccgtgcccagccacttaaagaactttttcctaagaaactgtagaccacctttgctatcctctagtatttcatgcttcagataagggatcttactcttttttagtgctttatgcctaatactccagcaatagtcacccaggtttcaccttgtcctgtttaatatctcttccacctctaagtagctctgggcctgctttcctttcacctgagtcacattttatatctgtccagtcactgtgctgtatagatctacctggtgtatacgcctagcctgggtctttgttggggccatgattctctcctccttggtttcattccaaggatgtgattggcttgatatatgtgatcattctcattgcttgctttgaccttgggtcctgaccctcattgacccagttgggaccaattaccttactttcacttaccatatctacttatttatggctccatccttggttatagtcaaaaagctcagcccctttacccagccctgagactaaagctgggcaagatgaatgttctaaagtcctagttgagaaggtctcagctcagtccccagtgggtccttggaacagcccaggataccagagcaggtgctcattcccattgtgtcgaccctaacatctgacatctacctcttgggttacagcaggtgaagtagaaatttgaatccacatggcccagattgcttttagaatggatagtgggagtactctcaagttaacaggtgtaggtagcttgaattatcaagatacagggctatgcgatgacaactgggcaatgtcatttctacccacagcacagctagataccatcatagcactcatcctcacagccacccctcagaaatggatttcttgtttgcacttatgattccttatttgagaagtggtattacattcaaatgctagggattgagggtggttccattaggatgctgagatttttcagttacctggaaattggttgtgttcattttaaagtactaaccagccagcctgggcaacatggtgaaacccttcctctacaaaaaaatacaaaaattagccgggcgtggtgatgtacacctgtagtcccagctacttgtggggctgaggtgaaaggattgcttgaacctgggaggtcaaggctgcagtgaaccgagatcgtgccactgcactccagcctgagtgacaaagtgtcttattaaataaataaataaataa

SEQ ID NO: 134621 - DNA, 1082 bp, Homo sapiens
catcctctcaggaccataaacactagaaatacattctctcctggaatctatagcacttgacctgcctataagcatacaaatcttgggaaaatgagaatatcctgcagttttcatttattcataatggtatgttcccagtaatggggaagtagactgattctggggaccaccagtggtctgttcattgcttgaataattttgctattcctaatgatgccattactcctgctttatcggtgtttattgctgcaattattcatatataaaaataattttgtctagtacctattatatgaagggaaatctattacttagttcttttttatgtaattttctagtcctcatagaatttcataattttactttctctgaatgagaaaagccacattgtgtccttgattattgttactgttttgcatacttattacattgcataaccaaaatatgaacagacccgcaatttactgaatctgggtgagcatagaagaggaggaataggacaaagggattcaggggcttttagggttcttggaagtgaaagaagttggaaagcttcatttatattctttcttcttcttcttcttcttcttcttcttcttcttcttcttcttcttcttcttcttcttcttcttcttcttcttcttcttctttttttttttaaagagatggggtctcactttcttggccaggctaggctcaaaatcctgggctcaagtgatcctcccatctcagcctcccaaagtgctgggattacaagcatgaaccaccatacccggcctttatgttctttattctgatatatttccattgatgaattctcccattccaatcattgactgtcagtggtcttagtgtctctcttagtccgtttgtgctgctataacagaataccttgaaactgggtaatttttttttttcttgagacagattcttgctctgttgcccagactgaagtgcagtggcactgtctcggcacactgcactctccacctcctgggttcaagcaattcccatgcctcagcctctcaagtagctgggattacaggtgtgcaccaccacgcccagctaatttttgtattttt

SEQ ID NO: 134622 - DNA, 1065 bp, Homo sapiens
accattctcctgcctcagcctcctgagtagctgggactataggcgcccgccaccacgcccagctaattttttgtttttttagtggagacagggtttcaccgtgttagccaggatggtctcgatctcctgacctcgtgatccacccgccttggcctcccaaagtgctgggattacaggcgtgagccaccacatccggcctagactccactttcttgagaaggcaatattgacataaattatttggcattcttctgtagagtggtctgttctctcccatttatttatttatatcaatatgaattcttatttattttatactttggattagaacccatactactttgttgctcaaattgctctagctttagctgctgggagctctttgaactgactcctgtgtccctttgttgtgctcccatcagttcgttttctgaacattttcttattttctggtactattaggtgctcaagtatctatttttgaaaatataaataattttgcctctgattttctacagaatttgaaaatactttgatgtgcttatatgagtttggactgttgaacagattacattttttcattattggattggttttattttttgtagtgatttatatagctacttctcataggtgaaaatatatagggttacagattttctctgaatgaatattgtatttatgaccacagttttatactttcaattttttaaaatataacttttacttcgcaaatcatattagagaatttttacatttctctggctttcagagacatttatggttgccagtagctgaacggatatcattatgctggaagtgtttcagtgattatatattctgagtggtaagattgcttagtctaaaaaaaggactccacaatatttggcttttggttgtaattaccagtcatgcttgccagaaattaagtttagcttttagaagcctagaattcttaatatgtttgtctctaactaaatatttcagagactgttatgaaactgtcagtaattccattatatattttatgttcagcttattctgagttacagctgatgaaatgac

SEQ ID NO: 134623 - DNA, 1031 bp, Homo sapiens
tataaaaagatgttcatgaaggcacttacattagttaataattagaacaggctgggtgcggtggctcacgtctgtaatcccaacactttgggaggccgaggcgggcggatcacgaggtcaggagtttgagaccagcctgactaacatggtgaaaccccatctctactaaaaatacaaaaatcagccgggcatggtggtgtgcgcctgtaatcccagctactcatgagactgaggcaggagaatcgcttgaacccgggaggcagaggttgcagtgagctgagatcgtgccactgcactccagcctgggcgacagaatgagtgagactccatctcaataataataataataattagaatagagctaaacaaaatgtccaaaagtaaaggattggttaattataatatatccatcattaaaaattatgtagaaccatggttctcaaatgcacattcttatattggctacaaacactagataaaaacacagattcccaaacccaacctcttggtcggtgactcagaatctctgtggtttagctaagaaacaggtcctgtattttctaacaagaatcctaggtgattccactgcacagcctgatttggaagaaccctgggcagtttcattgcacagcctgatttggaagaaccctagatgatttcactgtacagcctgatttggagccactgttacagtgtgtgcattggctcctagtcagctgagcccaggggtcttaaaaccaaatgaaatgacaactaagaaaaaagagttaaaatctgtgaggactctggaaaacaagaaaggaggacttcagaagaactaaaaacaaaaatactgcaagaagggaaaaagattgaatcagattctgacgacacagaaaggtaattagtgctgagcacctaacacaagtcaaagaaaagtcttctcccctaactttatcctcccagaaaaattagtgggtgagttcttccaaaaggaacatagactgtccccaaactggagcagcaaggcctggtttggaggtggtaggcgt

SEQ ID NO: 134624 - DNA, 1072 bp, Homo sapiens
cttcttttgattatttccctttaggagtgacactgctgatcctgtaacatggaggattgtcttcatacctcatctgagaatctgtccaaattggtcagctgggcccatagccatgggactatttgcagcctcattccaaacctgaaacacttgctttctgaaggttcccatgggaacctgacagcaatgtggggctgtagtgctggccatgcttatcactggccactaacagctacttgcagagctgggtcccaagagagggtctgtttccaggataacagaagttttaactctgatagtcccagtataatcggggtgccctctgagacacagactagccctgttgaaaggtaccctgggagaccagtgaaagcaaagctagactgtaaccggaccagagactcttgtgacttctcctactgtagtgagccctctgaactggatgaaactgttgaagaatatgaagatgagaacaccctgtttgacatggtttgtgagtcttctgttacagatgaggatagtgactttgaaccccaaacccaaaggcctcaaagcattgctcgcaaaagacctggggtagtcccatcttccctccattcaagctcccagacgcagatggttgacgaatgcagcaatgatgtcatcatcaagaaaatcaaacaagaaatccccgaagattattacattgtggcaaatgcagaactgacaggaggagtagatggaccagccctgtccttgacacagatggcaaaacccaagcctcagactcacgctggtccctcctgtgtagggtctgctaaactgattccccatgtcacatctgccatcagcacggagctagacccacacggtatgtctgcatccccctctgtgatctccagaccaattgtccagaagactgctagggtatctctggcttcaccaaacagaggaccccctggtacacatggcaccaaccaacaggtggccatgcaaatgcctgtgagcacatcccatcctaacaaacagatcagtatccccttgtctgccctgcagctgcctggacaggatgagcaagttgcctctgaagagt

SEQ ID NO: 134625 - DNA, 1026 bp, Homo sapiens
tagtcatagaaagatagaaacaatgactgtgttacatccaggtgatactatacaggaaattcataagaattatggccatatctagttgacgtaccttagggctgagaggacagctgtaagattgttctgttgatattgcagcgttagatttaaggttgatacctgtcagctgaatttttatatagtaaagttatttttgaaagttttaaaaatatgcttctccatcagtagcaaggtgtttagttgctgtttgaagccaaaataatgttgggtaaggcatatcatgacaatagacctaatgcttttcgtattatttatttgactgagccaacttgacgttgctattcattttagttgctctggtagttaataagtattttaaaaagcaatgtacatttctaaaagaggtatttgatcttttctcttaaaatttaaaagaatatggaaacttgcatttctggaatctgtgagccaatgggaatggattgagaggagaatgaaataattgtacgaggcccctgcacctgtaattctaacgttctaatgttctttaattctgacattcaatgtttatttaatctgggccattagtatataaaggggttggatctcatgctttggcttcatgactcaattctagtaggctagaatagaaacgtggacaaggatgaacaaatgtgcagaaatctgtggcatgttttagtttatttcagcccttctcaaaaacgtcgtgtattttgggaaaagcttcctagaaacctgaggcccctgtgccttcatcctgaaacgtccttggattaagttgctttacaaacttcttttttccaattttagtatcaactttaagattcccaaagaagacctttcatttatgatttttttgaagacatagtcatggtgttattaagaagatattcactgaaaatatttatatcctgattgaagattatgcttttcagtttattcacttttatctttttttaaataatagttttattgagatacagttcacatataaaattcact

SEQ ID NO: 134626 - DNA, 1126 bp, Homo sapiens
ctgtaatcccaacactttgggaggccaaggcgagtggatcacctgaggtcaggagttcaagaccagcctggccaacatggtgaaaccccatctcttctgaaaatacaaaaattagcccagcgtggtggcaggcgcctgtagtcccagctattcggcaggctgaggcaggagaattgcctgaaccccagaggcagaggttacagtgagccaagattgtgccactgcactccagcctgggctccagagcgagactccatctcaaaaaaaaaaaacacaaagaaagaaacaagactaaaatttattttcttagccatttcttaaccttttcctgtagtttcctgaaggaagagctgagttataatttttgaaaaataagagagacaaagtaaaaattcagctttttatttttgccatcattttcttccttatcacaaaccgggtacacatctgaagattgatatggcaggcagctctgggctgagagagtggagcctggccacccggagcttagagtctgatgtgtttatttatttttatttttttctcagatctcttagagatgaatagaatcagatgtatttgagtttattccttactctgcctcctgctggccttgtgaccttagctacgtcatttcacttctctgaaactcagttccctcatttgtaaagtaatgataatgtctgcctgtcagggttattgtgaggaccaaatgcaaaaatataggtaaagcactaaagagagtacctgacatatgataaacattcaataaatggataatagccgcctttattaatatttttattttcatcatcatcatcattagattgtgctcaatactctgtgagaagtgaagtagattctggtttcatgtagttacacccatttgtctactaaaatatggtccgtggaccagtatcaccaccagcattacctgggagcacattagaaatgcagagtttcaggaggccgcgaggaaagaccaaaaatgctgtgtctgcccagcctcccccaagccctcagtgcccagggccagatctgggtgcaggagcggagattaataggaaagtctagagccttatttccctcactcatccaggaagtgaaccttggaactgatctttgg

SEQ ID NO: 134627 - DNA, 1033 bp, Homo sapiens
cactaaatagtttatggtagttactcctgaagagtaggaattgaaagagttttgaggtgggatactttttattctatgtacttttttttggttttaatttttgtaatgatgtgtattgccttttaaaattaaatttaaattaaaaacaaaatctttttacatgacagaaagcaaaggggctcacacatcccttttttgcaccactcaatgttattgtcagggttccagctctgccacgtagtggaactaaactgcaggttctgaatatacatcagtaacccccttgaatgtgaaattcatgcagcttggcccataaccagttcccggccacgaactaaaaggccacggagggggtcagtgaaagctgaaaattgtcttatacaaggtgatggcagatttaacagcagctggaccacatgcccaccttttaggggggcttagattactggtctaaaaactaacaacatttgaaagaattgttccataattggggtggataaagagtttatgtctgaccagggatggaggggtgcagtgggactatatttgtttttttgtttttgttttgttttgttttttgagacagggtcttcctctatcacccaggctggtcttgaactcctggcttcaagcagtcctcccaccttggcctctgaaagtgctgagtacaggtgtgagccactgagcccagcctatatttgtagagttagtaagtaaaacaagttgtcaagatccagagatgggcagaaactaagggcttcagataattcttgtgacagaataccctcctcaagcaccaactgcaagggagacttgtctgttttttgttttgttttgttttgttttgttttgttttgttttttagacagcagagtcttgctctgtcacccaggctggagtccagtggcatgatcatagttcactacagcctcgagctcctgggctcaagcaatcctcccacctcagcctcctaagcaactaggactacaggcatgcactaccacatctggctatttttattgttttttgtaga

SEQ ID NO: 134628 - DNA, 1187 bp, Homo sapiens
ttggctattatgaataatgctttgctatgaatagtcatatacaggctcttgggtggataggtttttcaattatcttggggatatacctaggagtgaacttgataggtcgtatgctaacgattttaactttttgatgaattaccaatcaaattgttttcctaagtggttgtgacattttacattcccaccagtaatgtatgtgggtccagtttctccacatccctgccaacatgtgttgctatctgacttttgattataggcatcttagtggtgtgaagtggtacctcattgtggttttaatttgcatttctctaacaatcttgagcatctttttatgtgtttctgctatatttaatataagagttttaaaacatagggacatccatatattttcacttaagttagcagtgatcaatattaatattttcactttacctgtgatacataaataaacctgtttctgacctccttcatatctcaaagtgattgatagaagcagaattttattaatttccatataaaaggacacataactgtgacaataatagaaaaacaattagatacaagataatccataatgaagtgacgaagctatagcactgagttatagcactgagtgataaggctcaatgctctccaagatagtcacacagtgatccattgcggtgccagcagaaaacattagatttcctgatttttatttaatctaagaaattaagctggccgggtgcagtggctcacacctgtaatcccagcactttgggaggccaaggtgggtggatcacctgaggtcaggagttcgagaccagcctggccaacgtggtgaaaccccatctctaccaaaaacacaaaaattagccgagtgtggtggtgcatacctgtaaccccagctactggggtggggtgggggtaggcggagctgaggcaggagaatcacttgaacccaggaggcagaggttgcagtgagctgacatcatgccactggcatccaacctgggcgacagagtgagactccatctaaaaaaaaaaaaaaaaaaaattaagctttactaacatttaatatattgattggcagtagcacttatacatagtgtaaataaatatacatattctggggctgttgtttgaaagcattttttttttttgagacggagtttcactcttattgcccaggctggagtgcaatg

SEQ ID NO: 134629 - DNA, 1079 bp, Homo sapiens
tgatccgccttcctccgcctcccaaagtgctgggattacgggcatgagccaccgcacccagccgaaaacatttttacatatggagtatacagtaaaaaaagctgggacctctaggacaacaagtgaaatgaccgattatagttgagaatttttttaaaataactcaattattacttaatttttcacccttcatttagcagggaaaataatacctcttattctagagtatactgtttctatgaatctgactttagagtttgattcaaagaatataaatatatctttttaaaaaatagtacctaaaattatattttacagaatatttttagtctctaggatatattattaagatttatgttacaggttactagctttttaacactttgtatactgttagaattaatgctactaaattattattctgtgttatggaaggcaaccatctcataattgaaagaaaagctttcttttcctgttttgcctatacttataaatgagtatagaatgctaatccatataggaaaatacctaactttttttctctatagtgtcatggaacaacataatttttattttataatgaacttctcaaaaatatgtgttgctattgtccactgacccacttagaaatcagcatcctcctatccattaggttattacttcttgggtggaatttaatgaatattaatagcctaactcagaagagaagcaggtaatttattatagctttgtgcatttccatttttatgtgttatctgttttccttttgctttatgtgccatacatcttttgtttcaaattgattaataatacctttttgtttttgatttgtactatgcatttttagtaaaagatgccttcatattttgatccttactgattaatatatgcaataaatgtagatatgtaaattgagtaaatttaaaggaaggaatggtttctaatcaaatgtttgtaataactatttctgttgtggtatagtaacagtatttcatctcttaaaattcatcagatgttatctctaatgttttgttagagtttgttctcagtcattgcagccataaaatttcagcaaactt

SEQ ID NO: 134630 - DNA, 2086 bp, Homo sapiens
acagacatgcttaaaacaatgcctaccatgttgagatgctgaatatgtttttgttgaatgttgaagcaaatatgcaaatagtaaagtttctagaaatgaaaaaggagatcactttcattttctttgttttcttttggctttatatttttcttatatagttttagtgtttcttttctgataatcaagttaattcacttatttaacaaatattaactaatgagtgcctgctattcatttcttgaaccatggatgaaacagtggggaaaaaaaggttccttgcattctagtctgggctcctcacagagcttacttaatgttatagacgttaatcaagtagtcatagaaatagataattataaattgttagacatgctgtggtaggaaaaagcggagaatttgttggcataaggagaggataatggaagatttttttttaaggaagtgacatttgacctgagaatgaaggatgagaggtttggaaatggaggccaggagtgtattcctgatgaggggccagctcgtgcaaatgctttgagagcgaagatgccttaagatactgaaaggaaagcatatttgaaaacttgcattgaggccactgtcgttggcatggaggaaaccatgtgagcttattttcagatgcgactggtgaggtgaccagagccttgtggattgagatactgaagattgaagtttcacttaaggacaataggaattcagggaaggaatttaagcaggggagtgacatggacaaactgggaatccagaaagctcatacactcaggctgctgtgtggagaacattttgaatgagggcaagagtgagcatagggaattctcagtagctaaataaggaatttctgtgtcacccatggaaaataaatccaatgccaaacccttattcaagtcttaaaatctgtaattttatatgatcaaaaggaatacatcagaaatatccaggcattactatgttaatagtagtttttctcttggaacatgtcacaaagcagtatatcctgagaaaaaacaagacacacaagaaaactgaagtgtataattaagacagaatggactagactcttggtaattaaagagtactatttttaggccaagcatggtggctcacacctgtaatcctagcactttgactttgggaggcctgggtgggaggatcgcttgatgccaggagtttgagaccatcccagcctggataacataacaagaccccatctgtacaaaaaattcaaaaattcgctgggtgcagtagcgtgtgcctgtagttccagctattgggaagactgagacaggaggatcgcttgagcccaggagttcgagattacagtgactgagccactgcactctacccttggtgacagagtaagactagagcaaaaaaaaggaaagtaatattttaaattaaaattttgcattggaaagctatgcatcacagtacttccaatggctatctttggatgatagatttaccaacagtttttactttcttcatactttttgtattttgtggggaaaattttatattaaccatatattgcttttatgataaaactaatgaatttatttttattaggggaaaatgcatcatgtaacgttttccttatgtgtatagtgaccctttaaacttttttaaactaaagtttattcctaaattagaagatgcttatatacagcagatttaagggttttgtaaactcactgaagtgaaatgcagtcatagttgaatttcttctgaactgtgaaaggactcatttttagctttgaaaatgatttaatgttcaataaaaactttttttctgaagagtcagatattgaaaacaatggaacaacatgtataggttgttgagataatgcctgtttagaatattctgtgctgtatactaatggagtcattaaagaatgagctgaaaaggagagccatatgtgcaaagctgtggcttcatggctgaagctgtggaaaatgtaaatgtcacatctataatgaatccatgtgtcttctacaactgccttaactcaaggaaagtgagagttaaaaaacaagattctttttggaaattgtatatgatgtcttgtat

SEQ ID NO: 134631 - DNA, 1046 bp, Homo sapiens
agcatgatttattacattaattacagtcctgtgggtttcatgctgctaagccggcaaatgcagctacattctaaagttgatttaagaatatattttggccgagacgaaagtgcttcttattgtgattaatatagtacaatatttattctcttgttctactcttctttcaccttggctgtagcacagaatgcttaatttcttttctgtgacttggaactggaattcacttttagttttgaggagcttcatctagttatttatccgcacctgtcatctggtctcctttttgcctttttgtgtcttggtagattcacctaatgttgcatctcctccacgtgtgaagcctgtttgaattcactcccttctagcacagcagggctgtcctcaggcttgttaggtcacacctgcaatgttacgtctctttttgaggggaaggaaccattgaggaaaaacttcattgttgtaatttaatttttaaaaagtagcattcttaaaggggagcattctctgattctacccttgtttagaactgtactgaattcatacagtcacatagtgtctcttcttacagtgacacaattagcttatcaaatcacagaattttcagctttatggaatggacggtctcctaaaagctgttttagatatagatattaactctggttgttcacatatgtccatggcaggatattcttttatattaaatacatgaatgcctgacttcagtagcctttgtagaatctagcttggaataattagcaaatatttgccagaaattaaagtagcaatagaggaggagctcgggctaggtaggaagactttgatttcatgagttggaacacattttctaagcagcagtatgtttaaagagttgaactagatgacttatatgtccaacactgagctaagtggcttactttcctattgtatttgatcttcatacaactcttaagagataggtacagtttatacccattttacaattgaagaaaccaaggcttagtttacagcactttcacagatttcacatagctcattaagtggca

SEQ ID NO: 134632 - DNA, 1040 bp, Homo sapiens
agacaacatcgtaacatcagcataatctcttttttaaaaggaggttgaagggagagtgagggagctatccattggttttatgggttatgttcattctggtatggactttagttgaagtattatttgcttttttccttattctgttagtaagataaagatattgtcttgtagtaatttgtgtgatggccaacgggtccttaattcctaaggaactatccctgggagaagcttccagcggcctcataagtcattttaataccatttttacagatgtccacaccaccttccctgactctctgaagggtcctaacaaagaataaggtgattatggaattctcactgtgagtcccaacatttaattttatgccactcacttttgtttttaatgctttctaaatacaatcagtatggttggtctgaagtggataagtgaagtgaagttgtgtaattacacatggagttatctccgtaacctccctttctgctttggtgttaattcagtcaacaaatacttattgaatcctactacttttttcaagtgcttttctagaccctgggaataaagcagtgaaacctcagctcttttggagctcatggtccattggggagagatagacacaaaacaagtaaacaaagagatgtatggaagaagtaacaaatagatgtatggaagaacttaacagcaaaggaagaataaggaatgttagaggtagagaaatgggtgttgatttatttttttttaaagcaccttattcaagtgtttggcatttggaggtttttgcatttaacatattcagtctcttctccttgcatatgtattgatattactataaaaacatttcatgtggctatcccattggtctagctttattcccctaccccaaaatcaggattggtgtcttacagcctatgagcacaagccagactcattcccatgtctttccctttgctcgtgcagcttcgtcctaagatgccctatcctactgcccttcctaaacaaatgatacccatcctttaaaaccaacccaagtcccacccag

SEQ ID NO: 134633 - DNA, 1067 bp, Homo sapiens
ccgtgagttcctcatctccaagtatccttctgaaacaagagagatttatgtcatcccttgcaaggagttggatgcctaccttgcctctttctttgttgatgccaggcagaaggatgggtccgaatacgaacccaacagcttggccaattaccagtgtgggctcgaaaggtacctgaaagaacacaggtatggctatagcatcaccagggataaggaattcaagcgttcccaagaggccctgaagcagaagcaaattgaactccgctgtaaaggaaaaggaaataagccacacaagtccatgaagctcacctttgctgacgagctcatcctgcggaaaaggggactgctaagccgatataaccccgagggtttgctcaacctagtctggctcaacaacacaaaagcttttgggcattgcacaggcttccatggatctaccttaaaatggggtgatatccggctccgggtaacagagacgggtctcgagtacttggagtggatgggtcaggacactggagacttgaatgccaaaaccaagagaggggggacagactcccgtgtgtatgccacccagcacgccccacagacctgccctgtccaggactataaggagtatgcccagcggcggcctcccgccatgcgctacgaggatgcccctttctacttatccatcaagccagtcgtgaacctggcggctctgcattggtacaactgccaggcccttggcaagaacaagctggccaagatggtgaagaccatgtgtgagaagggcaacatccctggcaggaaaaccaacttcagtgtgtatcagagctgcagcaccttgtctgaggcccagagcaaccagctcgtgctgatctgtaacaatctgagccagcaggctgcccagtcagtggccggccactccaacaatggcaatttcatcgtctccgcctcctatgactcttcctcagacaccgcttgaccaggtggcttgagcaagactccagtttggttactgtgtccggagaaactgtgattatacaccgcttctcgttccccttcctgtgccctcagtgttaattcac

SEQ ID NO: 134634 - DNA, 1062 bp, Homo sapiens
tggttctcaggcaacacaaagtagagagggaattctgttttttaaaaactgtcaaaaaggaaattgagagtcatcctagacttaacatgcttgcgtcctcaactcctgcttttcgttcccaccccaactccccttttttgtctccttaataaatggctttatttttttaatttttaaaattctatattaatcaagaggagacattaactttactgctgacgcaaaactgtattcagctagatccacaatatgaaaatgtataagctcaacatcaaattatttacatcttctcttttttaacttaattagagttttagctcctgtgcctcattttttacaatgtatgagaatctagatgtttagctaacatcttttctttttggggggaaagggtagaaggagggaataaaggtgccattctttttgggagatacatgattttaaaataatacccaaagtctaatattttggctaaaaagactgttacatagctcattttaactattgtgcttgaacctggaaagaatgtttctttttttgtccctaagaaatgggtataaatgaagtttgacaggaaatttaaagctaccaaagctttgaaaatgttgccaagcattagattgcctataaagaaggtaaaaggtggaaagtcttactaaaaatctagaagcagtagtcgagacaacaaaaaaactcatcctcttcaaagttcatattccctgaattatttacttagaagcattaaacagtctcttttctcctgaggcaagggtgtgtattcgactctgtgattgagatccaaggaatattggcactcattttaggtaacaatattttgttaccagattttgctgaattcaaagcattcttgaaaatgtgcgagatttttctatagtaaatataaatgcgtttatctgtgatatcctgcaattattataataattttggttaaacatttgtggcagtttttccaaggtctttgttttcaagtcttgatgcctgtggtgaattattagttaagatatttcaaaaataaaataaatttagactttagagccacaa

SEQ ID NO: 134635 - DNA, 1030 bp, Homo sapiens
aaaaggatcaaatttctatcaacataattaggaagtttctgaagtaaatttatttagagatagtaaaggggaaaaatggtaactaaggaaagaggcctacagtaagtagatgtagaaattcaaacttacttaaatgcaaattatttgtatttctcatcttgcttactcttctgaaaaggaactcaagcataaatatttaaacgtttcacaaatttttattttacaaatcatatttaccagatcatagttgaaaaagttcaaattttagatgttttttaaaaaggtacagtgtgatttgtcttttttttgtaatgttgaattatgttagacttctaatgtttgtcttgatattacactggaattagacagcatttttaccatttatacattcatttcaataagagctttgaaaatgctttggcattgtttgtttgtgataagtagaattaggaagatatcagcaatatagattcctaacagtaattgtgtatactgtgttttagtgatttttatgtccatttattttctgtaattcttttataaatcccttagtgtacttccactagaaattaatttataattgtttatttatattggatgaagtaggaggtccatgtttagtattaacccactcagattaactttatctaactgaacttttatatctataacccattagattgttacaactttttaaacagcatttataatgaaataacttttgttttataaagcatttgttacaaaaaaaaaaaaacaccttgccaaaaatcattacgatttctatgcattgtgtaatattcagtgatgttgagattttgcatgttgttacaggtgctctttcatatgtgtgtttgtggtgttgatgtggaattgttaaccactgctgctatcacttattgtagttaaactgaaaaactgtgttaaaaggctgtgccagtcaacatttctatgtgtgacttaagtaactgtgtacttcattgtttaatattttgagccagcacttagtggcctctacagaaggaaatat

SEQ ID NO: 134636 - DNA, 1383 bp, Homo sapiens
tttccaatttctcccacaattttaaatgttttcactgccaaagttagcagtagatttgctaggttaatgccatggtcagtaatagtttgtaccttttatgttgtagcctgaaaatgtaactctaaccccgtaggcctgaaacctggtgggaagatgattgaaagtgttttagattcaacagattgactatgtatgacttatctattaaaatgaagaacttccatggtttaatagaatgaatgctgtattcaacaaggtcttccatccttcttataaatcttaagactgtgtttaagctttctttcacttttactctatcccttggaagttaattgggaataaaaagatttatcaatttagtcactataatttaaggccaggcatctgcttggaaatacaataaccacaattaatacttagagaaaattgtttcaacagattaactctgctattttaaaaactatagtagtgttctttgaggatgcatttacttttccccaaatttgatagatagttatttttatatattttttctggccacttggcttctaactgattaacatgaaaaacgcacgtgtgcctgtttcactcaaatcatattttacaactttttaaaagctgctacagttatagtttgtgaaagaggagaaaggtgaattgcaacagagggaaattactgttactgtgtcaaatatgtgactgatgcttttggtcagataatctgctgcctgtcaatatttgtaataacagaattttttgttaagagtactctcatctttattttgctgctcactgattttttacactaagatgttctcatctttgtcgactcactgtttttgcttcatatttgtctgtgtacttgtgctctaaataaaaatctagttttatgtctagtttattccattgtgtgtataatgtttgcctctgatgtagtgtaattttctattgtttttgatgtttgttggtacagcctaaaacttatggaaataagaaaagcaatccaataaagtcagctaatgagtgtcaacagtgtctctataatgagagcatgcttgagtcacagtgttttgtctgtatttgggcatgatgaccagtcttcattcatttaatgaattgtcttctgcaaagctggctgatttttgtagctacaacaaacaagttaaaccacgttttgaaaaacatgttgttgacctggacattgtgcactggcctcaggatatacagtcaatgcagatgagccaagcagcccatgtgcagtgtttctcaccactgaagttggggggaagccctggaaggggaagcattgcgcatgtgactgtgccaacacagatcatagggtagcaacaatcctttagtaaaggatctacagttgaattaatc

SEQ ID NO: 134637 - DNA, 1092 bp, Homo sapiens
atctttgttgcattttcccatataaatgaatcacccttattaaaacaggaggagggagggatttgtggtgacctaccgctgccctccctttctaagagaagaggaggccatggggtatgataactaaatgaacatctctggaagttcctccgtctgatatgtgtattctgacataacagaatttcccaagacttctttgaggaaggctgtccacgcttcaggcaaagtttacccattattattatgattttgaatattccttgttcattacagtccagaaaatctgcagaagttctccatgttcagtggttgaccagaatctgattgttgcgctcaattaaagtgcttattatttagctaaaacaacttatatggaagttaattatttcaggaaatacataataagaccaaaaaaatcactggataatatgtagatatattttagttccattactattaatagcaattagataactctccctccccccattgaggtgagaatgggctcctagatacttggtggtcaatagaactgatttgattaactttcatttaactgtggttattgttacatctactgattttttcaaataaaaatttctagaaggctcagatttgactaagactgtgttacgtgctttctcacagctgccatatattctcatgtaatctttacaaccgctctacaaggtatgtctaattatttccattttacttattgagaatctaggctcagaggagttaaaattctgaaaatctcaccgataagttggagaatttaagtttgtaagttggagaatgcaggttttctgactccaaatctagtgctcagtccatgagacaaaactgcctcctggaggccatggaagtccattaactttaagaaagttaaacacagttttggtttgtttggcaaatatttcatctctcaagccatactgtgtcacccctccatgtattctcttactaaatgattgctcacttgggaacttaatcgatcctggaaagcctggcggttccccagtattttctgcctactgggaaccttctgtctttatccaataagtaatttatattacctgtcatctacct

SEQ ID NO: 134638 - DNA, 1051 bp, Homo sapiens
aaatttaatattttctatggggctgtattttccaaataatagcaacaaaactgtcctaacgttttcactgttctgtaattttgttttaatatagaggatacccataatttcttaacactggaaacatcattctgaacgatgtaggaagcggtcagtaacgtgaatgatgttattgtaccgtctccagctttttccttcttcccccagatggtcgcacctgtgcatacatccctgtgcatgtgggggcacatgagtgggaaagtgggtgtcactcctattttctgtcctagagtgtcagcgttggaagggatttttttttgttcctccagtccggccctctagttgatagtccagtagtctgttaacaatttgtaaggacctgggttatattttaaaggtggttgttgttgttgtttgggttcacttatgtatatgcagcttgactgttcaacccagatttttaaacaataaaaagatttaatgtatactttctgttttcttagcttagttattttaacttaatcagcagcatgtctggtttctgaatagttttttagtgtcacattcctggaggtaatgtttgtctttgtagtttgcgatgttaggacatatgagaattccacacccatattctgtgcctctgagccaatcctctgggtgaaatagttgttccagcagagttccctctggttttctgactgagatttgcctcactgggcaggcttgaggtcccatttgggatggtgtcatggtgattttatattgaccatcatgtacatgccgctaattaatgtttttctgctctttaaatgattatttatggcttttggagactacatttaattctcaaaacttttaatgtagaaatttactgttctgtatatagagcagttaaaaaataatttctaagaaacagcttctgaaaaatatttccttcttttttttttttttttgatggagttttgctcttgttgcccaggctggagcgcaatggtgcaatctcggctcactgcaacctccgcctcccgagttcaagcgagtctcctgcatc

SEQ ID NO: 134639 - DNA, 1019 bp, Homo sapiens
gatattttacactgtatcacagatacagtattttatataactttttgtaactgaccttatcttggccttgagtcccatcctctctggtggtagcgtaaaactgaaaattccagtttgggtcaatatttagtgaaagttctactttcttttcagagagtttgttcccccctttcttccttagatgttttcaaacacacagccccatcctactcaaaccaagtgaagcaagagtggacaattctagaattggctgtgccatgtaggttttttttagaatttgaactgatttccttcattttgatgaggtggcaactgtccccattgtaatggtcaccattgcagcgaggatagccttacttctgcggcgcagagctcctcagggggcctctggctcctgtccttcctcaggtccatccaactactccttgggcctccttatggtagccctcattgtcttgagttgatttcactaggtttctgttctctgtcatctgcaacataactgacatggttctaaatctgtctctaaggagataacacattagtatattttctacactattgaagcctctacctaatgtatgacttttgtagctcaggtaaagagatctttttaccagtgttatcgtttctagtctgtttgttagtcttcttttaaatagatatggcctaaatcctgtattcctggctaggaagcacttctctccacccctctgctttgagttacaaattcaattcaatttcctatgtatttattaatacctacagataaagtactgtgctttgggggacacaaaggtgactggtacctgctcttttaggaggtcaccgtgcagaggatcctattctggtacaccaatagttataaagcaagccacagcctaggcaacatagtgagacccctgtctctactaaaaaattaaaaaaaaaaaaaaaagattggctaggtgtgctggtgcatgcatagagtcccagccactcgggaggctgaggtgggaggattgcttgagcctgggagg

SEQ ID NO: 134640 - DNA, 1050 bp, Homo sapiens
gaaagaagaataaccaggatgatgagagctgtggaagctgtatcgtccaaggaattgattatgtaccgtgactgtaacttttttgtaatgctgtttaactctcaatcagactgtgaactggatggtcacgaagtcattccccaactcctagcaagtttgactgaatatatcatgtccacagtagattttcaagaatcatttatagtacttaactttaaagaaacaaggctgcttttaaaaaatgaactaataggcttaaatcaattgcatccatatttgctgtttataggattgctatcagtataccttttgcgtttatagtcaacatgtatcatcctgaaatattctttctggacttataactacttccccctttttcactttaaaacaaacctcaagaataaattactaaccagtcttaaccatcttttataaacatatgctcttataaatgttgtgactagatgcaattaaaaataatagggaatgtggtaggtttttaatttgtacatcctcttatttagtgttaccacataaatgatgagtttgtgtggttctgttttccatttttgttctaactgaaaactttttggctgggcacggtgcctcatgcctgtaatcccagcactttgggaggccaaggcgggcagatcacttgagatcaggagtttgagaccagcctggccaacatggtgaaaccctgtctctactaaaagtataaaaaattagccatgtgtggtggcacacgcctgtaatcccagctactcaggaggctgaggcaggagaatcgcttgaacctgggaggcaggggttgcagtgagctgagacggtgtcactgcactccagcctgggtgacagtgagtctttgtctcaaagaaaaaaagaaaaagaaaacttatgcaagtcgagctcctttttaattaagtaggaagggattaggttaagaaagtctctcaacatgacccatctttagcagtatctggggtgcttatttaagtatgcagtcccactaccctaccctagtcctacagaattagaatctgattcaaa

SEQ ID NO: 134641 - DNA, 2191 bp, Homo sapiens
ttctccttcttcttctcctcctcctcctccccctccccctccccctcctcctctcccttcctcctactcctcctcttcctcctcttcttcctcttcttcttttttaatgaattatcttatccaaatagagggagtctgctattactagagtttgatgacatagcatgggtgggcagagaggggaaaatgggagatgatagaaatgaatgtgccagaggtttattttgcccagaatcctggccacagacagtatgctaatgcctgattgaagaacagatttagctgaaaacactgcaaaaggagtatgaatactccttctacagcctacaccatccctagctagtctctgctcctctcccaaggagaggaaaaagtttgcatcctaccacctaattcttcctgtttataatcagtataaaattcttagactccttcatgtgggtacccttaggagtgcctaggtctgctctgcttggaaaatgtgctttcctcccatattcattcttctggcctaatgattccagtctcctgagccatcatcgtccttatctttttttttttttttttttctgtagttctgttttccagtcctttaatctttctttttgtttttctaaattagggatcagaaactcaaattcttacagataatgtaaacaaggtgataaggattgtaatgagctggagagtgcccagctaaaggggacaactatttcttagttctggtgaattgttgccgtgggggcatatagatcacttgttgccagatcttgagatatatttcaagagaagctaggaatctgagaaattagtgtacagtttctcaatgtttacatgttagtatttaattctgatttttaaaacatagctaggagttgctactgggccataacttggcaacctctaccctatatcttacgtaagtttgaagctgaaaatccagcccagtattaagtatttgacaaaggccatatctctttgtatcctgtcagttacgctccatttctttctcagaattgctttctggtcagttgaaattctttgacatgttccttgaaaaattatccaacatatctgaatggaagcagttgagaagaagaaatattttgatctgagtatgtttactgctttttccccccatgaaaaaggcatgcagaaagaggcttcaaatagaagactaagaacatctgccctcccaaagattgactcggcaggatagagactgcacaggcccctgcagcatttgggtcctcaaagattttgttaaaaaacaaatgctgtaacttataccttggtgattaaaattctgtagaactaagtcttaaaagtcctcagctacactttaaatataatatgatttgatattatattctgcttaagtattcatgaattatgctgttaaagttactgggaagtaggagggaagaagtaaccatttagggaaagtacttactggtgaattcattatcatgttagagaataggagttttgctttcttggttctagatgacttaggttataaaaataggtctaaaatgtttctgattactctctctttctcccttttctcctattcccctcttttttttaggttttcaaaacaaaaatagagttgcaatcttggcagaactggacaaagagaaaagaaaactacttatgcagaaccagtcttcaacaaatcatcctggagctaggtattgacactataatgtgggttttttgtttgttttgttttgttttgttttgttttgagacggagtctcgccctgtcccccaggctggagtgcaatggtgcaatctcggctcactgcagcctccgcctcccgggttctagcgattctcctgcctcagcctcccgagtagctgggattacaggcacctgccacgacacccagcaaatttttgtatttttagtagagatggggtttcaccatgttggttaggctggtcttgaactcctgacctcaggtgatccacccgccttggtctcccaaagtgctgggattacaggcgtgacccaccgtgcctggcctgtaatgtggtttttatattcagtgatataaaaatttcttggaccaaataattcaagttggctggcaatgatttttttctttaacactgcaatctattcattgtgttttctttgtataggggaggctaaactttacctgtgcccaacttagttcttatt

SEQ ID NO: 134642 - DNA, 1065 bp, Homo sapiens
gaccagaaagcaattctgagaaagaaatggagcgtaactgacaggatacaaagagatatggcctttgtcaaatacttaatactgggctggattttcagcttcaaacttacgtaagatatagggtagaggttgccaagttatggcccagtagcaactcctagctatgttttaaaaatcagaattaaatactaacatgtaaacattgagaaactgtacactaatttctcagattcctagcttctcttgaaatatatctcaagatctggcaacaagtgatctatatgcccccacggcaacaattcaccagaactaagaaatagttgtcccctttagctgggcactctccagctcattacaatccttatcaccttgtttacattatctgtaagaatttgagtttctgatccctaatttagaaaaacaaaaagaaagattaaaggactggaaaacagaactacagaaaaaaaaaaaaaaaaaaagataaggacgatgatggctcaggagactggaatcattaggccagaagaatgaatatgggaggaaagcacattttccaagcagagcagacctaggcactcctaagggtacccacatgaaggagtctaagaattttatactgattataaacaggaagaattaggtggtaggatgcaaactttttcctctccttgggagaggagcagagactagctagggatggtgtaggctgtagaaggagtattcatactccttttgcagtgttttcagctaaatctgttcttcaatcaggcattagcatactgtctgtggccaggattctgggcaaaataaacctctggcacattcatttctatcatctcccattttcccctctctgcccacccatgctatgtcatcaaactctagtaatagcagactccctctatttggataagataattcattaaaaaagaagaagaggaagaagaggaggaagaggaggagtaggaggaagggagaggaggagggggagggggagggggaggaggaggaggagaagaagaaggagaagaagaaggagaagaaggagaagaagaaggagaagaa

SEQ ID NO: 134643 - DNA, 1021 bp, Homo sapiens
gctgttagtggattggggaatgcttcaggcaaaaggccacaagttcccaaatctcaccagttgcagtttctgcctgatactggtcagactccagtgcctttaagtagtgaatttttaatattttagtattatatttgtggcaggattagaccaaccagactactctgccagtactggaaattgaaagcttgctgattctgttttagtttattagttatatttaggacaaactaaaggttacatgagtttcgtagaattatagtattgtaaaaagcaagttgtggtgacagctttcccagcagtaaccagctaataccattctgttctcctctcacatagccatgtgcgatttgtgtgctctgtggactaatcataggtccacattcccttgtggttgttgacctctttatttttccattaaattataagggcccatattaaaaataacttaatttgagctcagatgaaaactaagagaagactattttggaaagataacatgctgctaaaaaccacacaatgcactgcaaatgaaaataaattttaaattatcccactattcgcacagagatttacaatatgctggttacttttttcgtagttgtagtaaaaacgcaatcatttttagtattgcctttgactgacccatagtcagatccactatgaaacatcccctaatctaaatagaaatgaatttagattagccctttggcttccgttgctcctttgtcagggatttttgttgatgtcatggaactgctgctactaggaaccagcagagggagtccacatcatgttctagagactcccggactccagtgaaattttaaaattcttatttattcagatctattgtatttttctctctctctttaatttaatttttttttaagaggcagggtctcgctctgttgcccaggctggagagcagtgttgtgattgtagctccgtgcagcctccaactcctgagctcagcatcccaagtagctgagactataggcacatgctaccacgcctggct

SEQ ID NO: 134644 - DNA, 1043 bp, Homo sapiens
gcgagtttagcttctagagtcgcccctcctccgaggcccagccgaggtggactcgcaccgtcgcaagaccggccaggcggtggcaatgaataaaaagccagtcttggtgctagggacccaggtgttctccgtcccgcccctgcctggcagccccgcccctcccccgccccgggccacgccccaccctggcccagcccccaaaagtaccgtttgcatctcccgtgagcctcttcgactgtcactctttggaaaaaaaagtgacgtctgcactgaggtggccgctaaagtgcgaatcacgacgggcggtggccgttgggtcccggcgggaggcggggtttccgctccctggggcgcacgtcagtcaggaggcggaagcgcagcgggggcgggaaggttgtagtgccgcgagttgagctcctcttgcctaagtggtcgcgccccctttaagagcagcgattgtaaggagaggcggtcccggtgtcctcgggtcccaggtaagtacgacagtctggaggcaccgggcaatagaaaagtgtggctccggtgctaacctgtcgccgccgtctttgttgctacaggcagcgacctcccttccgaccttgccacctaacatttctggctcctacttgcttccttcgtctcgttcacagcccgggcccagccggctctgcacatccgtaggcagggacctttctggcacgccagtctaccctgtcacaagatggccctgttgtcctccagtcctaaccccgcattgctcgctctgtgtttcagccgctggagacacctaacgattcatttactaaaaaccggtgtctgttttctatcccttgtgtctttcccgggctccctagactaaggcatcactctttgctgccaatgaaatcaattctttgcctccggcactgtgcccaccttttaaagagcgggtttgttaagctttttttttttttaattaatagtatggttgcttgaataagactttattttcccttctgaaagcaggattagggtcttgctcatcttggatctccccaggattt

SEQ ID NO: 134645 - DNA, 1083 bp, Homo sapiens
atgattgctctgaaccaaaagtttgagaccagcctgggcaacatatcgagaccccgtttccacatacgcacacagcatggtggcatgcacctgtaatccaggctactcaggaggctgaggcgggaggattgcttgagcctgggagttcaaggctgcagtgagctatgattgcaccgctgtactccagcctgggcaagagagtgagaccctgtctccaaaaaatgttgaataactgaataaatttgctttcttatcgacaaaaattggtcttaaaatagtgtaggaactgggggttaaacctcatttccttctcagttctgtgtgggacactgaattaattatctattgctgtgtagcaaattaccccaaaacttatcacctggaaatagtgtctgtgggacaatctgagtggttctgaattaggcctttcttgaggttgcagtcaagttgttggcttgggctgcagtcatctgaaggctggattaggggaggatccacttctaagctcactcacatggctgttggcaggtcttagttactctccatagggctgtttgatgtggcaactggtttttccccccagagcaagtgatccaagagagctcaagactctagccagtcttgtataacttatcttggaaatgacatgcctctgctgtattctgttggtcacacagattgacactggtacaatgtggggagagggtgtgaatatcagggtgtgtataccaagaggtggggatcattgggccatcttggagactggctactacagatagccatttaaaatatttacctaacgattcactcatggatgatacctgactcagaagtatgagcattttactaataagcacttggaagacaaattccccgtaccaccaagatctggttagtggtgaagaagtcagtctcaagtctaattaccgatggcttcctttaaagggtctgttctgtgtaggagggagagtcttgaaggcattattaattattgaatatatatgtatttttttgagcagagacttactctgtcacccaggctggagcgcagtggcctgatcctgactcactgcaacctccacc

SEQ ID NO: 134646 - DNA, 1014 bp, Homo sapiens
gtctttcctgtctctgcccttcaccttggggcttttcccaccccacatctgaaagccccctccaacttcacggacctggtgaaaacacaacctctgcgacctcagctgatctgcagacatacccccagctagtggggctgccaataggaataaacaccccattctccctactcctcaggtaaaacccaattttcaagtcatattttaaggtcacggtattggtaatttaagtttcaagtggcaaaccaaattgaaaacagtattaacaaaagggaatttatgaccccctataaccaggaacccgttctaacttcaggcacagctggcacagtcggatcctgaactcaaatgatcttgcccctcttcctctcctagctctacttccctctggcttcattcttaagccaagcactctctgcattgaaggacacgaccattcacaatctagtagaaaggcaagacattctttcccccatcatccatctcataaatctcaggaaagactgcctggctctgttagggtcacacatccaccagggatgctattttggctaataaaagatattgatgttagaccagaatgggaaggatgaggagacaagccagggtatttctgtcccaacctgctctctgcctcagatcgtgccactggcagcggctgcctcccctccagggcccccttcctctaaggtcccagctcctgctcaatgaccctgccacaggtctagttctcacagaagctcctgggttctacttaacttcgcctcttcccctaaccctccagtcctgagggtaacagcaacttcctgctactgctactctctgggtcaatttaccacccatcacctatgcaactaactccttgtattatagtctctctgtttgaaataacttcactggcttttattccctgatcagacctcaactaatatagaaatcgacaaagcataggccaaaatgtagaaagaaatgtggagagtacaatatcaaggaataacaaccaccaacacctcc

SEQ ID NO: 134647 - DNA, 1053 bp, Homo sapiens
gctaagtaaatacatgcagcatttttcacatgctaccgcaaccatctgttgatgtgtctctcttcttcactggaccattaacctctcgggggagagatcttctttatctttctctacagccccagcatgtagcacagagccaggtatgtagcatatgctcacgagctataggggttttgaaaagcgcctgcactcggccacccaaacacgctgtgtgctcttcccgcctctgtgccccttctcaagcaggaacccccaaacaccttttccactatcccacttcccccccaccaacacacacacaaaaattcacacaaacaacaattcctgatccctgcgctggctgccaaaatgaagaattctatggggcaaggcagacataagacagcatatgagtcctctaatgtctagtaaacaaaccccattgctcatacatgcatcagcgcctgttggccaggctgttgtttatgtacttattttactttgagaggctctcatttatcgtggaacaccggccttcctcccagtggccttcactaacacctgattttcaaactgcgatgacatcctaccccctactttattgtcaatatgcactttgtctaaattctgacctcaaacctctccatcttctattccagtctctatttggatctactgggattatacatctatttaataaaaaagagcttcctggaggcagcatttgtttgagccttgaagtttgagtaggcttgcaacagtggccttcaggcatcctctgtcctgaatgcctgacttgaaaccgtgtccacgtcatctttacacttcactcgcacatgtgcttcccggtctgcgcccccctctcaaagacggcaccactgttcagcatcaatctcctggactttctagtcagtcacccccactacaccaaaatctgtcatctttatattttctaatctttctcttgtcaggcaacaagtccaaccaaaaccaggttaattcttcctatcttacctctttcacggctggtctttccccatcccaagccctgatcacacatccccctgctca

SEQ ID NO: 134648 - DNA, 1052 bp, Homo sapiens
aaaaatacaaaaattagctgggcatggcggcgcgtgcctgtaatcccagctacttgggaggctgaggcaggagaatcgcttgaaccagggagttggagattgcagtgagccaagattgtgccactgcactccagcctggtgacagagtgagactctgactaaaaaaaaaaaaaaaaaaattatttgtttaaatttacggggtacctatgtaattttgttacatggatagattgtgtagtgaaatccagtgcttttagggtacccatcacccaaataatgtatattgtactcaataatttcacatcacccacccctcttccatttcctccaccctttcgagtctcctttgtcattccatgccctatgtccatgtagatgatgaaagttatgtatagggaataaagtagggtgagaccttgctttggaggatggtggcttttccaaagaagatgatgtttgagctggagaatgaaggaatacatgtcttacaaatggacagaaggaagagcaactcaggcggaagaaccagcacatactaaagcttagcagtgtcaagtgatgcacgcacagcgagcaaggggattgatgaggctggaaaggttggtagggtcctggctgtggtctgtagtggcaaatagtaaggactttaacctgagtaattgggagaccaattaagtgtttgtcgtcgttgttgttgttgctgttttttaaagagatggggtctcactcttttggccagggtggaggagggcagtggcacaatcatagtttactagaactccagggcttaagcaatcctcctacctcagcctactgagtagcttggactgtgggcatgtgtcactgtgcctggctaatcttttcattccaatcaagtgttttaagcgggggaggaacagggccgtgtttggggttagagtcactgatcaagaactagctgggattgggtgggtggagcctggcggcaaggagtccaagaagaaggctgttgcagtgggaggttgggggaggcagtttcagtagggctttggctcactggattcagagagtgt

SEQ ID NO: 134649 - DNA, 1060 bp, Homo sapiens
cgtttctgtcttttgatcctcccttcacttgcagaagtgcttggccgcatagcatcctgggctgtggggctggcacttggcatcacttctccatcactgcagtgccatcctgcaggaaagtgtccacttccccaagagcttgatgccaggagtctccactactgtgggtgcagccatgtccatgcagtcatcctgagggcacaactaaggcatctctgtagcttggcatggaccaggcaccaccctggcacagacaggaagagctgaatcttcacttggcttctgggattccactcactgttggttccttatgtaccttactggctgttcctcctctgtctccttggctggttccgtctcatctccctagctctaaatgttggactgctgtaggactccattctgatatggcctctcttcatctgcatggtgtccctaagcaatctcatccagcctcacacatctacacactgataactccaggccagaaacctctctcctgaattccaaattcctgtctcccactgccttcttgatgtttaaccctgcatctccaacaggcatgtcaagctagttatctagctcactcttaattccaaggataagccttggaattagcctcggctcttccctttttcatcccatacctaagccatcagcaagtgcttctgaaataccatgtccagaatctcatcacttctcactctctccactgctgctaccctgactgctgtcatcccctcttgcctgcattactgtaccagccgcctgactcgtcttcctgcttccaccttcccaccttcagtcatatatccaggcagcaaccggagggattatttaaaacataagaaacatcagtcgcatcatgtctcttgctttttaaatttaattaattaattaattaatttttgagatggagtctcactctgttggccaggctggagtgttgtggtgcggtttcgactcactgcaacctctgtttcctgggtgcaagcaattctcctgcctcagcctcccgagtagctgggattacaggcacctgccaccacacccgactaat

SEQ ID NO: 134650 - DNA, 1080 bp, Homo sapiens
tttgctgatgtggtgttccgtgccaggaacacctttctcttccattgaacagctctgcagagtttatagaggactttctcacacatccccagtaatctccatgcagcctagcctggaccaggttttgctgttttccagtgaacgtcagtaggtttaagtggttttcttatgacctcatagctggtaggagaactagaatctaaacccgggtctcttgccatcctgccaagcccaggtcaaacctccctctctgaagccttcctcggagaacagaattattctggctttcttctgggctctagtacacaggtcacctaaactagattcctcaagtaaattccttattggctccctttcctccacatctagaatagcacctagcagtccatgggaacttgataagtgtttggatgaatacataagcgaacagattttgctttccatatcttctaatacgtggtttgggggagtatagcaccatgttaattaggctgcttaaaactcctgtgtgttggaaaacacctatgttttggtctatagaataaatagggagtgattattttgtcccactctttctgccatctcatagaaacataatcaagtatttcattacttgaagaaggttgcttacaacacatttaactgtatctatattttgggaatgtaatttttttttttgagacatgacctcactctgtcacccagggtggagtatggtagtgtgatcacagctccctgcagcctcgacctcctgggcttaagcgatcctcccacctcatcctcccgagtagctgggactacaggtgtgtactaccatgcctggctaagtttttttttttttttttggagatagaatctcactctgtcacccaggctggagtgcagtggcacaatctcggctcactgcaacctctgcctccctggttcaagcgattctcatgccttagcctcctgagtagctgggattacaggcatttgccaccatgcccggctaatttttgtattttttgtagagatggggttttgccatcttgacctggctggtctcaaactcctggcctcaagtgatctgcctgcctt

SEQ ID NO: 134651 - DNA, 1057 bp, Homo sapiens
gtctgagtcatgtcagtgggaatgtgggaattcgatctggggcagccaggtagccagtcaggtggcgctccagcctggaaggccatctgtacttttgggttgtaggctagcacacttcaggattctaaaaagatgctgtgtggaaactgtgtctcaggcctcgaaaagttccacggaaaaacatctcttctagctgctttgtggtgagatgcagatctaaatcaatacaacattattgagtgccacaaaactagtactgtacagggagaacctgttctgtacggggagaaaaaaatgaagtgaagacactgtggaaggaagtatgacctatttgaatgtagtcacacgtttccttctcatttagcacatcctcttgtgttcattttaggtttggattgaggatttaaggacagcccccagccccataggtagggtatgggtgtcacaaatcattaaatgtggaagtactatactagagggcagtttgaatttgggtagctcaggtaggtcgaaatgtatttctgtttcctatttttagtttagagagacagtttagaatctgtcgtgatttttttccctccctaggtatttttgaggctctaataattataggttctctcctaagaagcttagatgtaacatctaagctcccaaagaagattggcatttgcatgtgcacatgcaaatgttggtgcataatttttggcccccaaggtgcctatgggtttcagagagacagtccctattgtagaggaatggtgagttttcggtaatttttgaggcaaggacgctttttttttttttaaagatggagtctcgctctgtcgcccagggtagagtacagtggcgcgatcttggctcactgcaacctctgcctcccgggttcaagcagttcttctgtctcagcctcccgagtagctgggactacagacgcatgccaccacacctggctaatttttttttgtatgtttactagaaacagggttctaccatattgatcaggctggtcttgaactcctgacctcaggggatccacccaaggcaaggacacttttag

SEQ ID NO: 134652 - DNA, 1065 bp, Homo sapiens
actgccaaaccttccatgtcctctactccccactgacaatcacactttcaaattagcgtgcgtgtaaagggggttcaaggacattttctacttattaagtaacctcaataacctgaagtaacttcggtgacatgggttagattcctctgggttcttttttcagttgtggcccaggtagaaccagtagacagcctttgagacctttggcatttggatggcaccctttcctcatttccagtattgatatgactccagtcactgtttttcttgttctttttacctccactgttttttgtttttttttttttctttcattctctaggttaaattagtatctggagggtggaaaaagggagaacgcagaggcttgtgttcaactcactgagtttatctagaggtctagctttctaattttttaaacaagtgtgtcacattacacatacaaacatgaccgcttcctggttattgagcctttgggatttttctaggtttcactctgtgttctttgtatcatgaacatctttgaacagaacatttttgagattatccctttgagtttattctccaaagtgggcttagctttagttttacaacaaaatcaacaatcaagaatattcagtttgtatagaacacattcattcattttttttctttttttttgagatggagtcttgctcttgtcgcataggttggagtgcagtggcgtgatctcaggtcactgcacccgccgcctcccaagttcaagcagttctcctgcctcagcctcctgagtagcggggattacagacgtgtgccaacacccctggctaatttttgtatttttagtagagatggggttttaccatgttggtcaggttggtcttgaactcctgacctcgtgatccacccgcctcgacctcccaaagtgctgggattacaggtgtgagccactgcgcgtggccaacacattctttaagcatctgctgtgtacctggcacgaggggggtaaattaagaaaagtaatatgcagtctgtgtattcagagagccatcattttacccttaacgtaaagatgccttgagaggc

SEQ ID NO: 134653 - DNA, 1075 bp, Homo sapiens
gagaatcaaactgcaaaatgctggagtgacagaactaggccatcttttgcttatcaaagaaatacaaggaggggaggagttacttgtgactggaatgtcactttgcaccccgtcctttgtcctgctgtgtcagccttgtgtttgcttttcccatggccagcactgctgattcgccaggtgtttcctcttttatgctctcttaactttagctttaaaagtggagacatagactcaactgcccttcatccatagggaacaataatttagtaaacaaacttagataccttttctggcagaaagatggttcagaaagatagcatggagacctgtgtttgccaaagttatgaccctgatgaatcttcagacttgtaattgactcacccaccccaccgtggttcattttaaacccactcctgcatgggggagttgccagggcctgtattgatccttcctcgtttttgcctccacttccttcccacccctctcggggccacctgctttgccacatcccataatgttgggatcttttatctccttacatatgcatggggcggacagacgtgagcagtgtaaatgatcgcactggcatgggaagcacgttgaggattccccagcagttgccattcatcggtcactaagccatgatgactgtgttctgttgcaacaatggcaagactcttggtgacaaatgatgggccagattttctttacgggggaaaaaaatcaacattttttttttctcatttcttgtacttgttccctctacttgacccactgatgataccatgtggggcccataggttttggagatagctgtggataccatccacacctaaggatcttgcagagtaaattctgatgggatccaaggggctgaggtggccaccgagtgatagagtgagtctgccagtgtaagaccacatctcttgtatcaaaatgtttcctaaaattccattgtttatccattgtgactgtttttgtttttcgttttttggtttttggttttttttttgagacagagtcttgctctgtcgcccaggctggagtgcagtggcaccatctcggctcactgcaa

SEQ ID NO: 134654 - DNA, 1163 bp, Homo sapiens
gtctcagacacagtttctgtttctttttccaaattgagatccaaacaggatctgtacattgattggtatgtttcttaaatattaaaaaatccttctttgtccatttatttttccttgtaatttatttgttaaagaatcatctgtcttctcttcattggaaaagagagatagtaaagttccaggttattaggaccacttgaaatcacaacaaaatgttctaatgttttaaaaaataagtgtccgagaggaatttattccatgtctgtaattaaaagtcatcttgtgagtgtgaggccctccttgggcaccctatgtatgattttgccttccccaaacccttggtactttccttccattcctgttttatttttcctcctaatgcctagagttacctactatatattttacttgcttcttgtctgcctctcctctagaatgtaagctccacatggttttgtgatttgttctctgctgtatccccgtccctggctagatgaatgaagatgtatgaaggcagggcagaagcagggtggggaatgggtgtgtagaggagggcaggtggcgcgaggcatgaggagaaaagtctcactgtgcccttcgcctttttgatgtgtcatatcaatgggatgcagatccctataaagttctgtgagaagttcagatgatgactctcttctgcttgtcactcaatgatggaggggcctctctgcagacgccggcttggtctcttggcctctttaccccactgccggctcgggcctcatctgacagccataggctggtttgaccaattttatcaatagagactgggctgggggcccatcctctcagaacatcaccaacagcatgcaaaggtgtcccaatgagggtggtggtagtcagcagtttgtcttgattcagaacacgttgcccaaccttcagcgtggttggattttgggccagctgcaaagccacatgctggaaggcagcaggaacagcctgaatgagccactgctgtgccatgagccaggtgtggccttgaacagggcccgccaccgtcccttagtctcctcatctgtagaatagggaagatgcgcgttcactctgcagggttgctgggagccttttgtgctgtccagtgatgcagggctgttagggcggatcctccagtcagcctgcgccag

SEQ ID NO: 134655 - DNA, 1094 bp, Homo sapiens
tggtagccactagccatatgtggctatttaagtttaaattcaaatgagtaacattgaataaaaatgtaaatccagttccccagtcctgctagctttgtttcatgtgctcagtaggcacgtggaggcagtggctcctgggttagtgtagattataaaacgtttccattatagcagaaagttccattgaacagcactgtaaatattcctactcaaagatgaatgagtgtggggagggaatgtcagggcacttaggagacagctgagtggcaattgacgaaaaattattgcaattttaacctcattttcatttcatgataaaacacttcctaaagcaaacttttcagaggaagacttgaggtttccggtattgacacattccattagaaggttgaacccacaacactctcaactcttcagttgcctgtcacctttagcacaggcagggatatggggtgcccgtgcttagccaaggagtgactccttcctgccttgactcctcacgctgctggaaggtcccctgtggggaaagtgcatgattagaaactttcatagcaatttatttcttttgagttagtggaaaagaaaggtctcatcactcttggtttgccacttgtgattctattaaaggaagaagaaagaaactcgttgatgaaacagacacctttctagaaggtctactgcaagcttttctgttttgcttggtgggttcatagcagcagagcttggactaagtgaggggagccccaggcacagatttacagggcattcactgtcaggtgccaaccttgtactcacatgggccaaagagggagtgtctccttacattttgcaccccgggtgcctagcttgcctcactcctgtcccatccagggctggctctcttggggcccattgagccttcactctggtgggctggctgcatggttctaggaattctggacttgcacaggtatagcccctttagcacatacaggcgcatactgtgtctgagcctctgtcacactgaacctctcaggtagggagtgcatctctctgctctttctatacctggaccagagtagaggactagtaagtggctaatgaatgaatcattg

SEQ ID NO: 134656 - DNA, 1113 bp, Homo sapiens
gaggcacacatgggtgccctgcacacaaaactggcatctcttgccttgagctcctctgagcacacatttgtcaaaggccaaagccctacattaaaatgctatcaacacgctccctcctctggaggcatttatttgaaagcaaaaccttgggttttcaggtctaaggaggagctctgaaaaggggctctcctaacccagatcttcaaacccatccaaacacaacagagactcgtgggggaaacacccccatttacacacaggaagaagaaacattgcaattcagactcatatgtctttggttccttttaggatttactcatccacacttgaaagtgtgtgcagactttgcaaatatacagcatttgtattgccctgctattctcctgtgtcccatattggaactagagaagaggtaggttctcccagatcacatgaactattccattgctgtgacatttgatgatgcctttcctcattaatcagagaattgcaataagacaactactggccagctgcctcctctgaaccccacatcataaataaactggaggcttgtttatgcttttcccaatagcagatacttttaaatggagagttagagaagtctgagaaaacaggaggaaagttacttatgcatgtcaaaaaaatttgaaattcaaagaagaaatatacagcaggctatttcaagtttttcttaaagaggtttagaagactttctcaaaagggaactatgtcacttgaagtttcacaactttcactttgctttggtgaatttcaccatcctgtgcagctggagtttgggctttgtggctgcagcgcttcccaaagctggcttctctctcctaactcaagcacttcactgagccctgatggcggccagggagccgacaggcccaaagccaggtcaaacccccgacctgccaaatgtatcccaaccacaagtgaggccttttatgtttggtgtgctggggcccatgaaccaaactgtctccaagccatggctcacccctgggagtccacttccaccaatcgaggaggtttatacccaagcctcgtggacaaggagctgacccagaatgatgccaatgagaaagacaggcctgagggagctgg

SEQ ID NO: 134657 - DNA, 1001 bp, Homo sapiens
ttctaaacctctttaagaaaaacttgaaatagcctgctgtatatttcttctttgaatttcaaatttttttgacatgcataagtaactttcctcctgttttctcagacttctctaactctccatttaaaagtatctgctattgggaaaagcataaacaagcctccagtttatttatgatgtggggttcagaggaggcagctggccagtagttgtcttattgcaattctctgattaatgaggaaaggcatcatcaaatgtcacagcaatggaatagttcatgtgatctgggagaacctacctcttctctagttccaatatgggacacaggagaatagcagggcaatacaaatgctgtatatttgcaaagtctgcacacactttcaagtgtggatgagtaaatcctaaaaggaaccaaagacatatgagtctgaattgcaatgtttcttcttcctgtgtgtaaatgggggtgtttcccccacgagtctctgttgtgtttggatgggtttgaagatctgggttaggagagccccttttcagagctcctccttagacctgaaaacccaaggttttgctttcaaataaatgcctccagaggagggagcgtgttgatagcattttaatgtagggctttggcctttgacaaatgtgtgctcagaggagctcaaggcaagagatgccagttttgtgtgcagggcacccatgtgtgcctcccttttccaggtaccggcggacgtcgagaaatgtcaggatcggatggagtgtttcaatgctgacctgaaagctgacatggagaggtggcagaacaacaagaggcaggacttccggcagctactcatggggatggctgacaagaacatccagtattatgagaaggtaatgagtgtgcccaacaagactggtttctaatggccagagcctttcacatgggcctaccagaaatccacaagctgggaatcctgctagtctcatctccttcccttattttagctgcttagtcttgg

SEQ ID NO: 134658 - DNA, 1104 bp, Homo sapiens
gtggcgtgtgcctatagttccagctactcgggaggctgtggcaggaggatggcttgagccaggagttcaaggctacagtgagtcatgattgtgcactactgtactccaacctgggtaacagagttttttgatcctgtcacgccatatatatatatatatatatatatatatatatatatatgtatgtatgtatgcacacacacacacacgtatacacacatatatatacacacatatacatacatacatacacacatgagtgagtgtgtgtgtgtgtgtatgtatgtatgtatgtatatatatatatatattgcgatagggtcaaaaactctgttacccaggttggagtgcagtagtgcagtctgttacccagagttcctttcttctgtaactcccacaccttccctctgctgttcagcggccttcctactactacaaaaccaactatgtcaaatgtctctgttgctccctttggtaattaatcccagcgttcctaaagtcctggtcccaggaggacccaaccctggtcttaagtacgtgtttatctgtcttcccactatatcacaggcagggccactgtcttggggcctggtattgcttctatacatatttaacaaatgctttttgtgcacttgctgtgtgcaaggggcagtgtgtaccaaattgataaacagcaggattcctgccctgtggagggtatgtgttcatcaaaggagcccacagcttcagagtgagataaggaaaagaacgggaaactgggggagaaaatactagggggcataatgcagactaagggtgggaggggcaagtggagtggtcaggaaaggccagtctgaggaaatgacatttcatccgagtctcagagacagaggcttggaaaacatatattccaggtataggagacaacatacgcaaagtccctggggcaggaaagagtttggtacatttgaggaccaaatagaaaactggtatggccttggtttatcatggctgacatacaaagtccattgcagatctgaagtgatggcctagggagagagcaggacctggaatgccacagaccccagatcatcttccgtatataaggtgggcttcagagtttag

SEQ ID NO: 134659 - DNA, 1208 bp, Homo sapiens
aactcctcccacctcctcagaattcctccttcctcctcagaactcctttcacttcctcagaattcctcctggctcctcaggattcctcttcagagctcctcccacctcctcagaactcctcccgcctcctcagaactcctttcaccttctcacaatttctcccacctcttcagaactcccgctcctcacacctctcccaccccctcagaactcctccccacctcttcagaacctctccccacctcccccaaacccctcctgccttctcagaacccctctccacttccccaaaactcctcccacctcctcagaactcctccctaaatgactcagtacaaagtcctcctccacccctggggctgctactgagaagccttatgtgattaacttgccctctttatgcaagagactttccaaagggcgaatcatttctgctctcagaggacaatgccagagtgttctgagttcttggcctttcacaaggatctgggatgaaaagaggttggtgtagtggagagaacatcagcgtgggaaccatgagctctaccatggacaagctgtgtgtctgggccagttatttaacctgagtcttgtcttccccatccatgaaatcagtgtgtatgtgtcgagtaataattctccttcatagaggagctgtgaggactggtgataactaatgtaaagtatgtcaccatgtttggacataataaaactcaataaacactggcttccctcttccatattcccttttgagagattcaggtgtggcccaaacaagcaaacttgaggttggtgaggaagagtgggctttccacccgctccaagtcaggtgcctggcctgctccaactatgatttccatcctgcataagcgccacccacacctggagcagtgtctccatccctgccgagattctagggactcttcaggggtttcctgcttgggcttttttctgcttttttgaaaggaaaagaacttcctccagtaaatccatttccattcactggatctgagctttacagactaacatgaatgcatttaagccttgcagagatattgctgtctttcataaagatggggtgacgcattcaaaacaaacacctgttacctccccgtttgtaatagttatggatgacacatgcaggcatcattagacaaaggtaacccagcaggatcgacaacgaaagggtaggtcagagcagaattgaa

SEQ ID NO: 134660 - DNA, 1347 bp, Homo sapiens
ggctggtgtctcatgaggtgaggaggctggcccagaaggaaggggacgttaggtggtgaagcaggctcccctgggcctctgagggccagcagtcccaaccatttgcctcttcgttttgaccaagcacaaaagagatattccctagaagtgtcacacggaggcttctgtgccaaagactgccttgtagaggtctcatcacctcacacttcttgacttcacaaaattgtggccctgagatcagtactcctctcttaagtatttattattattattatttactttacctcaagcagacagacataggttttgaggcttgaatacatggcagtggaatacaaggccctccctagcagccgccccaggcctggaaagtgggagatttcattcgcccgggttaaaaatccagaggaagacagaagagaggagtcctaggaactgagcagattttagagacgcaaatgatgtttaagagagccttgtgatttgtagcaagcatgggcactgctttttcttactaatgtggtagatctacacgaacattctaggctgttctgctcagagcgaggaaccactgctcctcaatggggagggaacataccacccagccaggcttagcattgggttttatcctttaataaaagttttataatgaatcctgttcaccttaaagtgtgattatggagatgattggctccatattccaccacgtcattccttcaactcaccagacacctttctttagttgaaataaaccagcatgacctggagatcatggtgactgtaagctaagtctgttttcatgccagatttcagccccacccagagtgtgctctagatgttgttgatttgaatggttttcccagttcccactccacatggggaagttgaatgaatgcacacctgctgctcacttcttgtgaggctgccttttgtgatcaaataacaggaagttctgctttagaggagggcacgatgaccatgtggcagtctgcaagtggaattttgggatggcagcccgaggaacatccagagttactgtgtgacttggtcctgccatcgttagctttgaaatcacaggcattgggctctgttttgacaccattcattggactgcgggacagtcattctttacgttctctcttgagctggtgagagaggaggaagagggaagtcaagagcaacctccaaggcctatgtcagcctcttctccttgggtcttggggtgggttagaactgggttccagtctggccagatgggttgctggctgcactgagggtgattcttctcagaagatgggctgcctgtggtcaggacagggcataccagtctggactccaccttcccag

SEQ ID NO: 134661 - DNA, 1054 bp, Homo sapiens
gtaatgaatgtgggaaaactttcaaacaaaatgcatccctaaccaaacatgtgaaaactcattcagaagataaatctcatgagtgaagttaatgtgggaaatttgttaactaaatttaaggttttgttgaaccttggaaatatgctgattttaaagagtgttagaaagcctttagcaagatgtcacaccttgttgtacatgagaaactttgaaaatggatcttcatatagaatcagtggatggaaacaagggtttaaacttgatacaaaaccttttataaaaaatattgttttaactactcaattattataaatgatctacatgttcagattgaaattgaaagctttaaaaattgtgaattatttgaatattcaaagcaatggagaaacaagttatatatgctgacagttcctgtgtttcttcttgttttgtacttaagcaccatatattagagttgaatttgcatatctgtttattgccttatgtaaatgagtgtggccatctgtataagcctctttgacattttcacccagctctttcttaatgtctgtgttggcttctgcatcagcagaaatctttttaaaagggttgttatatatgtaaaaaatgttaacaggaaaatgagagaaaataaagcagctgaggatacaaatgtgctggtagggagcgatattcaagatatattgtgaagtgtgaaaaagtaggttgctgaaccatgtatatagtatgttcccctttgtgtacaaaagggtatgtttgtttaacctctgtctcttatctctgtatgtgtatgtatctttgtatgcatatatacatgtatctgtatgtgaatagactttgaaaaaatacagaataaacttcatggtggttgccattgggcagaggagtataggactggggtctaggataggagcaagacttccttgtatatttggatttttaaatcatgcacatgtattatttttataattaaaatattttaatatgcataaatcaacattatttaaggttgtcactgagcccctccacaacatgtgagatcaacatgtgagat

SEQ ID NO: 134662 - DNA, 1101 bp, Homo sapiens
gtgcctgcacgttcctcaccagctaagctgtgctgagaagtgggtaagctaggtagtagcccacagcagagcccaagaccacaccaaggaaaatccaggtgttgtaggacattacggccagcatgatgaagtagccgatgaccacctggatgacatggattagagactggccaaagtgacacaaataccacctagataaaaaggagaagcaagttaatcctggtaatgagctggtaatgaggaagctgggagtagatatcagggagtagaaagctgttgagttacgtgacccgattgatttataacttgtatgcttaacccaggagtgatttctttctgcccctcccacccccgcccccagaaaaaactcgagatttatttttaaagagacatatcttcactacatttggtttcaagcttcctggcatcctaggcaaaggggaaaatgagggtatctataatctgtctttctgataaggaataagagaaaatcatcagtaaggcatatttcccccctgaatctacttcgggaggcagtatgacaatggaaagaaaaagcatggtcttaggtgacattatcagttcctagacctgccactaactaaaagtggcctagacaaatgtcttaacctctctgaacgtaagattccttatcagtaaaacaggaatgagaatacttcccttgcagtgcagttgtgaagatctgagacacccatgtagggtggctagtgatggagcgggcaggcttattaagcacaggtgaggctggggctggacagagggcagaacagggaccctaaatggttgcctgattcgagtgggaagggaggagaggagagcttgtcatcctcctcccaccaagtgggatacattgcttcaggacagctgcagatcccctcctggatatgggagcctagtgacccatggaactggtgagatttgggggagggtgggtggccacctcatttgctagataggggcctgcacctgaagatcactgttccctaaagaaagccttctgagcctctcaagtggctggctgttcacagagtgctttggcctgggcatcaggagacatgagctctagttcacttggctatg

SEQ ID NO: 134663 - DNA, 1128 bp, Homo sapiens
cccgaagtagattcaggggggaaatatgccttactgatgattttctcttattccttatcagaaagacagattatagataccctcattttcccctttgcctaggatgccaggaagcttgaaaccaaatgtagtgaagatatgtctctttaaaaataaatctcgagttttttctgggggcgggggtgggaggggcagaaagaaatcactcctgggttaagcatacaagttataaatcaatcgggtcacgtaactcaacagctttctactccctgatatctactcccagcttcctcattaccagctcattaccaggattaacttgcttctcctttttatctaggtggtatttgtgtcactttggccagtctctaatccatgtcatccaggtggtcatcggctacttcatcatgctggccgtaatgtcctacaacacctggattttccttggtgtggtcttgggctctgctgtgggctactacctagcttacccacttctcagcacagcttagctggtgaggaacgtgcaggcactgaggctggagggacatggagccccctcttccagacactatacttccaactgccctttcttctgatggctattcctccaccttattcccagcccctggaaactttgagctgaagccagcacttgctccctggagttcggaagccattgcagcaaccttccttctcagccagcctacgtagggcccaggcatggtcttgtgtcttaagacagctgctgtgaccaaagggagaatggagataacaggggtggcagggttactgagcccatgacaatgcttctctgtgactcaaaccaggaatttccaaagatttcaagccagggagaagggttcttggtgatgcagggcatggaacctggacaccctcagctctcctgctttgtgccttatctacaggagcatcgcccattggacttcctgacctcttctgtctttgagggacagagaccaagctagatcctttttctcacctttctgcctttggaacacatgaagatcatctcgtctatggatcatgttgacaaactaagttttttttatttttcccattgaactcctagttggcaattttgcacattcatacaaaaaaatttttaat

SEQ ID NO: 134664 - DNA, 1036 bp, Homo sapiens
agggctgtctgtgctcttttgggaatctaagggtaggagtcttacagatctgggtcagttaatgtgcacaaaacgttgtggcatatttactccctttgatacctaaccctggaacttttaggctttcaaagaaagtcaccactgtagtcctagctcatccctggggcatgatggttctgtgaggaccagtccagtcatcctcttgctcctgcaggcttagtcctgcagtctaggaagccatgcaaagaaggtgagagggtcccttctttccattgttcatggcacctgagggattcttcactttgagagcagcttccattcccttagaactcatgggaccaggacttatgcagagaacagtagtgagaaaatacttgtggtcattttcttgattccaggatcttccaaagattatgcaatcagtctttaaaaaaacagaataattaattttaataaaaaatgtttcttgattttaaatgttttaaaagataggacccaaaattccacttcatctggcctggcatcatccttgcaggctttggatatgtctcccgtgtgcggacctgggaggcagtgagaactaattatttctttgttgcttaacaaaaggcggtgctgtttggcactttcacagactggcttatctccagcaaccactgcagaagacagtgttatcaccattttatagaggagaaaactgagacttagagaggtaaagtaatttgcccaaagttacatatctaggaagcctcagcacaagaattcaaatcctggccatctgattccagagcctgggctcttggccagcacagcctgactgtcactggttgggggaaggggcggtgatgcttttagaaacaggcttcttgagacaccaggcagctttccagttccctgcaaacatgggggaatgccctgatcagtcctaaaggtgtgacatagtctactttctagggcagttatttcttattgtaaattaactagtggctattatatttgcttctgcccgcagggagagaagatgctgagtaattgt

SEQ ID NO: 134665 - DNA, 1048 bp, Homo sapiens
atatggaaaaatactgtcgtcgtggcctaaggtggcctgactggctctgggtgtgatcccatcatttgaaagagttgaatttggaggcttggccaactggagaatcctaagaggtgaagaacacggggccacagcctcccacacctctagcctgactggcaccaccctcgctccttccagctaaggtagtgggggtgaaagggactgatgggccatgagagaccctctcttttcacagcttgagctcctggcctttctcctctggcttggcaagggaacaggacctacccggctagcagggattgatgctacagacaggcacgaactgaatagtctctactaaggcattctctgctctggtgagcaactgccaaccagaatccatcttcacagggccaggcaaaagggaaggcagcgtgatgtgtatacaagtctctgggctaatcccacgtcactaccaattagccagacctcgtacttctctctggacatcaatgacgtgatctctaactctgacagtataggattttcaagtgtggctcacagcttctgttttgtcctgactaaagttctggctctacatttactagctatataagcttagttaaattatttaatcttcctgagcctcagccctctgatatataaaatgggataaaagtacctacctcattggattagtagattaaatgacaacatctgtgaagtcgttttcagagtacccaagaactacatgttaactggacagtattggtactaataccaataatatgctcactaattaaaagcttccaactatatttagggcagtcacttagaatatactcaatttggtttttcccccttttttcctttttttaagggcagaattgctattctggattctcaaatgaaaatttaactcttgagaagaaagactcatggaaggaactggtacattccccaaaggaacacaggcaagagggaagggctccgatacatgcaagctggagcatagatccatcacagctctctgctcaaggttttggcaaaaggcaaaatccactct

SEQ ID NO: 134666 - DNA, 1090 bp, Homo sapiens
ggcagccataactccctgtttactagttcagtctacatagagttatgtgaggttggttcatcacctgcatggagaacacctatgtttaaagtgacatcatactttgttattattcaggccaaggtgacagaggagttagcagcggccactgcacaggtctctcatctgcagctgaaaatgactgctcaccaaaaaaaggaaacagagctgcagatgcagctgacagaaagcctgaaggagacagatcttctcaggggccagctcaccaaagtgcaggcaaagctctcaggtatgtgctaggtgggggatgctgggattgttgccatttaaactcaaggaattaagctgttttcttcctctcaatttttttggcatgatgctcatgaagtttttgaaggactacaccaaaaattaaaggagactagtataaaacctacatgattgttttacagaaggaacagcaaaagaactgactattcatgtggaattgatcagtgccacagttcccttttgtttggggaggtgttggcttcaaaatctttggtacttatgattggcttcaaatgcctggaatagttgatgtgttgttctaactcatgactcagtggaagtttaaaaaagaaatgcttcctggtgtggtttcttctttcctagaagatggattgcaactcttcagcctcacactcaaggcccatcctgcttggcttgtctcccgttatattgtccagttcatcctggccctgaccatgccagcaagcctgctggctgctcttcagctcatcctgtagttcttgtcttgcttcttatccatgctattctctggacttgacatgcccaccattaccaatattcgcttttagtcctcttcaaaatctgcctctttcagaagctttcctagttttctctagaacatttgatctctttaaaaaaaaatcctttatctcatagtgcattattataacccttatcacagtttgataagcatggtgttttgctcatctttgtaaagtcctctcctccatattagtgttagttcagtgcctggcaagacatggtgattggatagaagatttgtgaagaccagcaggtt

SEQ ID NO: 134667 - DNA, 1047 bp, Homo sapiens
ggaaacaagcatgattatgagcaacatccagcgaatcattcaggtgagggtgattaagaacataccactcaggctgaaggtcttacccatcctctcttctcagaggtactactctttaacacctccaccccagaaatagcctgtgataaacgctacactgggttagacaattctagaaaatccattatggcttaattctgtccaagtgacttatcactatatattctgaaggaaacattgcttttttgaccatacttcagaatttcacttctttttttagccatttattcactcaatccattggacctagtgatttgtatccatcaggtgtaatctgatgtgttgttttaacatacatgtggacataagttctagtgttttgtctcaaaacatgttaacaatgtcacctgtcagttcaagttgattctcttctatctggcacttttctcccaagacacttaaattgtacatcatatattttgaaattaggaaaatgaaagattgaagcaagagatccttgaaaagagcaatcggatagaagaacagaatgacaagattagtgaactaattgaacgaaatcagaggtaatgacaggtacggggcctggctaggatggacaaaagggtttattatgtatatgcccagcttaagtacacgtatttgtttagggcagtacgtatgtatttctgccatttctgtttcctgcctgtcatgtgaattattgcctgttttctgagaggcattgcagtagaaggagcttagtaggctgtgatgtagggcagacctgtgtttgattcctgctctgaccctcattcattctgtggctctgggcatgttatttattcctgctggccctagtttctttatctttaaaactggtattattacttacagaactctggtgtcaactcttctctcttctgtgtgggctaactctattttatccatcagaactcagccaaaacttcactgattcccatataagacctaaggattttgtactttttgtagatacttctgaagatttggaggggtgggtggggagga

SEQ ID NO: 134668 - DNA, 1077 bp, Homo sapiens
cttaattttaacttaattcttctctagtggttagttctttattgaatataatcgtcctttctcaattgaagtgaaatatataacttagactgatttttagtattcttttactttgatagaaaacaaggaaagggcgatggtcttgaaaaaattttttctggaatatactttatattttacatttttgttttatttcttggaaaagctctatgtagatttaacatcttaaaggaagataggatttctgaggcctattgttataggattatttttttctggtctggaaatgcagtgtaaataagaatatttttattaaaaattttatgtgctacttattcattttagaataatttaaaattatagaaaagaaacatattgaacaaaaagggcattcatctttatatattgctttgtaacctgatttttaaacctaatgttgtatcataaacatttacattaacataaatgatttaagtaaataaagtggtttaaaggaaacccagtgttccattatatcattttattataattcctttcactctgttattagacatttaggttggttaagagctgtagaaatctaaaactgggatgtttttctagaagagaatataaggggacaaggtgaagttctaaagtaaaagaatgtctgaaactttggtctttgaactatagcatagcagattacagtcactgtatattgtgcctcaagattttctgtttcttatatgaagcaggaggtagaataactttgtttagagttatagctttgattttatgaaaagctttggttttatgaaaataaagaatgttggaaaaacatcctaaaactatattatccaaaaacagcatgttaatcaggtgcagtgaatcctacgttatctgattttcattgagtaccttgaggactatggggatgatttgtaagaagcgaagaggctggattatttcttgcaaaagaccactttttttgtgggaatagattagatttgtcttaaggcagttactggcttggaaaatgatacattctgaagagtggttagtttagctgcttcagacaatagaacatcaacctct

SEQ ID NO: 134669 - DNA, 1016 bp, Homo sapiens
tgcaggttagttacatatgtatacatgtgccatgctggtgtgctgcacccactaacttgtcatctagcattaggtatatctcccaatgctatccctcccctctacccccacccgacaacagtccccagagtgtgatgttccccttcctgtgtccatgtgatctcattgttcaattcccacctatgagtgagaatatgcggtgtttccttaggtgaagtttgccagagattctggctctgatggtcacagtgttagttcccgcgattctgcagctccgtctcccatccctggtgctgacaacctctctgctgatcctgttgtgtcaccacccacatcaatacctttcaaatcagggtaagatactgcagttgtatcaagctcttttatggctcataaaaatgattcttagaggggttcagaaatagagatatagttaaaaactaaaataattttaaataactggaaaaaatgggatcagggaaatggggaagatacttgcatcagatttttctgacaaaggtttaatattcataggccacaaaagcactaactcagaagaatacttataaaattctggaagaaaactaagccaagggcataaatacaaaattatatactcatggaaaaaatgtaaatataagcatttggatggaaagttgttcatctttactagcattcaaagattatgcaaactaaagaagagttaaaattctgttttacagtcattaaattggcacacatttaaaaaaacaatttgcttatccaatataatttggacttgtgattctggattttgttttcaatcttggaatatggtctatttgctttcagggagccagctcttcgtaccaaatctaactccctcagtgaacaacttgcaataaatacagtaagtataagagtcttggccaggcatggtggttcacacctgtaatcctaacactttgcgaagctgaggcaggaggatcactacagtgcaggagttcaagaccagcctaggcaacatagtgagacct

SEQ ID NO: 134670 - DNA, 1061 bp, Homo sapiens
atgagatttgtgaagcatcatctccatcttgggtacatagagattatttggctagggtcacaaagttaataagtggcagtgcctggatctgtacccagacattctgactgcaaagccatactcctaggcactttgatccctggcaagataactggcttccgtttggtttacttctaaacatgtaatctgttttgttagtggatgaagctatttgagaaagagcagtagcaataaaggaatgagtacttattgagcttaaactacatttatgctgctttgattttgtcttgcaggtgtgcattgctaagtgcaacagtacctcttccctggatgcagtgctctcccaggacctcattgtggcagacggccctgctgtagaagttggagattctttggaagtggcctataccggctggctctttcagaatcatgtgctgggccaggtaagaaaatgcaccctgcaagttcttttgtaaacttatatagcatgagggctattcccagggaagatactattactgtgaacggctgctgttgtcaaatagaaatattttaggatccccactttagacactgcaattgctttgggggcatattatgaaatgtgaatgtgtaaaagatcctcagtgccaccctgtcacttctacttagggaaagtgggaaccaatttccccagtactattatttttgctagttgttcatgtgtatgtcttgtcctcctataccagttttacacttgaatatattcttatgggattaagtcttaaaacttctttttagaccctccttatagtttttcttatagtagatactgtaaatacattgaacttactgtgttttaatattattgagcccttaaaagcaatatattatatgagagaaagacctttagactatgagtttagaaaaatctgaattagagatccaattatatactaatttgactttgatcaagtcatttatactcttatttttttccatttgtgaatggaggctaatgatcttgctctgcttactcggcagggttagtgtcagcatcaaaatgagataatttatttgaa

SEQ ID NO: 134671 - DNA, 1037 bp, Homo sapiens
tattcacataatagaatactacatgacaataaaagagaataaagtcctggaacatgaagtatcaaggcttactcttatagatacggtgagtgaaagaagcaagacaaaagagtatactctgtataatcctatttatacaaatttaagaatagcaaaattgtctgggtgcggtggctcacacctgtaatctcagcactttgggaggccaaggtgggcggatcacctgaggtcaggagttcaagaccagcctggccaacatggtgaaacctggtctctactaaaaatacaaaattagtagggtgtggtggcgtgcacctgtagtctcagctgctcgggagcctgaggcaggagaattgcttgaacccgggaggcagtggttgcagtgagccgagattgcgccactgcactccagcctgggcgacagagagactctgtctcaaaaagaaaaaaaaaaaaagcaaaattaatcagcgacagaagtcagaatattggttatctcagggtggggattattgactaggaagggcatgagggagcttcctgtggtgtgggaaatgctctgctattttttaaatctggttgatggtcacgtgggcacatatatgtataatgaacatgtattttatgtttttcatcaatttaaaaacaatttgtattttcttttacacaaccagccactcttagtcaccccttgtataaatgaaaacaccaacaaaatgaagacattgccaattacagttaaacagtaagaccaaaatgagaagagattaatgtggatagtgagaagataaaatttaaagttgaagccttaaaggatgaatagattttgagtttagtatgaagcacaacctttgatacttattgctgattttatattgctgattttatattgccttttaacttctgctgtctctctttttttttttctatctgtcgttgcttgtctacagtataggattcttctttatatcagtcaacaacagccagttacggttgctaggattcatgtgaactttgagctaatggtaagacttcat

SEQ ID NO: 134672 - DNA, 1039 bp, Homo sapiens
atttctgtggtaaaacttgaaaagccattatcttgtctactgtctttagggagtgcttgtaccctcaacagctgtcaaatgctcaaagaaagcctctccactgagatagcatgaatgatagatatttatatttaaagagtaagggaatagtatatgagctttaaattataaactgctgggccgggtgcggtggcgcactcctgtaatcccagcactttgggaggccgaggcagaagaattgcttgaacctgggaggcagaggttgcagtgagccaagatcatgtcactgcactccagcctggtgacagagcgagactctgtctcaaaaaaaaaaaaaaaaaaaaaaattttaaaccgctcacctgtgtccctgcctagaggctgaatgactgttgttcccacttctgtatgacagaaaagaaagctggttctgcagaatttagggaagtattaatacttgttgtttctcttccttttatagcacaaatggtcaatatgtaaagcagggcaaatttggtgctgcagttctggggaaccacacagccagagaggtgagagtgctcccacatctcatgtatattcagatgtcccaaataataccaatgagctggcttttatctggcttgcccgatgtcttgtttatcagaagataaggatgattatttgtattgaatgttaatttataacatcaagcatatagtaaatgatcacattttgcttactattgtgcgttaaaacaaatccaaccattcaaaattgttaaatttgacctttgtgatatgatcctagcttaagaatttgggcatttttttgtttgtttgttgttcaattgtggggtgcgtgtgtacacacacatacacaaatacacacatatatatacacatacatatgtatatataagataaaatttgccatttaaccatttttaagtgcataatccagtgccattaattgcattcacagtattgattgagcaaccatcactactatccatttcccaaacagaaagtgtaaccattaagcaataactctacttctt

SEQ ID NO: 134673 - DNA, 1048 bp, Homo sapiens
aaggatggcagggaccatgtttgatgggtaagtttgtatcatagcttcatttcaattgaataaactagtaaaaagcaggagggggagtagtcagtaagggtgactagaaactgtgatttgctaaaagcaagaatttacagtttgaagataccatagagagcacctgaactagtcacttcagtttataggtggaaaaactgaggtccagaaaaaagaaatgccttgaccaaggtcctggggataaacagggtcaactgatgatgttcaaatcacatacacaatcttgatttcaaagacactttgctgtgtccaatatttttatttatttttttttttaatttttaaatcagctttcctagcttgaagtgtttctagtattgaatggtgggatgtagtcaaggaggtatttgttcaaggttggagatgagcagcttttataataattccaggtttgggatatatcagtgaaatttcatttttcattttctactaacagtgccagattggcctcactttttggactggatcaggcagctgctggccatggaaatgaatttttccagtacacagccccaaaacagcctaagaaaggccagggaacggcagcaacaggtaagttaagagtgtattagccgagcgaggtggctaatgcctgtaatcccagcactttgggaggccgaggccggtggatcacctgaggtcaggagtttgagaccagcctggccaagatggcaaaaccccatctctaaaaaaaatacaaaaattagccaggtgtggtggcgtgtgcctgtaatcccagctactaggggggctgaggccggaggatctcttgaacccaggaggcagaggttgcagtgagccactgtactccagcctgggcaacagagcgagactctgtctcaaaaaacaaaacaaaactgaaacaaaataaaaacaagagtgtattagggttctctagagggacagagctaatagaatatacgtatgtgtgaaagtgagtttattgaggagaactgactcacacgatcacaaggtaaagccccatgat

SEQ ID NO: 134674 - DNA, 1083 bp, Homo sapiens
agatcgacccccctccaacaatccgccggtatctctcagccacgccctccagcgcatacttctcagtcactcacccgccgctcggcgagaggaaatcggtgtcgtcctcgtcccccgcaccgaacattgcgttggctttcaccgggttgcggggaggaagctgggtattcccagagtcccagggcctgtcaccgccgacgtcgtaaaatgccgcggcggcgtgctgctttccggcagggcgaactccagcacggtctctggaccgaaagtagactgggctctggagaaggtggggcaaaggcaaatgagaggctcgcgcgggcacgagcgccgagtgacgtcaggcctctccagcccgcagcggggcggagcttcacagccccttgcagggattggtcggtaatgctagggggcgggagggggcgggaaatcctcggcctcggtggcggtggtggacacgtcgagccgggtagaagtggaggggccgttcgaagagtcgtgagggggtgacgggttaagattcggagagagaggtgctagtggctggacttgacctggaaaggtaaggcttctctcggcccctctttcgcacccctgtgcatgggtaccgtccttttcccagcgggacaaggaccttcctcgccgctttcctcagctccgcggaaggagaaagagctcgggactggagggttaaagactggggcttcggcccggcccctgcagtggcatagccagagtgaccttgggccggggtgctcggtgcctcagtttccccgtgtatgcaaccggccatttgtccagttcttccatgtgcctgctggtccagaagattttagagctcagaggccatggatttcaatcccggcctcctcgtaatctcagaatttacagatagggagacgaaggaactaagcacccgggtgactagtccgaggtcacaaagagtaaagggcagactgagactggattcctcgtcctttgattcaggacatagtgagctagtgggtgaacaagaaccttatcagcccttaagcactgtgtgcccttacagagtgactattgaaagactgtagcatacacctc

SEQ ID NO: 134675 - DNA, 1018 bp, Homo sapiens
ttttttcttttattttttcttgaaacaggatcttgctttgttgcccaggctggagtgcaggagcacaatctcagctcactgcaacctctgtctcccaggctcaagcaatcttcccatctcagcctttcgagtagccgggactacaggcatgcaccaccacgcccagctaattttttgtatttttgatagagtcggggctttgccatgttgcccaggctggtctcaaactcctgagcttaagcagtctgcccaccttggcctcttagagtgctgggattacaggcatgagccaccatgtccagcctcatttgcattcttgtactgcattttcattaaatcattcaagttccttttatcttgtgtaacatatttaattgcattttcctactgaataaaaaaaagggaacagttcaaatgttttctagtttctgtcttatgccatattaatttccaatattactcataggcaaaccaacaacattattatccaaacagtttaaatgctatgtaatataactaaagcaaagtttagacaaggaggaccattgtctacatttgattataacaataaagcagttaaagcaatgctttgccaatgtatatttgtctgactagctagttttgtttaaatcaaactgtgaaaggctgtatacttcaagaaacatgaaagtgagccttatgtgtgacttagttcctttcagagattaattttgtcatctaatgagcaagcaagctattatatttcatatttactgtaccttaaaattggaaagtatttaacatattttatttgacccttacaatactatgagattggcagcgtaggtattttaatatctgttttgcaaattttgcaaattttggtgatttgcctaatgtcacatggctagtatatggcaaatgtgggtccagagctcagagcctttgatgcctcgtgctgcatgctttctccactctaagatactatctagaaaacactgaaattgtcacataaatcatactaaagcacagttagcgg

SEQ ID NO: 134676 - DNA, 1029 bp, Homo sapiens
ttggccaggctggtctcagactcctggcctcaagtgatctgcccgtcttggcctcccaaagtgctgggattacaggtgtgagccactgcgcccagccctattattcagagtgcatttcgacaagtcaagtgtgcatttgtttctcactgaaactattctttttttgttgttttttgtttgtttgtttttttgagatggagtctcactctgtcgcccaggttggagtgcagtggtgcgatctcggctcactgcaagctccacctcccgggttcacgccattctcctgcctcaacctcccgagtagctgggactacaggtgcctgccaccacgcccggctaatttttgtatttttagtagagacagggtttcaccgtgttagccaggatggtttcaatctcctgacctcgtgatccgcccaccttggcctcccaaagtgctgggattacaggcatgagccaccacacccggccctcactgaaactattcttatatgtacctaaacttttcagaccgaaataggctctaaagatgaattagtctgttccttgactcaggaagctatgaccagaaaggctaaattacctaatgtaatagaaaaccagggctagaacaaaaatttctagtcttacatttttcaaattgtaatcattataaagattaaggtgggcttcagcccaccaattccccttgcctgggaattatccagaacactgttgagtcagtgtttgagagtgacagcactgtgacaacattcagcatatgaaagttcacacaaagccatgataatcagagatgatctgatattttaaaggagtagaataaatggtgacatttttatgaattattctcaaaatttctgtttctgaccctgaaaatacaaatagtagaaaggcatttggggcttttatgcattattcacagaatgccaaaatgtagcctagagcttggggctgtatggaagtccattttcaccccacttagagccacttagaggtagagcagccaagagtactgcagataacagttgt

SEQ ID NO: 134677 - DNA, 1477 bp, Homo sapiens
cagcactttgaggggccgaggcaggtggatcacctgaggtcaggagctcaagaccagcctggccaacatgatgaaaccctgtttctactaaaaatacaaaaagtagccgggtatggtggcacacgcctgtaatcccgcctacttggaaggctgaggcacaggaattgcttgaacctgggaggcagaggttgcagagatcgtgacactgcactcaagcctgggcgacagactgtgactctgcctcagaatcctttttaaattaaaaaataagtaaataaaatctggagttcacaagtcttagattaatcactaatgttttgatgaggtatgagtgacaagtcgagtttgtttagatcactgttgaaggtgtatagtatagattatgtagtctattaaacacttgctgtgtgtctcacagtctgctgcccatgtccctcccagaggctagttcaccttcatcgtatttattgattttttattgagcaagtaccaaatttgaatcatttgaccaaaatgctgttgaaatctggacacgatccctgtagcaatctctatgcgtaggacctgttgccaaactaaaaacccatgggacttttacaggaaatgtcaccaggagactcagctagaaattagtagagccgggatttgaataccttctgactccagacttttttttttttaactcctacccctagacctagactcttaacaatagtctgtaagatcaaatgtcacctgcaaagggtggcatgtgacttttagaagctcttaaaatccaggaataaattcttcttactaattcttgtagaatagtcttaagttgtgcccctcaaaccattttatgcccagaaattagatgattcttctcatcttcctaaagttttaacagatgccattctggatcctggaaaattaaacagctgtagccataaggatttaatctataaagatttttttccttctgtaaatctgcctcaaagaagaacttaagcaggaaacatgagtgcctgcatattacctttaaatagcttccaattgccctggaaataaaatttagaatccttaaaatgacctttaagattttttttttgagacacagtctcgctctgtcacccaggctgcggtgcagtggtgtgatcttggcctcactgcaacctctgcctcctgggttcaagtgattcttctgcctcagcctcccgagtagctgggagtacaggcatgcgccaccacgcccagctaacttttgtatttttagtagagatggggtttcaccccgttggccagtctggtcttgaactcctgacctcaagtgattcacccttcttggcctcccaaagtgttgggattacaggcgtgagccaccatgcctagacattcttaattgagtatcctttatgcttccctcttcaacctcattagcctctcctccgctcactcagtatgttctgttcatactaaccttgatcccttatttctt

SEQ ID NO: 134678 - DNA, 1045 bp, Homo sapiens
ttttgagatataagataacatgtagaggactgttaaaaaagcaagactaggctgggtgcggtggctcaccctgtaatcccagcactttgggaggccaaggcgggcagatcacctgaggtcaggagttcaagaccagcctgactaaaaaccccgtctctactgaaaatacaaaaagtacccggacctagtggcaggcacctgtagtcccagctacttgggaggctgaggcaggagaatcgcttgaacccgggaggcggaggttgcagtgagccgagattgtgccattgcactccagcctgcgtgacagaccgagactccatctcaaaaaaaagcaggactatagtaccacaaactatctaaaagttgtaaccttgatgatttccttgatgaacctttataacattaattattaccatgaactaattttgaagacccacaggttcttaattattcaggtccctcattatcaattagagaaatctactcaatgatgccacattatcaaatctcttcagacatatcagtgacccagggcaaggtatatacaaatcccaagaaaacctttcaaagtatgcacctgttttgaagtgtcatttgtgcaggatatatttcacatccaaatatactaggagatagaacaagagcagaatctacttgctctcattgtcagtagacaatggatatattgtaatggaatcctatgcaaggcttaccgaatggtgtatgaataggaagatacaaagccggtggagattaatatataaacatacactgtaggctcaaacacaaaccaatcctgataagtccttacgctcactaaaagctttattttaggaaaagatcccacgggaatatgccaaagctaaattacatcaaaaaagttaaaacttacaaattaattattaaagcataataaataaaagtgattatatttttttctcttcccacttaaattttcagtgatgtgctgtatgtatttggataagttatcttctaaagcaatcgaacacacctaacccattctctctagaatagaaattcaact

SEQ ID NO: 134679 - DNA, 1087 bp, Homo sapiens
attgctttagaagataacttatccaaatacatacagcacatcactgaaaatttaagtgggaagagaaaaaaatataatcacttttatttattatgctttaataattaatttgtaagttttaacttttttgatgtaatttagctttggcatattcccgtgggatcttttcctaaaataaagcttttagtgagcgtaaggacttatcaggattggtttgtgtttgagcctacagtgtatgtttatatattaatctccaccggctttgtatcttcctattcatacaccattcggtaagccttgcataggattccattacaatatatccattgtctactgacaatgagagcaagtagattctgctcttgttctatctcctagtatatttggatgtgaaatatatcctgcacaaatgacacttcaaaacaggtgcatactttgaaaggttttcttgggatttgtatataccttgccctgggtcactgatatgtctgaagagatttgataatgtggcatcattgagtagatttctctaattgataatgagggacctgaataattaagaacctgtgggtcttcaaaattagttcatggtaataattaatgttataaaggttcatcaaggaaatcatcaaggttacaacttttagatagtttgtggtactatagtcctgcttttttttgagatggagtctcggtctgtcacgcaggctggagtgcaatggcacaatctcggctcactgcaacctccgcctcccgggttcaagcgattctcctgcctcagcctcccaagtagctgggactacaggtgcctgccactaggtccgggtactttttgtattttcagtagagacggggtttttagtcaggctggtcttgaactcctgacctcaggtgatctgcccgccttggcctcccaaagtgctgggattacagggtgagccaccgcacccagcctagtcttgcttttttaacagtcctctacatgttatcttatatctcaaaatgaaaattatgactgttcagtttccctttctagcttttagccttaaagctccttgaggaaagactccatgtgatgttcatttct

SEQ ID NO: 134680 - DNA, 1161 bp, Homo sapiens
tatgttttggagctctaaaaaataatttagataccagatagaatcttttgcaatccattttctttcattcttttccagagtgtttaatttttttttttttttttttttttgagacggagtttcactcttgtcacccaggctggagtgcaatggcagctatcttggctcactgcaatctctgcctcccaggttcaagcgattctcctgcctcagcctcctgagtagctggagttaaacaggcacctaccgccatgcctggctaatttttgtatttttaatagagacggggttttgccatgtttgccaggctggtctcgaactcctcacctcaagtgatccacccacctcagcctcccaaagtgctgggattacaggcatgagccaccatgcccggcctcagagtgtttacttatttgataagttattagtcctggacataagactaactcaaattaagtaccacaaaataagtttaaaactattgttctaatacttcaattttacaataaattaagtgccacaaattgtgaaatgactcgccatcaatcatagagttaatatgtcagagctaggacaaggacccagaccttctagagctacctagaccagtgttcttttagtctaccaaactatggcccacatccttcctgattcttggcacggcccatcttagacactcctagttttgaggtagatgattacccatctgtttgtgtctattatgttgtatggtatactttaaatttaacttgcgcaaactcaatagtcagttggactgccttaggtaccagatgtctgtttggagccataaaatcaatttgttttgggaagaaggagagcatttagttcaggtaatgtgttaaattagcagtttgaatacatttatatcattaccaacacttcacagtgtgaaagacttagaattgaaatgcctattcaggaaatgtagtcagccactgatgaaactaaattgttttattccctgttccatattctacattgtgtgtttcagtgtaacaaacctaatttaatgatatcaagcagtctgaccaaaaggttattgttgttctgattatttttcttatcttaatcagaaagtaaatatgttcttggcagaggcaatagttttcagttacaccatcttagccgttctcctatctg

SEQ ID NO: 134681 - DNA, 1879 bp, Homo sapiens
gctacttcctcatgctcatcttcatgacctacaacgggtacctctgcattgcagtagcagcaggggccggtacaggatacttcctcttcagctggaagaaggcagtggtagtggatatcacagagcattgccattgacatcaaactctatggcgtggccttatcgattgcagtgggaagttgttgaagacttgaagacgtgattcctgctccaatcatcccttcttgctcctctttgtgcacgtacacacacacacacacacacacacacacacacccctgctcaacagaggtttagtttacagtctctgaactaaagtagtaacctcccaaattgttttttctaataagctgagattcccatttctcttaaggagaagccacccatgagatgtcttttccttctccatcatcttagagccaagttatatgttcttgtctaatccatgtagctttttgttcaatgacttgatcatctgcttcctttttgaatttttaacagatagtaagtaaatttggtggttttttcccctgggtcagtgatggaaaggggttaacttcagccaggattgatggcagctgagggaaattcttgcccaactaaacccagaactcaaacttaacattagaaaataaggtccagggccggacacagtggcccatgcctgtaatcccagcactttggggggccaaggcaggctggatcacctgaggacaggagttcgagaccagtctggccaacatggggaaaccccgtctctactaaaaatacaaaaattagccgggcatggtggtgggcgcctgtaatcccagctactcagaaggctgaggcaggagaatcacttgaacctaggaggcggaggttgcagtgagccaagatggcgccattgcactccagcctgggtgacaagagtgaaactccatctcaaaaaaaaagaaaagaaggtccagcttttggattcaatgagtgggaaatacattgtgcctttctctagatgtgatacgttataccaaaatctttgtagtgtgcagagcggtggtttgagactaaatacaggcttagaacttgcagagtgtgtattcttggatggctgatgcatcgacttgcattcccacttaacactttgattagcatgaacttgccaatcaaaaaatgacaatcaatttgagaaaatagaaatagatatttttaaataaaaccattcacagtttactttgtcttgataccttggtttgtcccagctgaagtgaagcaagagagtttgaattaatttttccattataatgttttcgcatgtctgcctctaaaactgtgattttcaagctttagcgtgcatcagaatcacctgtagggcttgttaaaacactaattgctgggcctcaacccaaaagcccccaaagtggcacttctgagttcctgctgatgttacaagggaccacacttttgagaatctgtgctttaagctaaggaaatattgcctggtgggttggctgcctggtattgggcatggaaatttgaattgctgattggtagatggtgtgtctggacttaactcacgtagtaaatactgctgatcaatacctaatcattccacatttattgagctccacctgtgtgtatgtgtacccaagcacacatgtgtgaagggctatagccaaagtatttttactagcctgtatgaaatcactagtccttatttttaaaggtctatggtttcttggaagtagtttgattgttgagagagacctttgatctgcagtgtaaatctaccagtcatgggccagaagggcaaaagcccagctttctctttggaaagactcaggctgtggtttgttgatggccaggttttcctcaggctccaacaactgtgcttatacca

SEQ ID NO: 134682 - DNA, 1035 bp, Homo sapiens
gtactggtcttgggttctagtcataaggggttccttataaggagcaggcggaggggagtacactttcatgtgatttaattttgatcctgccctctccagctgctccttcaaaagatacatcaaaagatagaaactctgggctgggcacagtggctcacacactttgggaggccaagcgggggtgcagatcacctgaggtcaggagtttgagaccagcctggccaatgtggtgaaaccccatctctactaaaaatacaaaaattagctgggcgtggtggtgcatgcctgtaatcccagctactcgggaggctgaggcaggagaatcgcttgaacccaggaggcggaggttgcagtgagccaagatggcgccattgcactccagcctgggcgacaagagcaaaactccgtctcaaaaaaaaaaaaaagatacaaagtctgcatttgatataatgccttaattactgggtctacaattaatgttgactgttttagattgtaagctcctggagagcagtattgctgtagtaggaatgttttaacagtgtcatatgaaaaagaacaaaataaatattttgattttgtgattctatgcaagtctttctgcccagagtgataatgcaataagctagtcttttcatagtctgcatagagtctggccattaccatcagtttttaagatgtccatattgtggccgggcgcggtggctcacgcctggtaatcccagcactttgggaggctgaggcaggtggatcatgaggtcaggagatcgagaccatcctggctaacacggtgaaacccgtctctactaaaaaaaatattaaaaaattagccaggcctggtggtgggcgcctgtagtcccagctacttgggaggctgaggcaggagaatggtgtgaacccggaagtcagaggttgcagtgagccaagattgcacctgggcaacacagcgagactccgtctcaaaaaaaaaaaaaaaaaaagatgtccgtattttaggtggtatgatccttttaggttttcatctcactctccccc

SEQ ID NO: 134683 - DNA, 1087 bp, Homo sapiens
acaggcatgtgccaccatgcctggctaatttctgtatttttagtagagacggggtttcaacacgttggccaggtgttgaacacctcctcaagtgatcctctcaacacctcctcaagtgatccgcctgcctgggcctcccaaagtgctgggattacagatgtgagctaccgcgcccggcctttcttcttcattttttattaacctggatccctgtcaaacttcttattctttcgtttcagcatagatgccacctattcaaagaagcctttcgtcacacctaacccctctgttctctgtcatagtatgttattttattagccttttcaaagggtatacttttttattattgtttagtttgttttttccaccagcaaagtctatcttattcattattatgttccttaaatgaatcctttgagtcactactgctactatctgaatttcagtccacggttgtgactcagagcgtcactacaacagtactgtctgatttccctgccattattcttcccttttaatccattctttgtactgtttcagggatctttctcatctgtaaatcctcctgagcgtggcattagcaattctttgtgacctggctcctccttgcatttgcagccctattcttcaccagtcctcttctatgttctacgctccagccatattgaattatttgtgactgcaagctcaacatgtttttcttacctccaggccttatttgtttaaccctctgcctgacattttctcattcttgacccccttgacctgattaactgaggactcaatttacatattacctttttttaatgaagccttccctgatcctctaagcttagttagatgcccgttacaaagtcccctctagccctctgtgcttactgctatagtgataggtaatataatggattatagtttgccagtactctctgttgtttccccaggactaagctacttgaaatcaagaactgattcctagtcatcactgtatagttagcacctgagtcagtatccagtacattgtggcactgagtgaaagttggcagtcttcacagaccaagtggtagcagtgtaggggctcattgactct

SEQ ID NO: 134684 - DNA, 1050 bp, Homo sapiens
ctggagggccgggtatagtggctcatgcccgtaatcccagcactttgggaggctgaggcaggaggatcacttgagcccagaagttcaagacttgcctgggcaacatagcaagcccttctctctacagaaaaatttaaaaattagccagttgtagcagtgtacatgtagtcccagccactcgggaggctggagtgggaggatcgcttgagctcaggaggttgaggctgcagtgacccatgatcatgccactgcactccaccctgggcaacaacaagacctcatctcttaaaaagaaaaaaaaaaggttgctaggtggtttgaacagtgagagaatagtaaaggcttgctcccatcttaggggaactttaataacagtgtttaaaactgtgttaaagtgtactttaaaaacagtattatctcaaccatgtttaaattctgatctttttttttttttttaacaggttaagaaatatcctctcagttgtcggtactgatgccttgaaaaagaccaaaaaggatgatgagaagtctaaaaagtccaaagaagaggtagaacatgtctttaacttcacagtataaacatgaaggaaatgaggggataggtctctcgttttctgctttcaatggtttgttttgctgagatgttgggggaaatgtttttgaaggctctaccattcaagaagagttgctggcagtagttttggttcctttgtaagtatgaatggagctaagtgagttttccagtcaggaaagaatcatggcattcctggtataaccatgtagttacatatcatagaaaaaaattcagtagaaagtcctctgcctgatttcatcctattaccgaatgaattcaccttccttctgggcagttaaaatggagaaatgacagttataagaggagtagaatgcttcagatttgacctttctgctcttaatttgcctttcagtatcagcaaacctggtatcatgaaggaccaaatagcttgaaggtggcaagactatggattgctaattattcgttgcccaggtaaagagagcctccagtagaag

SEQ ID NO: 134685 - DNA, 1044 bp, Homo sapiens
tggagtttcatataacttcatttatcaatgtatgtgtcttctaacagcagcaacaaaaccatagaagaatcttgggatgggttaaaactgaaaagctgctttgttgttctttttatggtggaaaagcaaaggagctcttagattaacctattaatgatcaccgtgtgtgtattttttttctttttaagtctttgaataatttttgcagtcagattggggatgatcggcctatctcctactgtcactttagtcccaattccaagatgctggccacagcttgttggtaagttccattttacaatgacattttttcctaaatggggaacaggctcaggaagaaaattagcatttgcgttagacgtctatttctacgtcctctttctctgcttctcatgatcacaccaaactacagatgtcagtcagtgctctacctgttgtataatacaatgtagccttggtttagccgttctcgctcttcaccagtgaccccagagatccattacacaaagcactctgtcacattcttgacactagtattttggaacaggtcctgtagtgagtttatagaccaactagtatccataactcagtctggcttttctttttcagttatgtgacctcgctaagatacttaatttctgtaagcttcagtgttcttacctgtaaagtgggatgaggtagtgtttgcaaggcattttgccttgacagtgcctggtatgtagtaaggactcgttaaacgttaattattggtttatctttgttttattttcttatcaccacatatgcagaaaactcaggatgtggtaactttgttgttttgtttgagtttggttgtgtttttctgtgggacatggctatctaatgagaaaggaaacttagattgaatacacaggagctacttgactaggctgacctttagatgggttcaggagaaagccaaggttctgcacaaatgagtccacctctccaagcctcattaccttcactataaagtttgatcgttcctgccgtacctgcttcacaggtctgttagaaagatcatcc

SEQ ID NO: 134686 - DNA, 1006 bp, Homo sapiens
aaggctgaggcaggagaatggcttgaacccgggaggtggaggttgcagtgagccaagattgcgccactgtgctccaggctgggcaacagagtgagactctgtctcaaaagaagaaaaaaaaaaaagccctagaggtttacagcgattccatggttttcagctagcacctaaggcagataagcttagttgttgagtcattgtttatgtcagaaaggagcttcctgttaatatggttatatgaatagtttcagaagcattaataacttaagctataatggcttagaatactttatgtgttgtagaaactgaataaatatcagctggttgattgttagtgtgatttggttttagctatgaccgttcatggcgcttatgggatttggaggctcaagaggagatcctgcatcaggaaggccatagcatgggtgtgtatgacattgccttccatcaagatggctctttggctggcactgggtaaggcttctcccatgtagtcaggggcagttcagtactctcacctcttacctatacctgcttccacagagaactggattcaaagtgttcatttctaaattattttctcaggggactggatgcatttggtcgagtttgggacctacgcacaggacgttgtatcatgttcttagaaggccacctgaaagaaatctatggaataaatttctcccccaatgggtaaaataaacacactgaatgaggggcgaaaaagggttctgggtcagtaagtactctatttctaacttcaatactgcatccaatccacagctatcacattgcaaccggcagtggtgacaacacctgcaaagtgtgggacctccgacagcggcgttgcgtctacaccatccctgctcatcagaacttagtgactggtgtcaagtttgagcgtaagctttcctcctattttacgtctaaatgacacagacaaacagtattgtgttcccgtggaatgcaggccaggctttagcttaactgagcagtaaaacaggag

SEQ ID NO: 134687 - DNA, 1681 bp, Homo sapiens
ggatttccatgtcagcccccactccaggaaggcagcccaatccctaggtgatggggaacccctctcacggttgaaaatttattacctttttacgccctgccacgaactgtgtagacattgtttttattaatcttttgtttggccgggcgtggtggctcacgcctgtaatcctagcactttgggaggccgaggtgggtagatcgcttgagctcaggagttcaagacgagcctgggcaacatggcaaatgccgtctctgcaaaaaaatactaaaattagctggtcgcggtggcttctgcctgtgattccggctacttgggaggctgaggtgggagggattgcttaagcctgggaggcagaggttgcagtgagccgagattgcgccattgcactctagcctgtgtgacagagcaagaccctgtctcaaaaaaaaaaaaaatttgttcgaatgccttatagccttcctcacagcacccaggattgtgactgactctgcatttttaattcttgaaacttggctttccataacatggtacatgcttcaggactacatatgacccagagagcaaggtggctgaactatagtctggaagccctcaggtaaagaggcacatctcaccactcattggttaaacaatgcatcatagcgagcacttttcctttccctggagaatgggatgtgaagcagtagaccgcagccacgccgatggttatacagtgaagaagacttcacctcttcctattgagtttgcttggaatgctgacagcatcaggcaactctgaactgaacatttgctttgtcagaaaatatctttttttttactttgaagtttggcaaccttcatgttaccccaaagcaaaaccattgtgtcaggagtcaaacaaatgtttagaaagcaaacatgacgtctctattgtacaacctcctttctcttggctgtttaaaggatgtacttcgtgtattaaagggtactttatgttgaagtaacgaaaaaaccctaatgggtgttcctaaacctaaaccttttctttattccacatttgctacggtaaaatcctgttacaaaactaccctataaagaattattttctatagttaagcattttctgaatcctagccattggtccatagaggtctcttttttttggtttgggatataatggatgatctcaaatatggattactctgatttatgtctccttagcaccttgttaacaattttttttaaaatagaaggctgtttgcattttgggccagactgccagtaagccaggcctggactcaattacaattcttaacttgtctgtcatgcacctcttttcacctcaactatacagcctctgaactctcaaattacacagtaaattcaaaaaaatatataggaatttggaagaagaaaaggttgtctacagaggagagttattaaagaaaggcttcttggccgggcacggtggctcacgtatgtaatcgcttgaacctgggaggcggaggttgcagtgagccaagatcacaccgttgtactacagcctgggcaacagagcaagactccatctcaaaaaaacttaatttgctgttgcagagaggttgacaatggctttggtcagctctattctgtggaccctgaatgtgtgatatatagccaaacaactggtttgttttgtttcattttgagacagggtctc

SEQ ID NO: 134688 - DNA, 1017 bp, Homo sapiens
tctggcaggcacagaggacatacggatcgatgagaggacagtcagccccttcctgcaattgtcagatgatcgaaagaccctgaccttcagcaccaagaagtcaaaggcctgtgcagatggcccggagcgcttcgaccactggcccaatgccctggctgccacctccttccagaatgggctccatgcctggatggtgaatgtccagaacagttgtgcctataaggtgggcgtggcttcaggccacctgccccgcaagggttctggcagtgactgccgtctgggccacaatgccttctcctgggtcttctctcgctatgatcaggagtttcgtttctcacacaatgggcagcacgagcccctggggctgctgcggggcccagcccagctgggtgtagtgctggacttgcaggttcaggagctgctcttctatgagccagcctccggcacagtgctctgtgcccatcatgtgtccttcccggggcccctcttcccagtctttgctgtggccgatcagaccatttctatcgtccgctgacctctggccacaggaagccaggtccaccgcccaccaccctttcaggccatgtttctactcagtgtgcttttcccaaatgatgtgtgtggtgtttctaagagaaacagggcccataaccagtgggcagctttaggagggatggggatctgtttcagatctaggcataacctgtaaatcacaggtgtccaaacttttggcttccctgggccacatttgaagaagaattttcttgggccacataaaatacactaacgatagctgatgagctaaaaaaaaaaaaaaagtctgtgtataatttttgtgatatctgccaccacagataagcaaaaaagtccttgcattcaaagggttggagattgctgctttgagtgctgggtacctgtggggaacctactactccctgggccttagtctcccaaatccaccatgcatctgcccctctgagggtgtcttcactttgtctctggcatctagcatggtgc

SEQ ID NO: 134689 - DNA, 1251 bp, Homo sapiens
tgtagtcccagctactcgggaggtggagaggtgggaggattgcttgagcccagaaagtcgaggctgcagtgagccaaaatcgcgccagtgcactctagcctgggtgacagagcaagaccctgtctccaatacaaacagaaaaaggaagggaggttgggcaaaggtggactgagggtccacactgactgcaccctcactcccacattgtgctggccctggggccacaggtgaatggacgtggtctttgcccttaagtcagcacccatgtagggtcagtcctctgtgcttccttatccaggggctgtgatgatgaaggaaggagaaggccagggctatgctctgtgatggctgtcatcctgccttccaaagctacatgtaatagacacactgctttgtccctcccctgcccctaggacgagcggggttccgcagctgactccgaggagtccccagctattgaggcaatccatctgttgaggaagaccttccccaacctcctggtggcctgtgatgtctgcctgtgtccctacacctcccatggtcactgcggtgagttccctccctcccaccagccctgctgccacccacactcctactgcccacttctcaacagggtggggacaggccagggcccaaggtgctccccaaaacccagtcatctgtcctgaagggctcctgagtgaaaacggagcattccgggctgaggagagccgccagcggctggctgaggtggcattggcgtatgccaaggcaggtgagtgaaccaccagcagggatgggcacctctgggtcaggaggtggcagagtggctaggagggccccagagttctgaaggccaccctctgccccccaggatgtcaggtggtagccccgtcggacatgatggatggacgcgtggaagccatcaaagaggccctgatggcacatggacttggcaacagggtaagggcagggaatgcagcacagggctggcaggagatagtctgcaccagccctgcccccgtgtctgctaagaatcacagaactgccgggcgtgttggctcacacctgtagtcccagcactttgggaggctgaggcaggtagatcacttgaggtcaggggttcaagaccagcctggccaacatggtgaaaccccatctctactaaaaacacaaaaattagctgggcgtggtggcaggcgcctgtaatcccagctactggggaggctgaggcaggagaatcgcttgaacccacgaggcagtgagctgaga

SEQ ID NO: 134690 - DNA, 1022 bp, Homo sapiens
cccagctaatttttgtatttttatttttatttctatttatttatttattgtgagatggagtttctctcttgttgcccatgctggagtgcaatggcacgatctcggctcattgcaacctccgcctcccaagttcaaaggattctcctatctcagcttctgaagtagctgggattacaggcatgtgccaccacacccggctaatttttttttatttttagtagagatggggtttcaccatgttggtcaggctggtctcaaactcctgacctcaagtgatccacccacctcggcctcccaaagtgctgggattacaggcgtgagccaccgtgcctggcctaatttttgtatttttagtagagacggagtttcaccacattggccagcctggtctcaaactccagacctcaagtgatccacccgcctcagcctcccaaagtgctggggttacaggtgtgagccactacgcctggcgcctgtcttcttctaatatgcctcttctgacctcctcactcccattggagccatggctcacttctggtcaggctccatgcactcaatcagccctgcctgccaggactgtagtgcccacttgatgagaaatcacctgtgaaaatgccaggcatggtctggcacacagtaggtgctcaagaaacaaatgttaatgccccagcttccttctgtcttgtgtccactaatttggcatttggagcatatttttgtacttcacgtaattaaatatttactgtgtgccaaggtcagtgtgtgacagagcactgtaggggaggcaaaaatgaaccaactctggaccttgccctgcagaagctctgtctactggcatgaggtaagacaggtccacagataacttacataagagagactgcaatctggacaagacagcctcagtgggagagggaaggagaaccctgtagatttgggtgcggggaggctgtggggagagcacagcctttcaggtaaagggacaaggttaggaaagcaagaaggtgtagcttgtgctcgtggag

SEQ ID NO: 134691 - DNA, 1009 bp, Homo sapiens
gacgagtgccaaacttgattttctctaggcacagctttctccctctgtgcctcctgcttcctttctctctcctgcctctcctctgctccccatcccactttctcatctgcctccttttctcacttctgtcagtctgtaagctttgataacctgcttaatactccaaagtgtgagttcctctgatctcttgattccttagttctaatctcacgttttgtttttaagagatggagtctctcactctgtggcccaggctggagtgcagtggcatgatcatagctcattgcatccttgaaatcctgggctcaggtgatcctcccgcctgagcctcctgagtatctgggactacagatgcgtgccaccaagcctggctaattttgtctcatgtcttctaaaaattattttgtgaagccccttcacaaaaaaccttaagggaaatctgatggtgctcaggaatctaactctccctaaaccatcctctttaactgcttctaaaatatctctgttggcctttcttagcctttttctgtttccattcagtgctccaagcgctttttgtttctaagttgagtgcttggggtttgacaggtagtgacgtgtagtttgacactgttaacttgttaaatacagtgaaaagtttgtgagtgaagaatgctgagaagattgtaatgctttgtacaaataaaagtcttgttaaaaaatgatgcctcctgtttcatgctgcttgttcacagtgtgtttttggagagagcccctgatgatactctccatgcagtttttggcgtgtggtcctggccagacctttgtaaacatgagatactgcatcgccttggatgaccagcaggtgctgctcattcacaggcaagggctctgaactactgcaagagcatttgttttgttttgttttgttttttttgagacagagtctcaatctgtcgcccaggctggagtgcagtggcatgatctcggctcactgcaacctccgcctcccaggttcaagcaattctcc

SEQ ID NO: 134692 - DNA, 1090 bp, Homo sapiens
ttcttgtttttgtttttttttttttttttttgagacggagtcttgctctgtcacccaagctggagtgcagtgatgggatctcagctcaccgcagtctcctcctcctgggttcaagcaattctcctgcctcagcctcccgagtagctgggactacaggcgcacgccaccacgtgcggctcattttttatttttgtagagacggggtttcaccatattggccaggctggtcttgaactcctgacctcaggtgatccgcccgtctcagcctcccaaagtgctgggattacaggcgtgagccaccgcgcccatctgcctccgtttttccaattgtacaatgtaattagctcctgcagtccgtctggctcactttcagctctgtctcctaaccccttgttccgtccttacagcatataggcgggagcagaaaggcaagaaggaggcctcagagcaaaagaagaaggacaaagacaaaaaaacagactcggaagagcaagacaagagcagggatgaggacaatgatgaagacgaagaaaggctggaagaagaagaacagaatgaagaggaagaagtagacaactgaaaagggcgggagactgtggcaccttggaaggtaccacttgaaatgagacgtgctacgtgtttctgtgaagcttttccatgctgggcagagtagtctcaggcaaaagtgcctgaaaagatcagaataaaaactgactagaaataccgtcaaaaccagcacttaccaaactcagagcatctgagtagcagaatcctgttttgcttcatcaatctgaaggttatggccttttgacaagagggattctgaacgactaaattagtcagtttgctcgcttttgtttacttaaatgtatggttagatggtttttgatctgcagtcttccctagtcccccaaataagtaataataacttccatgctgcctgctgtgttccagatcacagaggcagccaaggctcaggaaaaactggggctttgcttatggtcagcctatgtttgattgcacagtctttgacaatagtagcttactaagactgctcagaatgagtaagctttaggaaactactaaaatg

SEQ ID NO: 134693 - DNA, 1443 bp, Homo sapiens
ggagtgatcaggaaagggtgtcagggagctgtgaggccctcttaccttagctgtgtcctgattaaaaagtaaaaatatgtttgcttttttcctccttattatcatggttacatgtgtttactgctgaaaacttagtgaaaagaagaaagtgaaaatcacttgtaatctgacttcccagggagaccactgttaactttctgatttatatcctcccaggcttatttccacacctatttctgtgtgtgtgtgtgtgtgtgtgtgtgtgtgtgtgtgtgtgtgcctgtgtgtatttaggggtcaaatttcaacacaattgagatcaagtttgtatggacaattttgtaacccatatgttttccttagtggcctgatgtgaatatttccttgcattggtccatgttcttctattagattaatctgcctgccagatctgggaagctgaggagggttcaggcccagcagggagtggatcttcctgcccagccatggcctcagggctgagtctgatgggtatcagggaaggctgctgcttgaacaagtgactgtgacctgagtgtgcaggaggcagacaggagcctgggtggggtgggaagccacctgctcttattcgtgcaggctcctctcacatctctctaaggatgcttatgagagcatttgagaaattctctcctgtttcctgcactggctctgtttccctgggtgccatttgtcgtggtgcccctctttcaggctgctgattttctttatccactgtgatcttcactgatctgcttatgagcaaagattcctatcagtggtttccaaacccagccaaatatcagaagcatgtggggagcctgttaaaaatacacagattcctagaatcttcttctggagactctagtttaataggtctggggtggagcctgagaatatgaacacttaagaagccatagagcgttcagactgtcatccaggtttggaagctatggattcagagtcagttttggtagcaattgggaccacttttactgtgaaggttttggctaagtttttctcagttcactggcctttccttagcaaagtaggtagcccctggccttctactgtgagctttgccttggtagaaccagatgaagatgttgcttagctggtagtttcctgagcacagacatgtaaagggagcataatcatctatggaaatataaagagacaaaactgttttgatgagaattcccttcggggagagtactgcatgatatatgtatttgtgtgtacacatgaacacaaccccttgtcccccaaaaggagtatgttcaagtgacattaattgaaggacactgcgttctgaggaggtggccttacttcaggggaagggagtaggcaagctgaggctaggacccaactactctagagggatttttttttctttattgtgaaaaatgatgtaatttgaagtcattg

SEQ ID NO: 134694 - DNA, 1039 bp, Homo sapiens
caaacaattaaatgtagagtttccatttgacccagcaattccactcttaggtataaatccaagaggaatgaaaacacatgctcacacaaacatgtgtacacacacacatgttcataacggcattattcatagtagccaaaaagtcgaaataacctgaaatatccatcaccagatgagtggataaacaaaatgtggtatatccatacaatggaatattatttggccacaaagggactaaaatactgatacgtgctacaatatgggtgaaccttgaaaacattatgctaagtgaaagaagtcaatcacaaaagaccatgcgttgtgtgattctgtttacataagtatccagaataggcaagtccttagagacagaaagcagattagtggttgacaagggctgaggggagaagggaatagggtgtgactgcgaaagagtatgggatttcttttaggggaggatgaaaatgttctaaaattagatagaggtgattgattacagaatcctgtgaatatactaaaagaaaattacatgctttaaattggtgaagtgtggccgtgcacggtggctcaatcccagcactttgggaggctgaggcgggtggatcatctaaggtcaggagttcgagagcagcctggccaacatggtgaaactctgtctctacaaaaaatacaaaaaattggccaggtgtgggtggtgcatgcctgtaatcccagctactcaggaggctgagacaggagaataatttgaacctgggaggcagaggttacagtgagctgagatcatgtcattgcactccagcctgggcgacagagtgagactccatctcaataataaacaaaactgatgaaatgtatgatatgttaattatatcccaatacagctgttaaaaaaagaaggaactaataatacctttaatatcctaatgttgaaagtcatccactgtcatttctaccacattctatttgttagaagcaagtcactaagtccagcccatgtctgaagggaggaactaggcttcacctcttgaaaggaagagta

SEQ ID NO: 134695 - DNA, 1068 bp, Homo sapiens
ctgccacttactggctgtgtgatttggacaacctgttttagctattttcttttttttgagttggggtctcactctgttgcccaggctggagtgcagtggtgtgatcatggctcactacagcctcaacctcctgggctccagtgatcctcccacctcagcctcctgagtagctgggactacaggtacacaccaccacgtccggctaattttaaaaaaacgtttttggagagacagagtcttgctatgttgcctagactggtctcaaactcctggcctcaagtgatcatcctgcctcagcctcccaaagtgttgggattacaggtgtgagccaccatgcccagccaacctgtttacctcttaataatcttcagcttccttgcctgtaaattgggataaaagtagtaaccatttcacggagttattgtgaggagtaaaagaaataaaaagcttatagtaaagtgctgagtacctagtaaacatctaagaaacattgactttgttctctccatgtgtgtgcctagcctggtagttcactatggccctgaactctgggttgagatgtgtgtgaatcctgtaggatgtttggatctgagccccacaggactgctagtggtgttatgatccagccaagattagatgctgactgcagtagattcaggagttttattttaccagcttgcccaggacggacctagaatcccttgtgagtgatccatgggaatctaaattatcaagagactgaatgctaatttattagtttatgctgaaaaatagaatttctgagtagactagaagacttatgctggccggagcaatctctttctgtaaggaaaaagagcttgggaaactacattaatatcagctttcacaggaagcagagaggccaggggattgaactgacccatcacaatttttatgccagtgctgtgtgtcctatgtcctcaccttcgcaaaccagggccacttttttgaatggaactcagggttctccttcttttaacacagtagccatgggaaattctcctgggttatgtccatagagctgtgtggctgcctgtttcccagcgc

SEQ ID NO: 134696 - DNA, 1025 bp, Homo sapiens
cgacccagcagtgagatttcccagcatccacctggctgcctgtacagtagtgagctccccatcaccagaggggcacaagcaaggctagagaaccactgctggaggcattcgaaagggactcccgatgtggtgggcggggctgaaccctgtggcttctgaggtccctgccagccagagacttgtgtgagtctttgaatggcttcacatgaacaaaagagcatttctgtcacctttcctctagttttttccaccacacccaccagggagctgaggcaaggttgtttctgttgctgtttccttaggtcagctgaggctgtccattgatgcccaggaccgggttctgctgcttcacagtgagtacggctttgtgcaggctcaccaaggaaggggcgggccactcagcttgctgcctggggctggggttgggggatggtggcaccatgggccaaggcttcttttctcatccttgtataaaggatgtgtccattgataaaagccagtattcacctggggctctttctatagagcagccctggtcctgccttggatgtgtctggagtccacatggtagacctttctcattgacaggctacagctgcccctgggtacctcaacttccttcttggccccagcagagcagggccacagaagagttttcctatcttccctcccttctttattccatcctttcttcttttctctatttttctcactcattcatttattcattggttgacaggcagcatagtatcatggttaagatcatagtctttggagccagaccactataatttgaaccctggctctgatacttgttgagtggccttgaacaagctccgttttctcatctgtcaagtagtggtggtaatactatgtatcttacaggttgctacaaagattaagtgagttactgttagtaaagtgcttagaacagtgctgaacttgtagtcaatcctgtgtaagtttttgttagataaaatagaaaactggctgggcacggtgactcatgcctgtaaacccagcac

SEQ ID NO: 134697 - DNA, 2622 bp, Homo sapiens
gggaacaccaaggagaagcacccacccctgtctagatggtgttgatgggatgccagggaagacttggcggagggggtgatgcccacacggtatcctgaaggaggaatgggcctgagccaggcaaagaggagcagggagggtgtggctagcacttcatgcacagggctagcaagtgcaaaggcctgggggtcagagagagcaggatgcatttgaagagctgtctagcatggctggagcacagcacaggaagagttcatactccacctgtttgtctgtccatgtgtccatccttccatccggcacatgaatagttacatgagttgctgtcatggcccccactgccaggactcttctgtttagcccagaaggccctgtctatctctccagcctccctggctcttgccgctgacggtaccctccacctccagctctatccagttacatgcactcccttgaatacatcttgcttgctcctgcctctgtgcctttgcacctgctgttcactgtgcctggaataacctttcttttgttttgaaccccttttgaaaaataactctccacctgctctgattttgcaagaaatatgcctgccttcatcatcattaagactcaggaaggaagggtcattttgccttattatttccccctccaggaatcatccccctgacccacctgtctgggctgggtttattgctttctcctttgtgtctttgtcacagccctgactatactgtgccacctgtgtctggcctctctgccagactgagaatgcaatgaggacagggactgggtgtggttcattgtcactgctggccagagagacccaggaggtcaccagacctgggtcctgccctcaagaaccacgccctcgagggaaatgatgcacacaggaacagtaaccaggatactgggcagagtagactagtaggcgcctgggtcctctggtcatggccatggggggcccaacgtgaagttcccaaggagcagcagaggggtgttctctgcctgccagggcctgactccagctgtgcaaacagtttttgcaaaatgcatcttggcctccaccactccatttgtcctgcacagtttgctttggcttcaccccagtctcaggcccttcatcccttcccaccggtccccactccttccattggtttcccaggccttgcacctcagactactgggagcactgtctgagccaaaccctagggctcaatgaaaaccagacgtaaggctgggtgcattggctcacgcctgtaatcccagcactttgggaggctgaggcgggccaatcacctgaggtcgggagttcgagaccagcctgactaacatggagaaaccttctctccacgaaaaatacaaaattagccgggtgtggtggcacaagcctgtaatccccgctacttggcaggctgaggcaggagaatcacttgaacccgggaggtggaggttgcagtgagccgagatcgtgccattgcactccagcctaggcaacaagtgcgaaactccatctcaaaaaaaaaaaaaacaaaaaaaacaagaaacaaacaaacaaaaaaatccagacgtaaaagaaaatagaactgaggctcaggttctatcaggtctattgtcttctttctatagacctcaggcaaatggtgctgcctactcttgtgaccacacctgcacccaccccacacctctccccttgcctttatttattattatttttctttagcaaacattttttgagcaattacttatttgccaggcactcctctgagcacttcaggcacattacctcatttaattggaacaactaccatgtgaagtgcatgttattatcactaaaccattaaaaatggcaaattctgtcccatgcaaagcaactcactctagcttatatggtgagtaagcggtgcagctgggattcatgcctgggtccgtccacccctgaggccccagcttgtgactcctgtgctgtgctgtccgccagccacagcacggctcacggcacaccgtgagtgccacggcatggctcatggcacatggtgagtggccccttcattcctagaaggcagtcttgtgtggtagagcactgagccgggagtcaagagacatgggttccaaatccagcggtcattcccattgttctgtgattgtgggcaagtttcttactatcttgggttcccctcgaagcctcattttccccattacatgaagggttagattctataaactgtagttctcttccagctgtaagattcagggaattgaatgtacctcgtaatgcattggtgagggtgctgccagagagtggaagatggtgggaatggcctagaccagagcaggttcatagccaatggtggttatgcagattaagggcctagtagcaggggccatagccctgctactcacagatacgcttttcttttcaggtctctttattcgtgtggatggatatgtctatgtgtgtctctctttctcgctgtgtgtgtgtgtatgtttccattcatccaccccaatgtctgaattctcttttagttatagaaggtaaaggcctgatcagcaaacagcctggcacctgtgatccgtatgtgaaggtatgtggtggggccggagatggagagtgggatattg

SEQ ID NO: 134698 - DNA, 1362 bp, Homo sapiens
tttccaagctgaaggatgttttgcctccctgcccccctttttacttcaactttctaacctctctgagccttggcttccttatttgtaaaatggggctaataatagtagcaacctcagagagctgtggggtataaatgggacagtataacataacacagggtaccagctattattgttattatttctttccccaatctctgaactctggggccaatgggaaggtaatgtacattttgtattttcctattagtgaaaattaatattttggtttttctcttactacataaagtagttttggttatgataggaaaatagaaaatatagatgagtaaaaagaagaaaatagaaaacacctatagccctcctactcacagatacgccctactgtatttcttttcagaccttttaaggtccttttcagaccttttcagaccttttaatgtgtatgtttgcgtgtgggtgtgtatgtttgcatgtgtgtgtgtatatgtctgtgtgtgtatgtttacaaaaatggaatttttttttttgagatggagtcttgctctgtcacccaggctggagtgcagtggcacaatctcggctcactgtaagctccgcctcctgggttcacgccattctcctgcctcagcctctggagtagctgggactacaggcgcctgccgccatgcctggctaattttttttgtatttttagtagagacggggtttcaccgtgttagccaggatggtctcgatctcctgacctcatgatccgcccacctctgtctcccaaagtgctgggattacaggcatgagccactgtgcccggcccgaaaatggaattattttataatagcatgttgtaacctcctttttgtccttaacaacataatataaactgttttatgcatggaggtagtcatctcttactttatttgtaatatagtttatttaaccagctgttgacgttacttccacatttttggaattatgactgactctatgagtcagctatggcctggagctcagcccttactaacactccgatggtctgattgatttcgcagtcctgtccaagaggaggatgatcagaagcgtctcttggttactgtgtggaacagggccagccagtccaggtgaggagagctgctgagctggagggggactctgctctgggctagtgggtgacagccaggtggccagcatacaccaggggttcgattagtgctttctggataaatgagtgatagtggcaatactaaattgcagaggctgcccctccttgagtctccatcattccaggtgttaccaaggactgtgttatcaatgagcatttgctgagcactcggtatcaaacaaggcactgtgctggtcactggg

SEQ ID NO: 134699 - DNA, 1498 bp, Homo sapiens
tttatactaatagtaggtacatttagggagattctacttgtgatttgccctgcactgtcccaggcactgtaagtgtatgctctcctttaatctgttttataaatgagatctcagtgccaagtacagtggcctaacgtcagaaagcttgtgaccagtgatgggtactgagcttaaggaaaaagtgaatggaaaaatctaagttcaatttaagtcatcaaattaaatataaattaggattaaatggtataaccctgtaacagaaataatttacctgagagggagaactaaagtgcatttcctcaaaaaataatctattttttcatcttgtaatgagtctgcaaccctatgctcaaaagtaaactgaatactattccccatatgtgctgcatgaagttacttcaaagcctttgtaacggctgttccctctgcccaaaatgctcttcattctctctggctcagttcataggtcttcttccagcctgtgagccctaaactacctcttgtgtccccgagccttcagaatttgttgcctgcactgttcatctgtcaatcgcaccctgtcttgtgacatcccctgtattgctgtcttgaactgctatttaaattcctggatgtttgtgttgtttccttaacgctgtggctccttgcccagtgcctgccaaccgtggacgtgatggattcatccatttgtcaagccttcactaagtgcaccaagcctggagctcagggactggtagtcagaattaaccaaggcttggttccggagactttgcatctagtgagagttcaggcactcccgagggtgagcgctagttcccaagtttataaactgactgctgtattgtcatatactcaggttgctttaaaagaagtctttcttcctccaaagatttttcaaaagcaggcataagaaatagctaattgaagaacacttagagagaggttcctgcttatggacattaattgtggcaatttacgctgcctgagttaccatgaaagcatgggaggccccttagcaggaagtaaaactcgagggaggctattaaccatttaacattctctaaacaccagggaatgaagatttcgcttagtgaagagcagagagaggttgctgagctaatgcattggcctggagactttgaaagtttcagccctacccagtaggaaagaagtgtacaacagagtagtatgggcacctggatagcagctggagttctcttgaatgtgtgacaaataaaatgaaattggtatgaggactttggcaaagtcttgccaaggcttttctggaatggcagctcagattagttttggctgtttatgatagtcactgcaactgcctcctattagtgctgacttggctacttcccaagggggaggagtatttgtttttggtggtgggctggggaggtggatgtggaagggcactttattggggtgagagcattgtcctttttgaatagattattaatagagccttggatgatgagagaggcaagga

SEQ ID NO: 134700 - DNA, 1043 bp, Homo sapiens
agattgaatttagcccctcgccatagtctgacatccccatgaggcctgaccctggcccatgcctacctgccctgctggtggccaggtcagattggtctcagcagcttttgtgtcaggttggtttggaccttgatctgtagccatctaagaactgctcagctccttcctggacctgagatagaacttcttgagcttgaggtcccataactgttctcctccactgagcatcaccaatgatgtgggcaaggaggttccctgtggggaccagctcttcagatctacctagcaccagaacggttaaaactcatgaagtaccgctgagcttctgtgtttggtagaggcagtgctgaacttgtcctgtgaccttgggaaagggaccaactctgagtctccatttttccctctgtaaaatggagataatagctcctctctatcctgcctcacagagtcagaaggatcaaacgagatgatgtgggtaaaaagctttgtaaaccacagtgcatcaggcaaacccatgctatacttgataatggacctcccgatagagcccagaaaaaaaatgctgactcaagtctcacttgttctcccagacagagtggactcattggctgcatgagctttggggtgaagtctctcctgactccagacaaggtgggtcctagggatgcttctgtcaggatcatcccaactgggccggggctggtacaggcagagtttctctgtcagctcttgggcagggcttctctctgtgagatggtgccccactgagacaggtgccctgtggggtggcctgcatagcagcactgtgtttattacctgcctagctgagagtttgggtccccttcttggtttgtcttgccagagagcagtttgttaggcagccccaagtcttcccaggaggctctgagtctggtgtctgctgttgaagacattggcagatcccttggggcccagagcactcctgggcctgccccagaagatgagggccaggtgcacccgtggtccgttccaggggtcctcttcatgtgtctaccaggcctgat

SEQ ID NO: 134701 - DNA, 1033 bp, Homo sapiens
tagttgaaaagctttcctctggcttctgtggggaactgcaaagacctttcctcctctctttctacttgccaagcacagagaggatggtgatcagggggcctccctcgtgattcatggaaattacatgggcatcaacaccgtaagtttgcttcctccaacatcacaggtttcttggtggcttgtaaagtcctcctgcgtgctggattctgcacacaggccctgagccccttgttctgaggtgcactggattttcctgaacttatgtgctcagagatgtctgtgggactcagcaaagagggtgtgcttctcagaggcttggttggggccgggggagagcccccagaggccatctcttcagctcctgtgctgtgcaggtggggagatggaggcccagaaacctgggtgacctgcccacagtcacacagcaaccaaagctgggttgaaccaaggaaccctctgtcatcaaggacttgagtgtgtggctgggcttccccaggggctctgagatgggcaaaagcagctgggctcaccatgcgctgctctgcaggatgctatcctgggactgccaggcaagaaataggacccaggttctggtcctagccccacactgccctgctgtttgaccataacctctccaggcctcagtttgtttgtcagtaagatgaggacgctgggttgtctgatgacctggaaatcccttccacatttgactttatggtccatgtgtatcaccagatcctgacagcaaaccacttccatggacaaaggacaaataaattgacttttttttttttttttttgagacagactctttctctgtcacccaggctggagtaccgtggcatgatctcagctcactgcaacctctgcctcctgggttcaagtgattctcctgccttagcctcccaagtagctaggactacaggcgcctgccaccacgcccagctaatttttgtattttttaagtagagacaaggttttaccatgttgaccaggctggtcttgaactcctgaccccaagtgatccatctgc

SEQ ID NO: 134702 - DNA, 1109 bp, Homo sapiens
tgtatgtccacagagcctggcatgctgtaggagctcaataattgtgtgccagtttgaaaagagcatccagatggcaaggccctctcatggacttctgaaagtaggagttgtggacctgtcaagcacatgggcctcagcaggcacatgagtcagtggctagttcaggttcagccaggaagcctatctgtgaccttacctgggagtcctcatgggatgccttggggccctggccacagattggcccccagaacctcagctctcttcctctgacccttggcctgagatggagtgagtgtgtcccagtgtttcctcccctgtgctctgggagggcagtgaccaggctggccttgactttgggcccttagcacagggcccgccccaggctaacgctctgtgaacctctgtgagaaaggaagaagggagccaggaaaacagtggatcaaaggtgaggctgagtcatgcagtgctggtgggcccttggatcaagggctggggctgctggggctcaggatggcaaagtttgcttttccaagaccttgtccatcccaggccctccccacatcagcctgggtttacttgctgagctttgggccttcctgcttggcccacaacccagtgctcaagttgtctgggctgagatagggacactgaggggctggctagctcctttgtgcctccagttcccttggagaggagggtggctcttggcaggggtgggctgtgggcttcctgaccttggggtagaggcaagagcctccagcttctggcagtgaccgggcagggctgtgtcctagatcaccatcccgaggggaaaggacggctttggcttcaccatctgctgcgactctccagttcgagtccaggccgtggattccggtaagttattgacagggggatgccaaccccacttgcccaccacacatgtgggctttgcaaacatagtctggaactaaaaggggagccccaaactggagcaaagtgtcctggcttttcaaaatgaaaagaataatatttttaagtgaccgtagatgaaactgccatttatgaaaatatgcccactttttttttgttgtttttatcaaaatgaaaataggtttttatattttgtt

SEQ ID NO: 134703 - DNA, 1638 bp, Homo sapiens
agcagggagaagggaaggcaaagggatgccttctttcaaggctcttgagaggcaccaagttcagtccctcatttcacggatgaagaaacttagagaaaaagggaggtccttgtctgaggtcaccatggcagcaaaggactccagatcctttgaaggggtcttaggcttcaggggcccctgaatggcttttctttgtccctgcagggggtccggcggaacgggcagggctgcagcagctggacacggtgctgcagctgaatgagaggcctgtggagcactggaaatgtgtggagctggcccacgagatccggtgacaggggacagcgggtggcctggggcctcaggctgatggcacaccctccccacccctgggcacactgccttgcctggcccagctcttgctgctccctcttttgcctagctgtgagcaggcaattccttttgctcttcaaggaatctgtttcttggcctgagaatggaaggttcaggctcagagcacttttggattccagagcaaacagcagggaagatgctctcagactctgtggttcaggacggggcaccaggaggttgctttctgctttagctaatttttgttacctaagagctaagcccatttgttatttaagggcatgaagatgttgcaaatgtttcaattgcacaattaaaaaaatattcttgaaaacattggagtctcccaaattttgatcctctagggtaaaaccccgatggccccattttaggtctgcttctggaataaccagatgagggcttgcacttaggtgacctgctagctttacttgcttatatcttgcttttgataagcatcatggattgagtatggaactctttcctgttgaaactggcctggcctcagggtccttctcaaccactgcccgtcaataggaattgacctaggtgacccatttgctgtctcttctttaaatggcttcttgcatcccttcctgccctgacactgggggcttcccctctggtgtctgcctcctcttcccccattatcctctctgccctgtgggccctcactctggctgatactggctttccccaggctcaacctgtctgtgtgatcccccaccttccaggagctgccccagtgagatcatcctactcgtgtggcgcatggtcccccaggtcaagccaggaccagatggcggggtcctgcggcgggcctcctgcaagtcgacacatgacctccagtcaccccccaacaaacgggagaagaactgcacccatggggtccaggcacggcctgagcagcgccacagctgccacctggtatgtgacagctctgatgggctgctgctcggcggctgggagcgctacaccgaggtggccaagcgcgggggccagcacaccctgcctgcactgtcccgtgccactgcccccaccgaccccaactacatcatcctggccccgctgaatcctgggagccaggtacggacagctggtgtggggaaggtgaagggtactgggtccctgtgggaggccaggaagacttgaagacccaaagttgtgtgatgagcagcctgtgaggggctgcgatgttgggcaaggagatggggtatgtgctagctctgccttctgcaaggctgttcttggtagggaggacagatgggt

SEQ ID NO: 134704 - DNA, 1042 bp, Homo sapiens
aggctggccatggggtttcattcacagcatggtttgagaccgagcagccctgcctatccttctactaaccctggtaggtggattacttggaggcttaggatttgtgataatcccctgactactcacactgtggtacaatccaccaagctcttttccatcaggtctcttgtgtgaacctcccactggccctggggcaagcgaggcagcaatcagtattatctccacttcaaagtggagaaaactttgattcagagaaggaaggaagctgttcagggttacacagactgtctctgacttgggaagtcagtgatcaagctcgggtgtcttatccaactcaaattcagtgatgatcttgagactgaggatggtgctttaaacaaagggtccagggcctggcagcacacatccctctgggactgatatgtagggccagatcagacaaggagctatgtgacatcttccttgtatctgttcctcctgtgcccatccagggctcatgctcattctactcctctctccgtgactcacagaagaggcaggaagtggtttgagttatcatggtttgagcgctgcccccagatttgtctatgatcagtggtcacttgtcaggggcacggggggagtcaacttgtttttcttaccttgcttggtgagaaggggctgggggtgggaggaggaagcaagtgtgaaaccttctgaggtgagttttatctccgaggctgtgggtgcgcgttggtggggagcttccctgaggtatagctggggtcaggccacctgttcccccctcgctgccagggctgctggcagcagaagacagcctgcacccaggacccaggctgggcacccaggtcagtgaggacctggtagttgcccatacagtagcaggaatgccttagaaggggcccaggagtgtgtggagcctgactgctttggagtttccctcccacctgcttggtccaggaacccctgactttttagcgactttgtgttttgtccctctgcctactagacggaatgtaacaaaaacctgtgcacaggctgg

SEQ ID NO: 134705 - DNA, 1014 bp, Homo sapiens
ctctgtatttgtgctacactcaagaagccaagccatattttgatatatattctatatttttaaattacaaaagtaacagtgattgcaaatataatacacattaaatcaaaatgtatcaattaaaatcccactccctggagtgaggagtgtggcatcttaactattttaaaaatgtataactatagagaaatgtgttgttttgttttacaaaattggattctatgctagatatttttgcacattgtactattttgatttacgatagacagatttctatttctgcccacatagctctactttattttttaatagttgcataaaattctgccgtatgaagttagcacaattcattttattcatcttctcttgatgaatgtttgttattttcttaaattacaaaaatgctgctgagaacatcctcatatgttcatatttatacctccttgtaagtatttctgtaggatagagtctcagaagtgaggctgtggggtcatctttaacaggttgatagctgaatgtcaacctgttggctttttaaatgtcaccaacagtccaacacacactcacggtacccttcagtgcatgccaagcccttctggctggttcttcttcagaagagacaaggtgtcaggtgtttgatatctcaaagggaagttcacatacttaataacactttgttttctttggagaatctaaaattggattttattgcttttgactaaaggccactgcaggatttgcaaaacaaagaacagtgtaatctttagtggcattaaaggatcaagtggattttcttagcataaaaatatgctgagcgtgcctgttggtttacctataatgtctaagaatagcctctgcctttatttttggagcagctaatgcatgaaaaagataaaagtgatgtccatgtctgtactagagtgtgagtaactggctgtttcttaaactgatttctcattaatgcaattaaacttatccacaaggaatttgataatattagctcacattgtgtgg

SEQ ID NO: 134706 - DNA, 1049 bp, Homo sapiens
tggggctcaggcacatgtgggagcgtggagggaatttctaacccaaactttccaccacgccctccactcgtgggaggggaagccagctgggagtatctgtcagtggtttggtttggcgcctgaggtctctgctgagaggggctcggtttcctctcccagatcatgaaaacaacagacccgtttgaggatgggtgacaggggcagagaggaaaatattacccagtgaaagaattctgttttggtggggtttgctcgggaaagcttcctggctgtttgcaaactgtcctgcctgcttagtgcctgagtgttcctcctcctcggaaacccattcagtatgagaaccgccactctcacttccccacaggaagccactgacaacttctccatctcgggctctggcctttcccctgtccatggaagggaaaagcaagtcacctcactgggtcagctcctccctccaggcgggctcagcctgaccacagggcggtgggaagaagccgcctgagcaactccagttccggcactggcattcccagagttccccatgcctgctggagggcattaggttggagttccagtggcctctgttcctgggctttcctgccatcctctccatacccccagcccctccctggctccctcacacccagcttcccatatgcccattctccagcctgcagtgtgcatattcacacatgcactcacaccgagtcccttcttctctgcttccccctccctgcccccagcccagacagtctaggaccccatcacatttgagggaggagcactggatgggccagggctcagtaatatgccctggttggtacatgaatggaaccctctctctgttgtgcacattacaaggctgaagctataacccaggaccctggtttgctcagcttcctgcgagaaggagggagggaagagaagcaaggctcacactggctacaatttgggtggaggtggaggttgcggggagaaggtagtagaggagctgagggcagtggctgggagtctgggatctgggcgtggtactgctgtgctgtgct

SEQ ID NO: 134707 - DNA, 1030 bp, Homo sapiens
cctccctgggcctcagtctctatatctggagaatggggacaataccccttctgcttgcctcagacagcgaagggggtttgcttaatggttgagttttggatctcagatcaggtgagagagggctctgggaaagtgacggaggggtcagacctgggccaggaagctatctctggggcccacccagcccgtgattggggatccctcctgcatggtccatgtattccttgcgggaagcgaggtccactctggaacccaatggctccttgttgcatttcaaaatgccaaggcagttggaatgtttaaaggaaaacccagatgcgtgctgcccttctcctccctcctagcccccagttctaatgttctagaaggggcagaatttctctcctgggtcagccccttgcagcctgttttctacagctgcagctcctctccggcacccttggcttcctcagtttgttgttcttttatgaggctctgaaccatgctgagtgctgcccccattccgtcctcctctcaaagtactgccagcacaaggctgtgacgtggaacagatttcagagaaagtttgcagtaatgcagggaggttggggaaggaggcaagggtgtcacagcacagaaaagttgtcaaggcaatccatccaccattccctgccataggaaatatgtctcagggagtgttcccccaacctcagcctcctatttccctgcagctctcatctcctggactttcctctcccttctagaaccttctcttttcttgccgccagcttctaacccccaagtttctgttattttcttacatagatccttttgactcttacttggcactaggatctgcttctggaaggccaaagaaatgtcccagtgtgttctcttaaacaaaagaaaccacctcctcttgtctccaccctcagcaacacaaggaaccagcagaagctttgaaattacagttttcttaaacatgatggacttcttaggcaggactccctccctccccagtccatcgctaggtgggaagaagtagaaagat

SEQ ID NO: 134708 - DNA, 1057 bp, Homo sapiens
gagagagatcttcgacctggtgcttgaggggagacactgggctgggatctagaccagtgttctgatgccagcctccatacccactcatgccgaagtcctgggcaaggccagagtagcggttttttgctaggtagaatgggactagccattcctgcccctgcctctctcacctctgtgttaaagagcagtggacaggaaagtgcttagaacagacccttgagattttctgtgcaggacctcctgaactgcaggaatctcagtgggggtgtggccgggcaactgtgcatcaccctgtttactggttaatagcccttcctctagagatcgccctgattcctgtacctgcctcttgcttccacgttttccaggaagtaccaccaacgaccccttgtacagggtcttgtcagtgtttcaaaaggcctgaaggtatttgtacctttacctgggccagataatacaggctaaaacaaacatccagtgtctgggtttcaggctggaatgatacccactcagtgtggttgagattcctggttatctcagtctgatcagaagcttagataggcagtgctgtgcctttgctgagcaacatctggcaagtaacttattacttgatttggtttggtagataaaatatcattaaggctggggtttaacccaagagatccttgaagatgaaaaagttgagagccactgagctatacaaatacttttcaattttcggtgaattttctattcactgcagggcggtgtctgttcaagcaaggatgcattagacacattcctgcctctgccttcgcttaagtttgtctcatgcaacagtccagggaacctgttttgtgggaggtgggacatggtctatattggctggccaagaggaacacacccctttgagaaggaactgtacacagtttgtgattgaaaatcattctttcagttcctggctaagaagtgcaaggcctagagagagtttttgaacagccccctggaggagaagacagttgatgagaagttagctttagcggagggcagagagttccaaagaggcagtggacattgc

SEQ ID NO: 134709 - DNA, 1017 bp, Homo sapiens
ctttccttcctacctatgtcatagggtcattaggagaactgaattaaatgacagaatttttatcaaagcaaatgaaccaacttaatttatggctgaagaggttttgttttttacaaagatacagttaattcaggagcaaggaggtaaggcaagagcgggattttaaagaggccaagaggagctgggtgtctggttggatttcaggatgcccatgtttaaatgcacaggtctgtgcccagtgcttctgggccagggccagtgcatctgaaaggtctgtgcttggctgaccaccccatagtcaggaggcaccgtctgagtgagttatgtgaggaagccttcagggtggcttatggccttgaccacagagcctgctattgagggcacagtgggcatcagtgttgggactgacgagttggatcacaccctggattaaaagagatggtttacctgtgagggaagccaggaaggtaatgagtgtccccaatttagacagatttaggcagatgggaattcagcctccctggagggagctggcttagtgctctctctcttggcttggccaagagagagagagaccaaagcttaggtctcccgaaaatgtttgcccatctaagccagccagctctgccccctgccttggaagccttctgggtcctctagtattacagcttcaagctctgagagccagagacccagccctacactctgctgttgagacaggcaatacggtcaccatctcaggtgaagaaataatggctttccaaaggagattcccatggggcagggcagcagagggtggttcttgtggtgtcagcaaaacaggcataatcatggctattaccttgcagtgtcgttggaagaaatgtcgaggtatcactggtaaggggcttagcactgtgcagggcatgggatttgagggggctgcctcagtattgagggtaggtggctctctcactgtgagaggccctcccaggatggggggagctctttcatacttttgtagggagggggacacca

SEQ ID NO: 134710 - DNA, 1025 bp, Homo sapiens
ctgcaacatccgcctcctgggttcaagcgattctcctgccccagcctcccaagtagctgggattacaggtgcacaccaccatgcctggctaatttttgtgtttttagtagagacggggtttcatcgttttggccaggatggtctcaaacttctgacctcaggtgatctgcctgcctcagcctttcagagtgctgggattgcaggcatgagccaccgtgcccagctggaaagttctttttaaaattgataatcagacaaaaggaattattagtaaggcagaattcctgcttcagaacagaaagaaaagaggacatggaggcccagggagattaaggaatctgctgaagcccacccaactgggtagaagcagggctgggaggctcgggccagggccagggccagcttcatggagtgatggcctttccaagctggaagggaccacagttcctgcctcaccccccacctttacatgggaacactggagacagggagcagagggccttctggtcagcatctgcctcacccggcttctccctgggaaatcttggggtcttttgctggccatatccttcccctgccatgggctagaggactctgggcagcggagggaagctgttgttaagtagaagctccaggagtgcctcagcgcaccacccagttccctgaaaccagcaggcagggctttctttcctctttccccagatgctcttaggaagatcaacttctgagcacttttgggcctgagaggaatggctggcactcagcatgggaagtgcccccactctgaagggtggcattcctgagggttgggttggatgcagggtagaagaagtccctagatattatcagctgatgtgatagtccaccccagctcaaggcctgctttcgctgcttctggaacagcttctcccaaacattgtttttgctggccccttcttaccgttcatgccttagcttgtgtgttgccctttctaagaggccttttctgatcacctcaagtatgacctctccctttatgaccttgg

SEQ ID NO: 134711 - DNA, 1023 bp, Homo sapiens
gccttggccttgggatcagagaagagcgctgtgaggaagatgggttctgtgagccaggggaggtggggagggttcctggctccacagagaatcagcctgaggccctggccctctgggcttcccacgtgctccctcagctgctgctttgtgctgcctgcccctgggggtgacctcatcggctctgtcctgctctccacaggcctctgctgtgttgggagccactgccttcctcccctcccccaacctgtgggcccacagctcgccagctggcccttgaacccacttccctgcgcctctggctgcctcaatgtcactggggattagtgtgcatttgcggcttttggcggacactcccctcctggctgcagcctcaccctctggagcccagggatgggcttgggcctgggagccccctgaaccagggagcagccctgaccgtccgtttctctattttccctgacgtcagaaggcagagtgcttattcactttggaagcgcactcgcaggagcagaagaagagagtgtgctggtgcctgtcggagaacatcgccaagcagcaacagctggcagcatcacccccggacagcaaggtaagggccttgacagtggctgtggcctggctgcctcgtttcccctcagccagcctagacccttgagcctctgcattgagctgggggccagcctgagcttccaacttggctctgggcaatgagctcttggcaagcggggacctgtgcccgaatgtctctcccccttggcatgtcattgggtctgctgagtgggtctgacagtgctcgtgtagagcgacagagccaaattaagcgtggcccatcagttctgcactctgttcttcggtttgcctatggcaaggtttaattcgggctggcctccctgatgctgcctggcatgcgttcacctctgccattgggtagcctgtgcctgggggcagcacactggtgtttaacattggccccaggcggatgcgatagaggggatgtttgcggcagaagctgttgtatgctgt

SEQ ID NO: 134712 - DNA, 1134 bp, Homo sapiens
gtcctggtggcttgtcctggatggtggctggggaagtggatgcctgaatgccaggctctggagaagagatgactccctgccccatccccctgcctaccctcctcctcaatggcccctctctcagtggatgtgagtgaggattaggaccttccccacagagccaccttttggccaggcctcgtgggggatagtgggggcagtgctgagttctaggagtgttcctggaagttgggggcagtgagtgctcagcctggcccaggtgggagagttcactgctgcccaggccttagcaggggctgctgtgctgtctttctgtcccatgctgagcattgtgataggaagctgccacacagtgccctggaaactgacttcgcatgctttccatggggcttccgagggccagggactgggctgggggtggcctagcagctctagtggagactgtgctgccgcagggctgaaggaagaccaaccaaggggacagccgtttgagcccagcccactcactgcctgctgcacctccagctggagcccagggttgggcagctctcatactcttatctaactgccagacctagagggagggaagcccaaggctgcaggtctgagggacacggctcatgggcaaaagggtatcaagaggattagagtcacttgcataggaaaagagggtcagagaggctgagggctggctgaggccagagaggttccctgaccttggacattctttgtgttgtgtaagacctcggcatctttagagaaaggttcttgtgcccctgtgagcttgctcagctgctatggccacttgaaccccaaaaatggtggcctagaagagaatacaccccttacttcccacttatcctcctctcaacctaggaaagatcagacatattgactcaacagtctaacaggggatgggctggatctgcccgtgaccagaccaatgccccccacccagcaagggagtaaacgctgcctgaagtgggaccagtgatacacagcatctctgtctgccagggctcagcccgcgggggggatttgtgagaggctgagcagctgggtctgcacagacagcaagctgcactttgatttcatttgattcccttacaaaatgacattaaggggaatgtgagg

SEQ ID NO: 134713 - DNA, 1049 bp, Homo sapiens
ccaccctgggggcagtcgcattctggaagtcagcgtgtgctggctgcaggagcctgggttcagttgcagcctcccactgggacaggaacagcgtcggggtgggggtgtgacagggaagcctcggtgcctcggtgattggcttggtcttgcagggagcggctgccagcaggccggctggaggcggctttgcgctgccccagcctgggagccctcaggatgtgtgtggggtggagcctgctagggatcccagtgccagggggtgccgttgtgagggatggacgcctctcccccggagcagcactttggggccagcttgggccctggggatgagccacaggggacccacagcctatgcgtgtgagcatgtaacccgggagccagctgggcccctcgcggggtgggcagaaggacgggctggcccaggaccctcttctttgagacatcccggactccatctcggatgaaagtgctttgagaaaccacagagttttctgtttaatggaagaaagaaatccagcctctctccagagtggcggtggccggctagacagggtgtgtgtttgggaaaggcgctggaggaggaggaagaggaggaggacaagtaggaggaggaggaagaggaggagggacgggtgatgcaagggttttgaaagcgctacctagatgtgggaggtggaacctggtcatttggttctgcttttcctagcaggtatcgctcccctggggaacttgggtaagtccataaatagctctgctgacacaaaggagctctgtctggggaaggcagccgcttgacacggccgccaggagctgccacagccacggccgcccgcctgcgggaggagccgggtggaaacctgggcgggcgagctggcaggagcggcagccaggagtcgcctgggtccctgctggagtatgctgggtaggtaccttggtgacaggactgtgtgtgtggtgggcgggcatccaagccaccctgtgcccctgtttctattgtttcttccccagggcagccattgataggcatgttgcaaccaaaccatttgtgc

SEQ ID NO: 134714 - DNA, 1049 bp, Homo sapiens
ctggggttattgatcctcaagccagtggtctgtgtggctccctcagaagaggcacagctgaagagagagtgcctatccccagctgggtccctgggggccttgagagctgcttcccattggcctcttaaggccctggagatggcagtctctttgccttctattaggttggtgtaaaagcaactgcggtttttgccattaagagtaatgtaaaaccgcaattacttttgcaccaaactatagatagatagatagagaactgaggcaggagaggaaggacacttgcctgaggtgacatgcgactcagcaggaaatcagggacaagaactcaggttcccctgcccaggcctctctgtactgcaccaactggatgtctcagagtatccaggtttcatcttggggctctctttctggactcaccagtgacatgtcccttttggaccttcgggctcactgactagagccctgctatcctctgggaaaagcagcatgtgcaatagacaaagccccttggtcggtgggctggagactgcggcaccttctcgtcccttcttactgatgatttcaggcaaatatgccttgtttctcacctcagtttctcctttgtagcaactagggactggaccaagtactgccaggtgccttccaaatatccagttctctgattctttgcaggccgtctcctcttcctggcttccaaaagtcaatggtcagggccagggcttggtgcagcagagaagcagcccccagcctgttccccaggcgcctctgggcaggagccttcgcatgcaagctgcagcccaagccgaagctgggaggtttgttgttgtttgtggagccaggcagtttccaagatgtcattgcttagggaaaaccatcattcctcccaggaataaacaaggctgcttatggctcagccccctaagcctggagaagctggagccactcacagcagaccagccaggctcagcctcagggagtgctgcctgcccctgcacaaccagctgtaccctggcttccaggattggagtggggatgggggcaggatggtg

SEQ ID NO: 134715 - DNA, 1050 bp, Homo sapiens
gacagcaggccgaaggcagccaggagaaggactgtggaatgggaggtggcatggctatgccacccctcaagtcaagggttggaagcaatgttcagccaggccatgaaatcttcacttctcagacctcacttcctgcagttcccagttgattcaaatagcagcagctctgtactgtcctctctgcctgtctcccttccgtgtctttccttctttccttccttccttccttccttccttccttccttccttccttccttccttccttccttccttccctccttccttccatgtgtgttaagcacctactgtgtgccatgtacttacaaattactagtggcatagatctaaaaggcccaatctttaatctagtgccaggatgttcaggtaatggacagtaacaacacagctttaatggagaggcatggggtggggaggggggtgctgtgggactccccagggaagcactcagttcagcctgggagcctcagcaaagcttcctacaagaggtgaagctgcatgtgattgtacagatgcttgcccattgaagagcaggtctccatcccagtctatccacccctcagaggtgtagacatgtttcccgcctatccatggaaattgcttttgtgtgtccagccacatgctcctccttgtctagggaggttgtataggaatatgggctctggacttgagggaaggatctctcctaccttacagtcttgtgctcttggacaagaatggagcttctcctgccttcatgtcctcaagcagtggtctagcctcctcgagttaaatgagataatagctgtaaagcacttagacatgtttcatgtgaatggattctgtgtcctgatagcagtgggagtgccactagcgcccatctcataggtggctgttattaaatgcagcgatgtaggtgaggtgcttggcgtggatctgacactgagcaggcattcaggaggcagcgcggcagcgttttgctggagggaaacagttggaatgcgcaatcagagatgtgtacaaagcaaggagctcaccgagaagcagtgagcc

SEQ ID NO: 134716 - DNA, 1031 bp, Homo sapiens
ggccctgcagcaggtcctgatggacaggcagacaggcccatgagagggtggagaaggggtgaaattcagggagggagatgttaaggccacgctgtgctggagtgaccatggctatcgtttattgagtgctcatgggtgccctcatggtgctgagctctggatactcattagctcatttattcctctaacaacattgtgaggagattctagaaatcctatgttatggctaaggaaactgaggcacagaaaggttaagccaaaggtcacccagcaagtaagtgtgaagttagtatctggagctccccctaatgtaagtaccgcctccatcctcctgaattttgccaaacctgctgtgttggagacagtggaggtagaggggagaggagtatggcctggagggtctctgagctggtggcggaggaaggactgggggtgtcagcctctgggtggtcaagaggccagacctggaggagctgggctgacgctgagccaggagagctaagtgttagctgagccatcaaggttcctggaagctagcattgagtcagggacctgaggctagggatccagagcatgccaagcttgaaggaacagcccatcttgaaagcctgggggtccaaggcagggcaggaattctaacagcctctccctttctcaaaggactttacagttcacagagtgccttcctgccctttctcacttggtccccttaggtctctggcacaggaagcagcaggcatcctcacccactttcatggcagagaaaaccaagcttggagtggggtagcttgggatcacacagctagcaaatgatggagtgaagattccagtccaggtcttctggctgcatgtccagtgctctgtcagtaaaatcctggctgttaagggccaccctgagacagaggcaaaccccagtttacacccccccagtgcaggaagtggttttcgagggcagatgcagagcccggcatccgtggtggctgtgatgaatcatcggagtgagagctgcaggttgtccctgggtcagcaaa

SEQ ID NO: 134717 - DNA, 1034 bp, Homo sapiens
ccctcaagaaagagctgggccgcaatggtggctccatgcaccacctttccctcttcttcacaggacacaggaaggtgagaaagctaaagggggagggagaaggatacatgcaatgtggggagggctggcccaggggctgcagggaatgagaagtcaccatgttccacccccactatcctggcagcctcccagcgaactttccacctgttggacagaagataaaactgaggcccaatgggaccaagaaggcagagcatggacttaaacacatgactttaggattccagatgctgtgttcttatagctccactggtccccacagaaagcagagcaggtgtagcttagcccaggccattgtgtatttggatttaaaagatctgagatagtagctggagaaatagagttacagcctagccagactagaaatccatcagccagtcacaatgacaacacacatttattccgtgtccacattatcctaagcagtttacattaactcattaactctcacaacagccctttgaagtagatagtatttttgtgcccattttacagcagaggaaaccgaggcaaagagaggttatctaacttgctccaggttacacagtgtatcagtgtctgaactagaattagaatctggttccagggccagtgctcttaaccaaccaccacaccgtttgcctctcgtgaatatttatatgtagatgaataagtatttatggatttcctgctgtgtaccaggccctgcgctctgcaacatggcaggagccacagaagtgtgtgaggctggtctcaacctgagagaaataagttaactgtgtgagccttgaaagtggcctaacagtgaacagattgcgccatgatcttgaagcctaccagctagtttgggtctgggctctgtttcttactatgtggctttggttgagtcactcaactcctctgagccatagttttcttctctgaaaagtaggggttaatagcactcacatcccagaatggttgaggatgaatggaagaggctggtgcctgataac

SEQ ID NO: 134718 - DNA, 2001 bp, Homo sapiens
atggaataattaagactgttttctgattttgtttcctgaaaggtctaggcatttcttttttgttgttgttttatccagaaaatgtcaggaaccttttttgagcaatattaagtggaaaaaatgtaaattcatacattatacaaattgagtagcccacagatttgtaggagagaccgccattaaaataagatatgcataattaacattattatgaaaaaactaacagtggattcacagaagctcattttttatgacatgcaactgaatcaattgatgaagacaaggattgaggaatccttggtaaggaagaaaattttcccttttctgtcttgttcacccttccaatttgaaaaatttattacttaaaaaaaatttagattggtttcaggcctctttgattgtgatgtggggttggtagtttatcaatatttgttatttttcaaaaacctgattactttcaaagggggaaaaatccattagccttgatcattttggggggtttgtgaccaaaaaaaaaaaatgcacaaattttactgacttaacaagaaaaagataaaagagggatgggcaaaaaggagatgaaaattctgattcttatccatcttccttggtagaacacttactttgctgaagaaatgtgatataacaccaactcagctggttttagcagcaacaaaataaaggaaaaataatcaaaatacaaacaaaagccaaacccaaggtttgcctttggaatatgaaagcatatatgcaaacaatatttcatgtggaggttttggccttaaaatgaatcacatgaaggtgaaacaaaaaagaaaaaaaaatttaagaaggcaaataaatattgaccgaattgaaatttgacagatgagaataaagtacccacccaaagatgaagcgttttgtgataaattagtatctaattgaacttgctggggattttgagcctatcccccaaaagttacaatttttctgtccaaaaacagcatattgttaggacttgcagggcgggatcttggagggaccttggattggaaattgatggtgggtcacctggggcaagaaaggaaaccctttgctccttttgccagccactagctggtcttgggaaaactggtggccccagtccatagattcccaaccctgttttgtggaaatttggatgtttaagtggaataagtcaaatatattatctctgtgaaatatatttgacaatggcagaggtttgacatttcccatcatcgccattgcatttgggagattttatttttttagtaacgaaatccttcagggctgactggtcacattctgacatatttggaatgagcttttttttttttaagtagcataattaaaaaaatttttttctgttgaattatttaggccgatgagtaggacggtcaaggaatttataatttccaaggggctttggaggcctcatgaggcagaaggcctgagtttagcagtgatgaaggagagatgggctggggaggggtggaggggggtaggggcatctgagaaaaagtcagggttgtagataacaggttatttctggtgcaaggaataaaaatattgcagcacgtccctttgtgtggcctggatctcctgacacacaattcagcttccttcattccattctgctgaaattttgttctgttgtctatggctagaagttgaaaatcatttctggttttgtagaactgttttttttttttttctgttttttttttttttttaaattggttattctgatcatgtttgttgtaaaggaagtagaggtgcatgatggttctattgggggcggggccagttttcttttgtttctattggtgtctctctctggattgagatctgaccttggccttggctctctcacctcctattttaggtggacgtgtgaccagaaatggacatgtgagctaatttttattagctcctgtctgttcaccacattctcgtagattattgggcaaaatatctggcaaattggacttgggggtg

SEQ ID NO: 134719 - DNA, 1981 bp, Homo sapiens
ttttctaacaaggtttgaaatttcaagggcctgctttatagtttgactttggagcaagctaggaaaagaggtttgcttatacttccagctctgcacagaggtgaacttgaacaagggttcttgcttttgcagaacgaaagcaacaaagatggctggtcagtataaggctgacctctccctcgtcctagaaaataaacagccaatggcttgtttcacttgagaaactgggttttaaaactcctccagtgtcagatacaatatttttctcacttttgactcagctcttggcatgctgcttcctctgacctcagaatccttacgtcttctccttggtgggtgataagaacttccttgccatatatgactgatgtatataagccgacttctcatggtcatgaggaaattttgaattttttccatgttcttgtgatgttttgggtcagttgtaccttctttctggtgatgtaaaatgaagtggctcttttcaggagccctagcccccacaaggtcttgctgtgtgaccttggacaaatcactttttccttcagagcctcaatttttgcatttataaaatgaacacttgggatcagatcaaggataataataaataggtttcatttctgattgtaactccaaggaattggttatggctgcctggatcactgtgttgagaaggattctgaggccatatcccgactcccatattctagagagaggggtgcagtggccaaacagcattgtaaatcagagtggagagtgtacctcttagttaccattcccaggcgagaccttgaatcatgggccattagtggcctgtgaagtcaatttagtgaatcacaatcagaattttttaaaaacaagaatagactagaatataggggaacaaaaaatagcagaggcataccacagggtacaggtgagtatcctctcatgaaacttgtatttatatttgtggatgtatgtgtgtgatttgaaatagatttcctcctgtgggtcacggccaaaagagtttgaaaggtactggactagctgaaccgccatgatgtgctgcaggtatactgcactttattgcttatactttatttttgcatttattatctcaattaacttttaggtgaaccctgtgggttaggtgtcctgtgccacatattttgagccctggttgagcccacttcaagggccacatatgaagaaagctcagccacatgggcagcccaggcacataccccagcttgttggccttggatgagtctggaaggacatatggaaaggcagatacaagtttgaaggcagcgtctttgcaaggtcttcttgctggagaggagatctaaagtgtgtggagtccttgtcttttgttccccacttttagtttaaattgccagagaaatttttctggagttagagagtctgtgtttgtgctatatttaatttaatcagacaaaaacacagtctgtatttttgtgtgtgtgcacttccttaaaaatcccagaatttctgtcttagtctcctcatcttttaaatgtgtcaggtcagcgctaatagaaatataattcaagcccccgttgcgagccacatatataatttttaattttctcacagtgtattaaggaaagtaaaagaaacgggtgccattgattttaacatatttaactcagtatatccataatactatcctttcatcaagccatccatatgaaaattattaatgtgacaagttacagtcttttgcgggggtgctattgagtctttgaaatctaatgtattttactcctacagtacatctcaattctgaccagccacatttcacctgttcagcagccacatgtggctggtggctactatattggacagctcaggtttggaccagttgtcgtcatcactggctggccccagaagggtagcaacacctttcagacctcttggttttgttggtgagacttcctatcagaatctcacatgctctgaggcatttcagcctgta

SEQ ID NO: 134720 - DNA, 1060 bp, Homo sapiens
gagaaggtatgcttgagacagaagtcccagtcttttgtaagctaccctcagaagtgatattctgtcacttttactgcattctgttcattagaagtcagttaccaggtctagtccagactcacagggaaggggtgatgtagggcatgagcatcaagaggcaaggagccctgggtgctgtccccaaggctgctcatcaccggccctcccggctgtgcccttggggcaaatcccttctgatcctcagtttcctcatgtgtaaaatgagagactgcttcctccctccgctagccagactgggctagtttcatctttggtttctgagatgatctggccagaaaaaccccaccccacaagactgaagccctggtaaccaggtgtgtgttttcatcccatgcagacaatttcaggtacacatgtgatatctgcgggaagaagtacaaatactacagctgtttccaagagcaccgagacctgcacgcagtggatggtgagtcaggcccctcactccctggagtcatgccaagaggcgcccttccttggagacaccagcccccagccctccccgcctccctcctccctcttacccagaaaaaggccaggcagtagctggaaccatgaggggaatgaccagccctggaggattctgggggcgggaacgtcaccatcatactccacatacacttctatttaggttaacccaagtgaaattgccatttttataggtcaaaatcagtagaatattggaatttcgtatcgagtcattttgtagtttcatattgagcatttgcatgttctgattaaattaaaccggttttaaaaaacgaatgatggccttttagcatcttagattatacaattagaaattagaataatacatttagccaacacatatttgagtctcaaaaatcctagaaagagggtcttagaccttggaagggccttaggggttccccgtctagccccacaccttcagcccatcttgagctgtgacaaccaggcccaccacctgttaccactggcccatctcttttctcacctcgtctttctctctcctcccaat

SEQ ID NO: 134721 - DNA, 1037 bp, Homo sapiens
cagaggagccacacacacacaccccactatgcctcccatccaagaagccatttctgcaaagagcttttcagatgcatctccaactgttatcatgctagagctccttttacagtgactatcgagaaatgcaactctggaatcagctgaagcctgactgtgtggctccagtcactctctgaaagtaacacccttgccttccccacaagccctcctttttccagtcccagcattctcacttccgctaatcactcctcatctggtacccctttcatatcttccatcattgtctcctccaagcgcattgcagtcagtacccaactactgccaagtgaccacagcaaagctcgagggtttgggtggcatctggctagcacagagttgagcaagactatcacctcctcccatatataatctatgctcctgttaatgcaacctgagtgcatgttagcttttttgacgaccacaccacaacattcacactgagctgatgaccattagaaactcctaagattttctcatgtgccttctctggtgcagtaaagttttgtccccgagtggagtccttattaagtatcatctatccttttcgcctatctggattaatgcttattgaatatgtggcttaagggtctgtgactgcatgaccttgttaaggcatgaaacatacagataaatagtgttgcttagaggagtttcagggtggttcgtgccaacttgtcagcattgttttctaataacaagggactaacaatttgtacctggccttcgtgagacccctggagggaactgccactggcgctggtttcgtagcaagaatatacctcaaatgaccaaacaggaatgaaaaacttcaggtgagactcccatgtggggctcctgggttctaggtattccatactcacgtctgtgcttctgatctgagagaggaagtgcatattggtatggcctttcaaggggaggacaatgcgggctcacgcctggcctctccagaccccttgctatgaggtggtctttagctgtgaagcagattcttacgt

SEQ ID NO: 134722 - DNA, 1024 bp, Homo sapiens
tttgtttgctttgtttttatacctccttaattagaatgtaaactcctttagggcaaaggatgttgtctgtctcattcttcctgtgcctagaatggtgctggagcatgaaaactcggtaaatgtttatcgaatgaatgaatgaaaaatgaagattatgataacagcagctaaccttttcagcgcccttgaatccaatgccaaatactgcgctttacacactttctatcctgccatccctgctccaactttgtagccccatgttataattgaggaaaatgagattctcagaggtgaagtcattggctttgggtcacccagccagccagttagtacagtagtactggaatccagatgggtctgaaacaagaggttgtatgccccggtttgcccactggggaaaagagtacacgccccagctagaagaatcacacccaaccttgttgcatcaatctccataggcccctgaatctgagatacaatcatgtcactgagggctcttgagacatgaataggtgcagaaagaatgcttgtaaactctccagacctcttagatcaaactgactctgctgtttataataaagagtccccacttcctgggggctgatggggggtgttgagtgtgtatgcctgtgtgtgtctgtgtaagtgcatggagctgtacatgtctggagatgtttgcaagatttccagcgtgttcccagatgtcagaaggatctggtagtgagtgcctgtggcttgttagcaatgggactcagagtaggcgtcttcagttctatgagactcagtgttctctgtaaaatggagatgatagtcgcccccgagcccagctcatctgactgttggaaggagtagatgaagtcatctattatgcacgtagtcctgggtaaacggcagcacatagagagggtctacaggtttgagcgtgcatgtgcgcgtgtgtgtattctggtcttgtgtgtgtattttagactctggaggagtcttcaaattctagggttctaaaacatcatagctgaagaggact

SEQ ID NO: 134723 - DNA, 1023 bp, Homo sapiens
ttcctcggggtgtgataaggatggaataaatgctttaatatatgcaaagcactggcagcaggcctggcctatcattcgtgctcaataaacattagcttttgttagagttattattaaatcattccaccaagagtggcacgcagatagtggtagaagccccgggcgaggttactgccctttagaagttcccaggctaatgaggacgtgaagcatgaacacaaataatgaagatacaagggagaaagtggagaaggatgctaccgaggtgcaaaaatggcactggggatgggggggagagattgcttccggcttggggtatcagggatgcttgcccaaggagagcgcttatgagagctgggctttgaaggatttggctcagaagtcatgagggatgggaaggacatgcctggtggaggggacagagtgaggaaaggctgggagggaggaaatgagatgcatcctagggaagagccccagaatggtgacgagccccagctgtggagtcagctggccctgggtgacccttgaactgattaggaattcccgaagagaattcacagctccactactgactagtcgtgttgctttatctacagagcctcagtttctttgtctgtccagtgtgggtggtgacaatctggggggtccttgtgagagtctaatgtggtagcatgcatgtgcctggcacaatgttggcactccgggttcgcagccgctgttagttaatgccagcactcaggcggccagaggtggatgtaagccctacatccaggaccttgaaggcctaggaggagccatggcaggagccacgggcacctaccagcatccctgggggtgggcagggcttggtgccgtgctagcatctaacccagccgcgagcttccttctgcaggtcctggagccctggcgtggggcgggcctcctgccggcgagcgcctgcgcccttccctggcgtgagggtatgtgcctttggactacatcgtggaagccagcaccatgcagtccatgggcatatacacttgc

SEQ ID NO: 134724 - DNA, 1040 bp, Homo sapiens
cctgccctgacctctcccctgtctctcccctgcagggcctgcctggcgttcctggcaagaggggcaagatgggtatgccggtaaagattttccgtgtctattacgcagactctagcggggaaccccacctcccacggccacgctgccctggccacctgctgcctggcatcttctgcttctccccctgctttgagtgtgggggccgcatgtggggttgtctggccacaggacctgctgctggcacacggcgtgactggggcctggctggggctggggcttccatgggctctggacccctctggggtagctcctgtctccctgtgggcatcagtggctctccagtgcagttctgtgtctgggggcttctgtctaaggtatttgtgtctgtgggtctgctgtgaccgggggaccttggctagaccaggtgactctgctcccatctcagggaacactcagtctccacatcgtcttggtgtcatccggctctgtccagtttgctcatgcacacgcaaagccagaggacaatggggtttatgggcagtgcccacagcaggcatgaccgaaagaggggctcagcggtgacccccaattcaccagctttctctatggctccccatcatgggaggaaattgtttttccctttgtttggacatgtgcagaacatggagaaagagccaaggcacggagagattaagtcacttgcacgatgagtaaacaatgcagccaggattggaactcagttggtttgttcccggtgtctttgatctcagtggctgcttgaggcagcctctcagggtccctagttggcagtcatattataaaaataggttccctagactcttcgcctggaaggaagatcattcattccaattattgagaagcgggaaactgaggctctgagaggcagaatgagataccagggtccctctgccactgccctgcaggttgactccttgacttggaaccatggtcagaccaagtctgggcctcccatcgctggtggttggtgaggaagggagtatgaagaggaggcctggagc

SEQ ID NO: 134725 - DNA, 1019 bp, Homo sapiens
tcttgggacttaggaagggtctcgaaaacacctctcatttcctctgcattccatgagcctcttagtcttgggcaaaaccctctccctcgctgagctcctggatcctagctcagcccaaagaccccccatacagtaagggagtggatcagatggcaccaagatctttgaagctctggctctggagtcaggcaggcccttcccacttacgcagccaagaacctgtaagaccagctcacgcagacctcagtttccccgtctatcaagtgggcacatgtctgggagcatatcaggaaatgcttgccaggaaggggcctatccctgttccctccatagagaggcagggaaccctcggtgtggggggtgtggggggcagcctgagccgctcactgccgttgcttctctataggtcgagtttgccatcagccgggtccagatgaatttcctgcacctgctaagctccgaggtgacccagcacatcaccatccactgccttaacatgaccgtgtggcaggagggcactgggcagaccccagccaagcaggccgtacgcttccgggcctggaatggacagatttttgaagctgggggtcagttccggcccgaggtgtccatggatggctgcaaggtaactctcagagcccctcctaggcccttcatgtggggacaactggaaaaacacttgtttggaaaaatgtgtttctattataagattatatctaacattttaatagtatactatattaatgtgatagatatgatttcatctttgtgtaatataacagttttctaaaatcgtttttactcactttcctctctgggaagctatgaggggaggtctgggctggtaaaaattctttgggctagtagatgttgtacttacttgcaaggctctttcaaagaagatacatttcttcttcctgctcccaccctagtcaggctaatttcttctcattatattttttggtcattttcaaatgtcctgaacagggtgggttgtcaggggaggggaagacagaaag

SEQ ID NO: 134726 - DNA, 1006 bp, Homo sapiens
ccagcctggtccccacaacgtgcctcccccgatggccatggtaatactggaataaggtccttgtgataggcaccacatgcctgaactctccccaccccatccaccttgtatttgtctgttctcacattgctataaagaactacctgagactgggtagtttatgaaaaaaagaggtttaattgactcacagttccgcaggcttcagaggaagcatggctgggaggcctcaggaaacttacaatcatggtggaaggcaaagaggaagcaagtcccttcttcacaagacagcaggagagacagagcgaagggggaggtgctacacacttttaaacaatgagaccttgtgagaaacagcacctgggaggtggggctaaaccattagaaaccagccccgtgatacaatcacctcccagcaggacccgcctccaacacatggggctgaaaattccatgtgagattcgggtggggacagagccaaacaatatcacacctccactcctgtttagggtcttctgcctcaaggttactcaaatgcatcctctcatttccttgcttgcagcagaaacagaaaaggatttttttttatgactagttgaagttttattacaatcttgctattaggagaaaggccttacagtagtctcagtttagaaattcacatttgtttgcttgtattgttttaaatggacacataatgtacatatttatggggaactgtgtgataatgttcccaacacaaagaaatggtaaatgtttgaggtggtggaaatgaccccgatttgatcatcacacattgtacacagaacagcaggttgtattatgctcctcatctttctagattggttcagatgccccttctaggaagccttcccagattttcgccctgcagaagaaaatgtcttcccacagtgctgggctcccacagcactcggtgcctgtcatcctccatcctggcacgtgtggggctcttcccaccagggacagcgtcttatccagtgcccagcca

SEQ ID NO: 134727 - DNA, 1070 bp, Homo sapiens
ctgcagagggcacggggaggctgtgcgggctgcgtagctgtgctggcaaaggagagcctgggcgtctgggcagttctgagggattgagccataaagggaagggtccctggctgtggaatgactgagcgggcggagaagccctgtgtgggtggtggggaagaagagtccatcccacccaggaactgaagatagacacctcaggggtctgttagacccttgagagagcaggggcagtggcggcttgggtgtaagaaggagatgtgcagaaggagggtgcagtggctgctacttccttgtggggccagtttctccagggatggcggggaccctgaactccatagccctccccagctcacactgctggagtcttcaccaaaccccactcactgccttttaggagcagccctgctgccctaacgagggctggctggaacaactctgcctttatctggcatgcagggacacctgcccatagctctccttcaaggtcaggccatactttcagacctacgtgcctttgcctccgtgctgttcccgctgcctggaatgccctccccagtcttctcccccaaatcctcattgtttctcaagcccaccttaaagcttcctttggtaacacttctgtattgtactaccccccaccgtttaaaatcttggaacacttttactcttttctatattctttgcatcttacgtagcgcctggtatatagtaggaagtcatagggcttttttaaaaagttaatttgcgcccactgggtgctcagtatgtatctttgtactttgaaatgtgacctcagggaggaggagagaggttaacagttctgaggctgttgcccttagaagctgagtcaatcagggacttcaaagctctttgagtcccataccctgcctcccaacccaccctagcagggtgatatccccttgcgatatcaagagcaggtggtactttctctattttacagtgaggaaaatgcaagcccagctatacacagtgagtaacagcagccaggactagcacctgtctcctgatgcccagcctgcttctctatcacagcatcgtcccagcct

SEQ ID NO: 134728 - DNA, 1056 bp, Homo sapiens
attcgttcacccagcaacaatccgcgcagcctggcggccctcggagccgcgcgcgcttcccggacgcctaacgcaagtttcttttcctctttttgtcgcgggggggaaggtagaacaagggccagtgtcgggtaggcagccctgacaatggtaggaactgaacgggctgcaaaaataagtccagttccctcttggtacacctgcggaggagaatgaggtccagagagggggcgcgactggcccaagggtgcacagcagggaggcgcagagctgggctctccccagtgtgatggggctggcacaggcagaaccagagtctgcttgctgcgtgaccttagacgacacttccaaagctcctttcccgggcttttgttgaaagaaatgacggattggagtccatcattacctatgtttaaagacctgcttctgagatagtcggaagggaaaattgctgataacaaacctgggctatgttggagcagagagaagctgagacaggctgcagtgaaaagagacattgttcctgtcctctagaacagaaggagaagaaatgggctggaactgaagcatgaaagactaaagttagatacatacagggacttcccaaacgacttttccaggcgccttctctggaattggtgggttttatttgggggctgttttgttaataaaacaatggctgcccatctgttagagagggcctaagtctggtttacttactaacaaacaggggagcggaacctatggtgttttgggactctgggtttattcctggggcagtcgtctcacagttcttctgcaggagggaggcgatgtccacgtggggcctttgcctcctaaagtccagccggtttgcatttaaaacatgtgattggggctgtttgttgcaaggggatttcatcagctcccaccgtcctgcagactctgccagaggcgctaggataggggtttccagagagactgggaatggtcccagctacagggccgtcatactgagagggtgttttggaaattggtgcacaacatggacacttcagtttccccccgtgggggcgt

SEQ ID NO: 134729 - DNA, 1924 bp, Homo sapiens
caagctctggctgatgccaagaacttcagttcccaaaggtaatgatgctgtccccagagacacccgccaagatcccaacgcttatcagctgccgagatgcaggggagaagttttccactcaggtgttgcattattcagagcagtgtggccaagagcagttagagtggggacagaattccagctgggcctggcaccactcagctgctcggcctcccctcttccaggcgtgatggggtctgactccttctccgcctgttgggtcttttggcaggatgatgtcagatccacctcccaggggctgtcaagcttcaagccactgcctcgcccaccacctctggcccaaggcaacgacctcccactaggccagccaaggaagctggggagagaggacctccagccaccttcctccatgccttcctgctcgggcactgtcttctcggctccacagaaccgcagcccgccagcgggcaccgcacccaccccagggacctcctctgcacaggacttgccctcttcccccatctatgcctccgtctcccctgccaaccccagctccaagaggccgctggacgcccatctggccctggtcaaccaacaccccatcggccccttcccacgggtccagtcacccccgcacctgaaaagcccctctgcagaggccacagtggctgggggctgccttctgcccccatcaccctctggccacccagaccagacaggcacaaaccagcactttgtcatggtggaggtccaccgccccgacagcgagccagacgtcaatgaagtgagggcgctgccccagacgcgcagtgagtacagcaaggccaggctctgtggtccttgggggtccctgtcctcttcaggtcagtctacctgatgacacagtgaagggggggaccagctacttgttgagggggctcagggccagagtggcgaagggagttggagaccccagtttgaatcccggctctgccactgactggctgtgtgactgtggacaagctgccgtctacaccttgctttccccatcataaaatggagataacagtgacagtcctgccaggttgctgcgagcgtcggggtgccttctccagctccccctaccctggccaccctgtgttcaccaggaggactgaactcgtggagggcaggggtggcttcccttcctgtccgccatggcctggcctggagtagatgctggaaactgaagtggcagtctctggacccctggcaggtctagggtcagggtgcaggaagaatcttggggaggccagctgacgctgtgccccggtttgctagaggacatgggctgtggggtagagggaagggcagagcctgcctccccaccctgaaagctgtggagctcccgcctgtgagtgagttgggagcattttgttggattctgctgccatcttgcggctacagtgatacataggccccgtaggacattccctgagcgcctgcacagaccaagatgcaaaatgcagggctctggcgctcgcagcctagtgaggggaggcagctgagggagagcaggcagacgtggtgagaagacccagggctgtcacagatggatcactgctgtctctagagctggcactgagctggacatgcagggataataagagctaacagccgtactaacaataagcactttgtgccagtgttcaaagggccttgcctatagtattaactcatttaatcctcccagtagccctatgaggttggtactattattatctccattttacaaatgaacaaactgagacatacaaagtagtaatttctggctaggtgcagtggctcatgcctgtaatccaagcactttgggaggcggagacgggcaggtcatttgaggtcaggatttcgacctcaggagcctgggcaacttgctgaaagccccatttctactaaagatacgata

SEQ ID NO: 134730 - DNA, 1003 bp, Homo sapiens
acgcagggcactgggacccatcctaggagtctggacccccacaccggtactccactctgtctctcccaggcagtgtgctctcaagaaagcccctcactcactcttggcctcagtctccccatctgtacaaccacggaagacccccatggctcctccagttctgagagtcttctctgcatcaggaggtgctggaaaatatttgggggaggcacagcaaggaatgacaactctatattcccacctcttctgtgtatatttgaacaaggactgcagcattcctccagagagagaaagagcttgaaataatcacctttattcaccactaagtgccgctgtgtggtctacaacaccacatattagtaagcttttgctgcagtaatgctgagtaataaccctaaaatgtggacaacaacccaaaacataacatggccaaaatcccttcctgcatggagctcacacactcctcatacctctgctaaatcacttgtcacattgctttaacctcttcgtgggtttcccttccccaataaacagcgagagctggtgcaaaatggaggcccagaaagtgtggaacagaaactggaaggaaagcacacactccccggccacttgcaggattatcttctactatgcggccttctaaacattcgcctcccacatggtaggaaaatgttctttgttctagtgttcagttgggcaagatgacatcaggtggctggctatcgatgaccgagatgccccagacactggccccaaatggagccagtttccatttagcctgaattcctcggatcatgctgtgtggttattgatcccaggttaaatgtggctcattctgcagccatttcccctcaaagcagacacagtcaatcaaaggaaatcagatccagctttcccccattcacaaactgtgttgattttccatttgtctaacagagagccagccctgagcattttatgctgccttcacacaatatcatttcccccataaagatgttggccg

SEQ ID NO: 134731 - DNA, 2064 bp, Homo sapiens
gacaaatgtcttttctttagagcagtggggactcgcctgtttccttcaaggaggcaggcagaatgaagggatgctggtcatggcagtggggtctttccctcccctctctccattattcctgcccaaagcattcaaggtaaatagaaaaggggtttggagaacgtgtggattttgcatgtgtgtgtgcgcgtgtgcatttggggaaggggttgttgctgcacccacccattccctaaatatttatttgatgtatcttttctttttgccttttgctcatccttcctccccaggagcggctgctgtggcttatagacctgatggaggtaccgtccttcctgccggtggggactgtgggagtcccttaaccaggggccggggtagggggctgtggccttttctgccacccccgtatgtctgcacccagtcctggtggggaccaggggttcttattggtgctgactgtctttccaggtcatcaggtttcctgagctctgcagtgagaatcccgtccattcaaatcccagctctgccactttcttgctgtgagacctcaggaagtggtttcacctctctgagctcagttttaggatctgtaaaatgaggatggtaatttctgtcccgtgatgttgagagaccccttggcctttgcatatgccatgtgctttctgtctggaatgttcttctccccacttcatatgacctgactttctcctatgtgtgcttcagccctcagctcagaagctgcctcttccaagaagacttccctgatcctcccaaggggagtgactttcaggccacggctcctcttgcccccgggcttcctttggtcacagctcttgcctcattatgtcctattataaaagcctgtacaggtttcccagttacccaatgtgactgctgactgcttgagggcagcgatcgcacgtgcggttaccattgagtccctatccctagtgctcagcacagaccctagcccataatttgggcctttattaataacaatagtggctgagatttgttgaatgttctctatgacactgtggtagtgctttccattcgtatcttctttgaccatcccaggagctaggagttgtgagtactgctgtgatccccattttacaaagaagaaaaccaaagctcagagaggagaagcaacttgcccaaggttgcatggctagtgagtgatggagccaggattcaaacccaggcttgcttgactctgagctctgttgttacccctgccatctggctgtgattcttccctgaaggatctcaccagctccctgttaagcatcatttcgtcatctatctgcctctctcctcccttccttcttcttgtccttcctttctgttaacaaatattgagcatttactgtgtgctatgtacattttgaggttctggggatacagtggtgaacaccaaagaaatcctttccacgatggagttgaacagacagcaggaatgccaggcaataacacaggatatagataactgaaatacacagtaagctaaatgatgacaagtgctagggagaaaaataaagcaggcaagggagactggagaggggtggggtggttagggagtgacccttgagtcaagacctgcaggtggtgagggagagagccatgccaacatctgggagaagagcatttccaacagaagcagctgcatgtgcaaaggccctgaggtaagagaatgtcagagaattccaggcggccaataaggccagagcagagggagtacgggggcagacatgctgaggactttgactctgagtgagatgggagtccttggcaggtaagagcagggaactgatgtggtctgacttcgatttaacagggtccccctgattattgagaataggtaagagtgggtttgtaccaaggtgaactggttaattcctaggaaccagccacacccagaggtctgtgggccacgaagggcctgggaaggtcatgcagcctgagttgctaaagatgtgatgatgggttctgcaggcaccagctcctcctgtggctgggtcagcccctgccctgttgtctcctgggaacccctcttctccc

SEQ ID NO: 134732 - DNA, 1042 bp, Homo sapiens
gatctcacaacagaaggaataaacaaggtaggacatcctctaaggggtattctctgcttcctcacagctccctgagtgaggaggtctggccagccagagggtgccgagtgacttacactacctcattccaactgggcagccccttatctgcccaccccccagcccacttatctgtgactgactgctaggttctgggcactacctctggcaccagggttgatggcaatgaacagagcagaccaggtccctgccctcatgcgggttttactcagtgaaggagatgtaaagacaaaacaaattctaattaagaaagatagtactatcaaggcaaggtgctgggggttatgagggagaataacagatgaaacaccacacttagacaggatggaagggcagagggggagtggcatggccactcagctctagagcagctaagaattcctgggcttctatctttctgtcttgcagccaggattttacaagggcccagccggctcccaggtgaccctgagcagcctggggaaccagacacgagtgctgctggaggagcaggctcggcacctgctgaacgagcaggaacacgccaccatggcctactacctggatgagtaccgtggtggcagcgtctctgtggaggccctcgtcatggccctgttcaagctgctcaacacccacgccaaggtgacccgtgccctgcctcccaactggcttcagcatttccagggctctgcatcctgccctgcccccgctcctttgctgagaacctacaaggggtcaggcctgaactgaacactgggcagagacctgggactgaggcagcctcctgcccccaggatgctcacagactcctgggggaaacagacatttaaagcgccctgtgattgggtccctgtcgcagtggcttccaacgctgagtgcacagaatcacctggattgctcttaaaagcagtgctcgggccccattccaggctggttaacgcctcatatctggggatgggagccagctgtcagtcatcttcacaagccctccaggtgactgtgc

SEQ ID NO: 134733 - DNA, 1017 bp, Homo sapiens
catttgttacagttgatgagcaaatatggataatatttttattagtccatactttatataagggttcacagttcattggattttgatcaatacataatgtcatgtatcaaacattatagtgtaatacagaagagtatcacccctctaaaaatcctctgtgctctacttctcatccttccctgagcctcaggcaaccactgatctttacagtgtctctatcagtttgcctgtttcagaatatcacatagttggaaccatgcagtgtgtagccttttcagactggcttcctccccttagcagtatgcatttaaggcttttccctgtgcatttttatttttccccatgaatttttgctgacttttctaacaaaagcttgttgatgtttttgttgggataatgttaaatacataagtgagctgagagagagccgatgtctggataatgctgaaccctttccaagaaaaggggatattttatttgttgagtaattttgagtgttttagagtgttttagaagtgtgtgaagttttcttcatataggtgttgttaacatttcttgttaagtttattccttggtagttttttctcttctgttgctactataaatgaggtttccccttccttccatcttatcttccagctggtcactgtttgtgtctgtgaaggctgtggacttgagcttgagaacttgattcttgcaggtctacagagcagcttgaagcaggtggtagactggattctggtccagctttgccccaactgcccaggaagccttggaccagtgacacccctcctctacctctcaccctagttttctttctttcagaatgaggggctggattaaatgtacaccatttcccagagtgtgattcctgtaaaaacaaaactgatttgtgtttttacctctttgtcttccctttgattgtaaaaatcaaatgctccttccctgctgcagcctgtagagctgggctgcatgtacccagcctccctacatgccctggccttgtcaaatgcaacc

SEQ ID NO: 134734 - DNA, 1049 bp, Homo sapiens
ccctgaggtgacaggagacccctggggaagcagggtggtggctgccgtgacctggcctgagccttgatcctaaggagggcagatggagcctaattgagaccccggggcgcgaacagtcaccccccgactgaagcctcaggtgaacgtggccactgtggcgtgaagagcatgagcaaagtgtctgagtagtcccgggtgttggccctgaggggatcccggaggccatctccctcagcaccttccccccactacacttgcagctgtgaccaagagggggtgaggggcttcctcaaggtcacccatcaagtcagaggcagagctggggcaggaactggaatgttctagggtatcttccaggccttggcctgggcctccttgccagtcggataagatgcgctcttcaaagtacgagagggggctttgcagcctgctgtccccggaagggatggctcctccagtccctctaatgttatcctctccctctgacaggtgaacctggtgctgggggacggccggtccctgggcctcacgatccgtgggggagctgagtacggccttggcatttacatcactggcgtggacccaggctctgaagcagaaggcagcgggctcaaggtgagggagggcctgagggagggaaaactctgtgcatggagctctttgctgctgattttaaatagacctccagcagagcaatcagcactccaccttgaggactggtcccagctggggagccctccctggctgctgtacctctaaattcacagctcacagcagcagcggggtggccgcctacgcagtgtgggcagcaggccagcccgaacttgtcgtgctgctgttttgcaaacactgctgatggcctgtggtggccctgacctcagggtttgttacgatgcgtggagaggatagaggagagaaagtgataagctgggttgggggtgccctgggcagcttcaggcctggcattcaatccagacaaccagcagttattgaaatattactggctcccattttaaagagggctaactgtgtgcccagcgtctgtgatc

SEQ ID NO: 134735 - DNA, 1029 bp, Homo sapiens
aagcagcaaggacagcatgtgcaaaggccctgaagtaagactgaggccagtgtctgcaaggattgagcagatgggagggtgggggttaggtaaggtgcctctgggagtctcaataactcatataagaatgtggggctgggcacagtggctcacacctgtaatcccagctctttgggaggctgaggcaggagggttgcttgagcccaggagtttgagatcagcctaggcaacgtagtgagaccctgtctctacaagtatttttaaaaaaattagccgggtatgatggcatgtgtctgtggtcccagctgcttgggaggctgagatgggaggatcacctgagcccaggagattcaggcttcagtgagctgtgattgccccattgtactctagcctgagcaacagagtgagctcctgtctcaagaataaaataatgcagaggtgaaggctgcatgaatcatactccagggaggacccagataccgaaggaggcaggagacaccctgaaccatcccagagacaggccgtcccagattccacagccccagactggcgcatctaccctcctccctgttcctcctcttcctgacacagtgtggaaaccccatttccctattgggaaggggcatgagctgatgtctctggatccctggctgctggatcctgggtaaggggcctggtggggtctgattctcttctctccagcagcctggtcccatcttctgatagtccaaaaagccacggccagactcttggactcgtaaccataacctccacagaggaagtatacctctcaggaagtgggttctcagggcaatagtagcataaaaatcacacatgtagccaagttacccctgaaaatccttatgccatcccctggagctggttatagttttatagcccttttcaggagtgtccttctctgtgccgtggtatgagacctgtcccgtgaggctgaagacaaagtacagagggaagaacagatgtagtgcttagggagtcagacgtggctgctcttaaatcactgtcaaa

SEQ ID NO: 134736 - DNA, 1139 bp, Homo sapiens
tttttctttgcttttctttttgacctgtgtagtgtatgttataatacaggctaagctgccacaataaaagagcttaaatactgtgatttatttattgattggcttatttatctatttggagacagagtctcactctgtcgcccaggctggaatgcggtcacgagatcctggctcgctgcaacctctgcctccagggttcaagcaattcttgtgcctcagcctcctgagtagctgggattacaggcgtgcaccaccatgcctggctgaatactgtgatttaaatgagagtttttttttttctccgtcatgtaacagaatagagggacagtctcatctgggggacagttctgctccaggacttatcctgggacccagattccctccatcttccatcccccagggtcttgccccttctcgtggttgaagctgggccacatcaggtcccctttctacctcccaggaaagggaaagagaggcatctctttaatttcaagatcaccaaacttcccactggcctagacccaggtgcatggccacacatagctgccaggaatgtggccaggattgctgctccacagggaatcttgtgcagtgtgaatcttgggcataagtaacagaaaccagccctggccattttacagagcagggatgtactggaaggacaggggcagtcccagaattgaagccgagaatctcagggtgcagcctgcagtagggggatgtccaccattccgttctcagtgtccttcccctgaagattcccaaagagggagcacctcacgggctggcagggatgtctagggactttgattgacaagaccaccaagactgtagccagtgggagaggggtggttgcccaaagcactgtggggtgttctaacttgcagaagggggcagggacaccaatagatgtcccctatggagccctcctgaccccagacctgtactgtttcttgaaacacaggaaggctgaaatggtccctgatatcttacccttctctctgggtgctgtttgcattgcaccccttggttactcctggaaccaagaacatagctcctgcaggcagctccctggtgtgtaggaccttgacactgactgccaggaggccacatggcttggggctctgggccaagtgcca

SEQ ID NO: 134737 - DNA, 1056 bp, Homo sapiens
caaatctatcattatttttcagacatcggccgagtaggtttttaggaaatggctgattaatccaccttgaattcagatttttcatctgagcttgaattaaattggaagcccatcaccttttcaactgagaattgtcaaaaagtgatgaggcacagggatgtcaagagtctgggaggagactaaatcccatcaacgtatctattcatggaatgagaaaacgatatggatataaacagatattcctgatggatctctgtgcttcggacatcgatcccagacaacaaaatgtgccattgcaaacccattggggctcatcttgagtgaatatatttatgactctgagaatcttgttcttccttaaagaaaaaaaaagaataaacagacaaaacttaaaagaacatttataaagcaatttacttaaattataacagactaaaagccaggctttgaggataattgaagaattgcattaaagaggaatcaatatctttctggaatctgttctgtccttatgagttgttttgcaaaggggtggacagcctatctgtcactttgttgcaaatttcttgtagcattattcccaaggtcaggattttatccctctctttgaaggtttatgtttttttcttttcacacagccttaactcacccaaacatttagaagcaatgacagtggagagcagggactttaaaatgtcaggtctttcttccagcctctgagatcccggcattcgcagcatggaagcaaaggtttccttctgcatccttacattgaaccctcagagaaggtcaaactcttaaaagagggtggaaggaatgaacagttggtttttatatcttttttaaaaaaaactttttctttaaatgttcttctttccttaaatactctcctatccagccgttggtttttaaaaacctacttcgtgaggcccaaattaaaggcatatctaaatagcactaaagaaaaccagaaaaggggagaagacacccacgttcccatccttctaactggacatcatacatttctctgccatctcccctggcctttatccttgt

SEQ ID NO: 134738 - DNA, 1072 bp, Homo sapiens
gaatgtatagcttacagagcaaatagctctcaggcactgggaacgtagttctgcacagacatggcccttgcctttgtgaggcttaaaagctagtgcaggtgatagtaacaaatacttgagcaaatgtgtggttacaatgtgtgaatagggctgtggattcttatgagcattaaaagagataaaatctctgcttggcataattaggtggcctttgctactgccattctgtggttttttgttttttgtttttccctgaaacagttttgttagctcttaagtggcctgaggaggccgtttgtgtgatccacagtgcactggcttgacgctgctgtttttggaccaggttgtgtatcctgaagcaagtcacttgccctctcaggacctcttgttctccacttggaaaatggggccactggaccaaataagcggtccctaacctttttggaaatgagactcctgcctgaatgtaaaaaataaattccctagcccctgagagtgtttgtcctttctgccatttgttaattgagaaatataacctcatgacaacaggcttccagggatttaatcatgctttttaaaggagtgtgtgtgcttactgatctacagcccagggctactgaaaaccagttggagtatgatggatagtgttgggtccagggtggattcatggatcctttgcaggcatttttcccccttcccccctcccccgacctcctttgcgtacaagaagtgaagagtttgggggaaaagggacacatgctctgcttctgcagagaaatgcttctcagggggttggactgttctgtaaacccccactccccgccagcgcaggtgttttgaactccagctgagggcctgctggctgctgggaaactcctaggcagcagaggcccacgactacttcctcctgagtgccgttcagtggcctgtgtccaggtgagtcttgagccgtctccctggctgtgcacctgatgttggcttccctcatttgcttcccagcccatcaacccctttggaggaagcccttgaggctttcagaaacttctttgtagcttctggaaaaaggccgatc

SEQ ID NO: 134739 - DNA, 1120 bp, Homo sapiens
atttaactttatgtatccagtttcccgtctggtgagaaagatgcttctatccctattttacagatagtaaaaatgaggctcagagagaaatgatttatccataccctgggaagcaacatagttgggactcagaagcctctttttccatgcaaggcgaagatactgatcttagtaattccttggtgtttctcctagtataggagttattctatctgacatccaactagatttcaagcatgtctcctctacttgtgcagttaggggttgtgtggtacttggaaagctttctttgagggtgttgggaatgagaagaagccttttgttcttgctccggtgactggaaagttctttgttcttcccagaatatttccagtcatgcccttgatagtgtatttccagaatgacttctcacagtttgtgttctgatggctcatcagtaacagaagttgtatctgtcgggagggataggagaatagattggggaagtgcaggaaaaaatgcttggaataggtaagaataattctgagtgccctagccaggtaggatttatgttttatacctttatcctgtcaagcctggtgcagggttttgtatatgtcaggtagctgtgaattggttttaaaaagtattaatttggctgggcgtggtggctcacgcctgtaatcccagcactttgggaggctgaggtgggtggatcacctgagatcaagagtttgagaccagcctgggcaatatggagaaactccgtgtctactaaaaatacaaaagttagctgggcgtggtggtgtgcgcgtgtagtcccagctacttgggaggctgagacaggagaaacgcttgaacccaggaggcagaggttgcagtgagcggagatctgtcccacagcactccagccttggggacagagggagacgccgtctcaaaaaaaaaaaaaaacaaaaaacaaaccaaagtattagtttatggcttacatacttctcagatttttttttttttttttgagacagagtctcactctgtcactcaggctagagtgcagtggcaccatcttggctcactgcatcctccacctccagagttcgagattttgtgcctcaggctcccaagtagctgggattacagg

SEQ ID NO: 134740 - DNA, 1097 bp, Homo sapiens
tttgagatggattctcgctctgtcgcccccaggcaggagggcagtggcgtgatctcggctcactacaatctctgcctcccaggttcaagcgattcttctgcctcagccgcccgagtagctgggactacaggtgcctgccaccatgcccggctagtttttgtgtttttagtagagacagggtttcaccatagtggccaggttggtctcgaactcctgaccttgtgatctgctcaccttggcctctcaaagtgctgggattacaggcgtgagccagcgcgcccggcgtggaccttaaaattttaaaaaagtttgtgttaatggcatatttcattggagtgaaacaaaacactggctcccatatgtaaggcccaagaagaacaagatttaagagaaatacgattttctgtttaaatatttttgatttttagaggcccctgtcaaaattgaatgttgaagatgtttgccaaaggcagtaaatggtattatcctgagttataaatgcagggagccatgggagttgggaggtgatgtcttgtgaaatcatgcggagctactgcataatgttcaggccatgagtgttatttatagattgttggtttcgaaagtatctttagctttgaaatacagcccattatagctgatgggaagatagcatgtgaaggattggggtacaggtggccgaagcagacagtagtaggccagaaataatactggagtgaatgtggacttgcagaaatagttcttggagttttgagagagagacctgttaattgtttcagactagcatcagggaatgttgatgtcatggggtcatttcattacaggtccaaagttctgttctgaatcaggatgtggaaggttaagttcattttcactcattcgcgtggactctagacagttggtatacaatgatgtacagtgttgtataacaaagcttaattttagatgcaggatgtcttttgctctcaaataaataggttgatggtctagaacctctctttttttttttttattggtgagcggagactcaaagcagagattatatgttggctgtccttgtggtctgttttcatgtagactctgaccaaacctagaga

SEQ ID NO: 134741 - DNA, 1088 bp, Homo sapiens
cttctgagtatactgataggtgagcctgggtttctccaaaagtcaacaagtagcttacgaaatgtacctgaccaaccagagcattgttctgataatccctccgtgacatcactccccatctccaggcattgggatcccgtggcagttgcagcactgaagtggagaaggagacccaggagaagatgaccatcctccagacatacttccggcagaacagggatgaagtcttggacaacctcttggcttttgtctgtgacattcggccagaaatccatgaaaactaccgcataaatggatagaagagagaagcacctgtgctgtggagtggcattttagatgccctcacgaatatgaagcttagcacagctctagttacattcttatgatatggcattaaattatttccatatattatataataggtccttccactttttggagagtagcaaatctagcttttttgtacagacttagaaattatctaaagatttcatctttttacctcatatttcttaggaatttaatggttatatgttgtctttttttcctatgtcttttggctcaagcaacatgtatatcagtgttgactttttctttcttagatctagtttaaaaaaaaaaaaaaccacataacaattctttgaagaaaggaagggattaaataatttttttccctaacactttcttgaaggtcaggggctttatctatgaaaaagtagtaaatagttctttgtaacctgtgtgaagcagcagccagccttaaagtagtccattcttgctaatggttagaacagtgaatactagtggaattgtttgggctgcttttagtttctcttaatcaaaattactagatgatagaattcaagaacttgttacatgtattacttggtgtatcgataatcatttaaaagtaaagactctgtcatgcatttttccccattcttttttttttccctgtctccgtgacaaccagtggttcttcatttttgatcatgcgaaatgcattttgacccagatggtctgcagaacttcacttaggacattagcacacaaatagcacacatatcacatacccatttatatacata

SEQ ID NO: 134742 - DNA, 1048 bp, Homo sapiens
aggcacttcttacatggtggaggcaagagaaaatgaggaagaagcaaaagcagcctgataaatctatcagatctcgtgagacttattcactatcatgagaacagcacaggaaagactgacccccatgattcaattacctcccccttggtccctcccacaacacgtgggaattctgggagatgcaattgaagttgaggcttgggtggggacacagccaaaccatatcaccaaggttttgttcttggacttctctaacattctattggtgagaccacattcatttccaggctttattacctatactgaagacccaaatttctatctcaaacccatttctcttgagctgtagtcattaaattgcttatttgatattttgacttggatgtctggtaaacatctccatcttaacatgtcagtttggagggcttaacaaactgtatccagttttgttaaggctttactctccttattgctaagtgtagcaactcctaatctctgccaactgcaaatacagatttcccaaactggagaaacatgaagcaacactcatgttcaagtgcttagactcaatgtttaaatgggttgccaacagtatttttattctggattaatggagttgtgcttatttacttaactgcttgactattaatactgagccaagcaacccaacgttgccagtcacagaaaccaacagcagagaggttttatttttttgagacgctctttcgcccaggctggagtgcagtggcataacgatcagggctcactgcagcttcaacctcttgggctcaagccatctgcctgcctcagactccagagtgcagagattacaggtatgaaccaccatgcctggccgggagggtttccttttgtacacttaatacattatagggctttgtagcagtgtccctggcctctacccactagatgccagcagaaccccttcagttgtgaaacaaaaaatatctccagatattgtcaaatgtcccctgggtgccaaaaaccacccccagattagagaagataaggcactatacaagatgtctgg

SEQ ID NO: 134743 - DNA, 1142 bp, Homo sapiens
ggaggccaagatgggtggatcgcttgagcttaggtgatcgatgccagactgggcaacagggggaaaccctgtctctacaaaaaatacaaaagaaaaaaattagttggatatggtggtggcgctgcctatagtctcagctacttgtgggggctaaagcaggaggatcgcttgaacctgggatgcagaggttgcagtgagccaagattgtgccactgcactcctgcctgggtaacaaagttgagatcctgtatcaaaaaacaaaaaagaaaagaaaataacttacaaagcaggatggcagcattctagatgctactgttgatgataagtttaggagagaaacaaggctggttgttcagagagcatgactgggttgtctacaattatcttaggtggtttttaaagatgaaaagaccgatagtctagttacctagttaaaaaagcccaattgccttcaactgcccttgcctcttctccacagccgctagaggggagttctccctcttctgactcttctgaccctggcacttgtctttctgttcatagtgtagaaacagatccctgacccctatctgccccggggggattgctggccttcctgataggaattcagaggattttttcttctgacttaggcccggtttcctgacaaacagcatgtgatctgtctgacttccagcacacctcctgccaagcacagctatgtatttagtcccaagctctcacgtacagttagtctacctctcccatagtggagtccgtcatttgaggatgtgacttccgggagctgaaatcaatgtaatggagccactagcaacggaacattctgtgggacacactttcggaaataatttctaaaatagctcacatttattaacatcaactttataccaggtggcattcaaggtactctatatacataatctaattttcctaccatctctatgaggtaggtattatcatttctattttgcagattaggaaactgaggctacagggtcacagagccaatttgtggtgaagtctggatttaaacccaggtctgtctgagttcccagcctgaattactaatactgcattctttggttcaatttgttcaggccatggcaatgttccaagtagtatgtctccatgaaaagtttagg

SEQ ID NO: 134744 - DNA, 1050 bp, Homo sapiens
ccttggcctgcgttcgggccagacggcctgggttcggcgcggcgggcagcctgcggggggtccttcgtgcgccctggggcccctcccccgcgtgccggccgtgggagcggctctgacaagcctcctgggggcccgcggttggggagggccagactgatttatggggagaaggagatcccccatcctcagccgacctggacagttccagagggcggagactgagactgggacgagacagctgcccaaggccaaggccgtgtatggcgagacagctccagctggcgtgaaggagcctgggtttcaattctggcccagtccaggactggctccttgaccttggatggtacactttcttttctgggtcttaacgtcctcacctgtaaaatggagagctcggactcattgtgtctcaaggtttttccgccccgaaacttctgtaacaggccctcttagggtctcgtgttgtgtttttcacaaacaaaacaaaacctgacttaggaaactgacgaatctcagtgctgcacatagttcccggggaggctgggcactcggtgtctgcagagctgggggcctttgcgcaataggacttaagagtatgttcctttgcagatgctctctacgggctgaaaaagaggggagttgaccttgtgcaagatggatatctggaagttctggttaaaatgcagaatcagcagaggagacccagagaagctctagttttcctgcttagttgcaggggcctcaaggctgtgctcactccccctgctctgcctccaccctgctgtctgtctgaccttctgtgttatcctcgggctggtgcagggctgagctggatggggaaatggggttcaggacatatgataggcatctgcccttgaggtcttgccagcacccctcctgccctctgcagcttcctggttgaatgaggggctgcaaggtgaccacacaggctgccctgatgggcatgtcctggcctctggtccatatccctttctgcttggcactggcctctcttggctctcacctccacctttgccaagcccaggagcc

SEQ ID NO: 134745 - DNA, 1103 bp, Homo sapiens
taatccctgtggattgtttttctggaagcaagctgtgttttgggaatgtgagaggagagcagtaattgcccgtatcctgacagtactttagttaactgagccctctcatgcacttcctctccctgggtgctcacaacagccctatgaacaagggaggattactgaacccaccctgcagcacagggtgcctaaagttgacgtctggggagaggtaatttacattattccctcctgtgacgggcagatgccgacctggtgctctattgacagtcatgtctctaatcccagcaatgacctttgaggcaaggtgggtggtccgagagtttaggtaacttgtcctggatcccactgttagtgacagagccagggttcaaaccctgagccctctggttcctgatcatgttccgaaaggaggtggatacctcccagcttgatgtatgattttaattgttttctgtctcttcagtgtctgtcttttgatatgtactgagcacatcatatgtagtaggtcctctgttaaatgcttacacattaactcattaaatccttcgacattaaatctgggtagaggctgttacactcactttgcagtcgaggaaccctagactcaggctcatagagtagccctggccatgctgctaataaatgccagagttggaaatcaaggccagggcctcagattccaagccatgttcttagccacaacgctagagaaaactgttggttttccaaagctgctgtaacaaattaccatgaacttattggattaaaacaacaccaatttattatcttccagttctgtaggttagatatttgacataggtctcactggactaaaatctaggtacaggcagggctgcttccttctgaaggctctgggggagaatctgttttcttgcctgtttagctcctagtggtcctctgcattccttggctcgtgatccttttcttcatcttcaaagccagcaatggcagatccaatctttttcacatctccttctctggctcttttgcctccctcttctacttttaaggacccttgtgattacattgggccagctggataatctgagataatctcctaattttaaggtcagctgatt

SEQ ID NO: 134746 - DNA, 1040 bp, Homo sapiens
ttgcactccacactccagcctgggcaacagagcgagactccatctcaaaaaaaaaaaataaaaacaaaacaaaacaaaaaagagacacatcaggtgggctcagtggctcacccctataatcctagcactttgggaggctgaggcaggtggattgcttgaatctaagagttcaacaccagcagcctgggcaacatggcaaactctgtttctacaaagagtacaaaaactagctgggcatggtgtcgcatgcctgtagtcccagctacttggaaggctgaggtgggaggatcacctgagcgcgggatgtcaaggctgcagtgagctgtgatcgcgccactgcgctccagcctgggtgccagagtgagaccctgtctcaaaaaaaaaagaatggacacatctttttagacaacttgagtctttcagtttctaaatagtatcttgggatgaggtgatacactatctggcatgtccttcagattcactggggggtgcagtggaggttggggtgttggggacgggtaccgagtgaggatggagatgaaccaagagtggccatgaggtgacctaacagttgcagcgggaggatgggttgctgtcatctacttctgaatatgctaggaaattttcatagtaaaaagctttaaaggaaccatttgagaaatcctcccttgtgggtatgacattgggagactagttggcaagaaggctgtgactttgggtctcatgggtcagtcagtgggaggaaggaggtctgggaaccagaggaggtggccagtggatgggagtttggggcaagggccaccagtttctccaagaacttcaattaggatgtgtggcagctgtggtcttgacaggttgtcgtaatgtgaatgtggaagatttcagcctggttaaatttagcttggccggcccctggggtggaaggggaggcacaggtggggtacggacttctcaccctgcttctgtccccacaggcaaccaggttgattacctcagacctggttgtgggccacaggtgtcagctctgaagggtttcactc

SEQ ID NO: 134747 - DNA, 1033 bp, Homo sapiens
caggatggtctcgatctcctgacctcgtgatctgcccgcctcagtctcccaaagtgctgggattacaggcgtgagccaccgtgcccggccttgttgaatgtcttctttgtgtggggccatatgcattcacttacacacggtgcctgccttcatcctcctaacagcctgcacagtgggcaatatattatcgttatcctcattttggagagaaggatgctgaggcttagagagggagggtcggcgacatgcccaaactcagtaagcagcagaggcagagtttaaactaccatctaataaagtaccacaaactcagtgagaaattaaataaatcaacaaatggccatggaggactaaagccagtgatttcaacgaatatctaccacctaataactaatctctaataactgatagagtctttagactgtgttgttccaggcttgagtaactacgccctttccacactcccagaaggctgaaagaagtctgactatgtcccagcaggaggtggccggggaggccgaggcgcagagaatcattcaggtgttcctgacactatcacacacccacgtctggaacctactgaaggaccgtggatgatgctgttcgaacattcttggattgtggaagccaacagtggtggaagacccctcgctggtcttgcggcaacaacagaagatcttggaccccatgttttggtgcgcggtgggaggaggaaagggcactggggctcctggctctgcagctccaatcccagaaacccattgttatttaagcgctgggtcatagtgggcccttcccctctctctgacctgctgtagctccctgtggccagcagttccaggcccacctgcctgggcccaccactctgagggtcagtctttcctcaactgtgcacatttctcctacctgtggaaaggacatggagcctccactctgccagtctttccctgtagcgttgccttcttgaaccacagatgttggaggtccagcacagttctctgggcagggttgttttctagatgaacttaagact

SEQ ID NO: 134748 - DNA, 1434 bp, Homo sapiens
caggtgaaaaactgggtcagattcagccagttcctttgaaagtttccacaacccagaccaacagagagataggcaagaggcagctgtgatataccaaatggtcaaattgaaacagaactcatttagtttgaatgactaaatagcaatgatcagtgaacacctcgcctaacagtaaccaacctggaggccttctctctctctctctctctctcttttttttttttaacagggcgttaactggttccactggaagggccacgaacactcaatccagtttgctgagatgaagctgagaccaagcaacttcagaaatcttgaaggcaggcgcaaacgggcataaattccagggaccactgggtgagagaggaataaggcccagagcgaggaaaggattttaccaaagcatcaatacaaccagcccaaccatcggtccacacctgggcatttggtgagagtcaaagctgaccatggatccctggggccaacggcaacagcatgggcctcacctcctctgtgatttctttctttgcaccaaagacatcagtctccaacatgtttctgttttgttgtttgattcagcaaaaatctcccagtgacaacatcgcaatagttttttacttctcttaggtggctctgggaatgggagaggggtaggatgtacaggggtagtttgttttagaaccagccgtattttacatgaagctgtataattaattgtcattatttttgttagcaaagattaaatgtgtcattggaagccatccctttttttacatttcatacaacagaaaccagaaaagcaatactgtttccattttaaggatatgattaatattattaatataataatgatgatgatgatgatgaaaactaaggatttttcaagagatctttctttccaaaacatttctggacagtacctgattgtattttttttttaaataaaagcacaagtacttttgagtttgttattttgctttgaattgttgagtctgaatttcaccaaagccaatcatttgaacaaagcggggaatgttgggataggaaaggtaagtagggatagtggtcaagtgggaggggtggaaaggagactaaagactgggagagagggaagcactttttttaaataaagttgaacacacttgggaaaagcttacaggccaggcctgtaatcccaacactttgggaggccaaggtgggaggatagcttaaccccaggagtttgagaccagcctgagcaacatagtgagaacttgtctctacagaaaaaaaaaaaaaaaaaaatttaattaggcaagcgtggtagtgcgcacctgtcgtcccagctactcaggaggctgaggtaggaaaatcactggagcccaggagttagaggttacagtgagctatgatcacactactgcactccagcctgggcaacagagggagaccctg

SEQ ID NO: 134749 - DNA, 1011 bp, Homo sapiens
gagtttaagatgaattattccgaccccattaccataggagctgggtagtgtatttttgaattaataaactctatttttttagaacagttttaggttcatggcacaattaagtgaacagaagttttcatatacaccccacacccacccacacaacctccccattatcaatatcctgcaccagaatggtgcatttgttacaatcaatgaacctacattgacacatcattatcacccaaaactgggtggtatttttaatccctgtttttcaggtgagaacaccaagacttaaggaggggcaggtgaccacccaaagttacatagcaaattagggatggacagaatggagcctgatgctctctccacagtgccacactccttcctctcacaacgatgccctctttcctgcaatagcttaagtacacccagattcatcgatatgtttataggtgttcctgagacgcaaaaacggacgcgagaacttctaccaaaactggaaggcatatgctgctggatttggggaccgcagagaagaattctggcttggtaatgcagccctgcatgtttatatctaaaatgcctgattctgccctccttgtcacttttcctaacccacagggacctatgggagagaaagagatgaggaagaagaactacttctggtggcagacacagaatgtcaaattcttaatgaaaaagactatcatttaaatgctctgaatcatcaaaatgtaaaccaaaaagtatctgagacagatctcaatcaatttagaggtttacttagccaacgttaaggacacgcccagaaaaaaagaacacaaagccacaggaacagcctgtggtccatgccttttttttttttttttttttccagagataatattaagagttttagtgtttaaagggggaaagccacaggaacaacctgtggtccatgactttcttttttttttttttttttttttttttttttttttttttcagagataatgttgagagctttagtatttaaag

SEQ ID NO: 134750 - DNA, 1021 bp, Homo sapiens
ccagcatgggcgacagagtgacagtctgtctcaaaaaaaagaaaagaaaaaagcaaagaaaagaaaagagaaaagaaaagaaaaggctcgggcagtcttaactatgcaagtcccctctgtgtaagttctttctctggggaaagtaatataaacaataataattcttgtcatgtgttcagccttgttcagtttacacagctcctttccacccataatataatggaaaaatcaaaataacactgaagatgaaaccagccagaattactatccctattttacacatgaggatatagaggcccaaagtaactgagccagcaagggagggagtcattactcaaagccaggtcaggctggctccaggcttaggtctctgaaccattccatgcagctgacactgtcctaacatcaggactccataagcagtgtggacagcagagcagctagagtctgatgtcccacccaatgacttccctcctgtccaccatctttctttgcagctctggatggcccatctggcctggtgacagccaacatcactgactcagaagccttggccaggtggcagccagccattgccactgtggacagttatgtcatctcctacacaggcgagaaaggtaaggttttgtccaagtctctcctcactctaaggagtgtctttcctgctgtaaactcttcccattcgctcttctccctgccacatttggtacaggatgataaaaatgcatgggtaggttgaaaaggccagtaatgttcatgtggctcccaactgaaacctcaagggagtctggtaggtcatttaaaataaaaataaaaatacatctccagcctctacatgttttcctggcccattcctcctctcctgttagtatctctgcctaccagtgtgagacaccccgtttaggaaacagttgtcatcttttacaaagaagaaaaccagaatctaaaatcttaaccagaccgcttcaggccatactgagcagtctcaacttttcagagaccacaaaagaagctagtttta

SEQ ID NO: 134751 - DNA, 1092 bp, Homo sapiens
tgaacatttatctaatagttaataaaataacaagaaagaatgcaaaaaaaaaaaaaaaaagtcaagggtaggagccttctttagtgaaacagcactaagaacaaagcaaaaagaccataacattttaaaagccattttgggcaggctcaaggagaatgtaatcagcagtatcatcatgagcagctctacagatcattaatgctggtttatttgtcttttcaaaaagaaaagaaaaaggtcttgcaggggatgggcactcagccactggaagacagagagcaaatgtaaacaatttactggctttgaacttatttaataatatgtgggacgggccaatgctgagtccagatgtggatttactgaattgcttttagacaaaactcacatatgcaaacatatgcttgacttgtattgaatgtgtctactccatctttcccctctcctgactctactggacttgttaatgttgaatgattttatttttggtatctcaggacacttctatctctgaaagccggggcatcactacatattgatacccctactggagagaagattgcacggactggtaaatgatgttgtctttcctccttctcccaccattttctctccctctagaagccgaaccggaagttgacaaccttctggtttcagatgccaccccagacggtttccgtctgtcctggacagctgatgaaggggtcttcgacaattttgttctcaaaatcagagataccaaaaagcagtctgagccactggaaataaccctacttgcccccgaacgtaccagggacataacaggtctcagagaggctactgaatacgaaattgaactctatggaataagcaaaggaaggcgatcccagacagtcagtgctatagcaacaacaggtactgtaaataaacaggagagaacagagaaaagtcatgactcaggggtcttcttctcacagggctgagtaatcacaggagctttggatgcaggcaggctggcgctctgatcctgactctttcaattacagactgtgttaccttggacaatttggctaagtccttatgcaaaaaaagtatgatgccatttacttaataggg

SEQ ID NO: 134752 - DNA, 1029 bp, Homo sapiens
gcacaagataacactatctggcacccaataagttcttactgaattttcattttctaagcatataacacaaattgaatgatggacttgggtatctattggtgttcttggaaacgtgtgctatcctgacagagtcagtgctgctaacctgagttattttcactcctcccttctttcagaggccctgccccttctggaaaacctaaccatttccgacattaatccctacgggttcacagtttcctggatggcatcggagaatgcctttgacagctttctagtaacggtggtggattctgggaagctgctggacccccaggaattcacactttcaggaacccagaggaagctggagcttagaggcctcataactggcattggctatgaggttatggtctctggcttcacccaagggcatcaaaccaagcccttgagggctgagattgttacaggtatttcaaatcaagtgagccatttgttcctcttcctggtccccttctgtgtaatctgtctaccggatcgccatgactttaacatctttgttcacattccctacttaatccataaatgtagtctactgtttcaccttctccccacactccctcttgtcatatgtacttaatgaacactccccactcccaccccagaaatgagaaggtcgaaatatttctgctttgtattcaaaatcctttagaccttgtcttgtccatagctcttgtgtgcttacctcatatcatcgtcccttgtgatcaacctggctggtccccagctacatttcagccttctcaaaagaaatataccaatgagtatatttccaaaacgtatttaaaacttttgccatctcaaaatctcaaccatgatcttaacaaacttacccagtgggctcgtcattggaaaaccaaatgtgaacttattttatcggtaatcactaatatcagagagactctgcaacacggactaaatccataattttctcaagactaatgattcctacagaaattaacaacggaatagtcaaacatctgtgtttcc

SEQ ID NO: 134753 - DNA, 1048 bp, Homo sapiens
tgggagctccttcaaagtaaagaatgtctgtggaaggcatccaagtaatcttggtttccttaatgcaattcaagagactggaagttgccaggactcatatcttttgaccagtggccagcaaccctgaggtagggctcccagaggcaagtgtggttaagatgcaacagttcctgataagatcattcagcacatcttcttggccagggcctgattatatgtggcaactgcatgtagagaaatctaattgccataccttcctttttctaatttcttttaacaaaactgctttttctctccctttggcactaattggtaacattgcttccttccatcatagccctgaattatcagatctctctacccagcaatggttctattaacaacctcaatcttaaaacacagccaaataattaactcaaatttatttttttcttctcccctaccccttccttttacagccaaagaacctgaaattggaaacttaaatgtttctgacataactcccgagagcttcaatctctcctggatggctaccgatgggatcttcgagacctttaccattgaaattattgattccaataggttgctggagactgtggaatataatatctctggtgctgaacgaactgcccatatctcagggctaccccctagtactgattttattgtctacctctctggacttgctcccagcatccggaccaaaaccatcagtgccacagccacgacaggtacatgtgcattctcccatttctaacgcactctctccacagtcttctttgcagggtgaagcctctccttctcctctcccattgatgtacaagccacagggcactaactcttccatggtgctaggctggggtgctgtttaacataactcttttccaacagcagcccaaataatgcattgccataaagacatgtgcctgatttatcactgaccaggatgtttacagcataaaatgtagttcagtctaatttgccatatggaatctagagaaaagaattctaacctctcataactaaaaagctatataactagacctgt

SEQ ID NO: 134754 - DNA, 1226 bp, Homo sapiens
cactcatttcacacaaacagctttgctctgtgatacagccattcttcctttagacataaagtacgagcagaaaaaggtggaagaagaaacaagctgagaacccagtacacaacttttgatccctgaaagctgatagaagaccaaagaaaaaacatcatacttgttcacacctgagacagcatacactttatcaacccaggcaggtagccagtggctagtgatgagataatctttctaattataaataatgaaataaagcagggatttctccctgacatgagtaagaaattccaagggaaaacacttgaacaatgatttctttattaagctgacacttattgggcactcgccatgtatcaggtatgatactaagaagttgataaatattaccatttaatcatcacgcaatcccatgaaacagtaccatcaactccatttaaaggtaaagagagggtggctcagagagaagctgagtgacatgcccaagattatgcagctagcaaatgctagtattgggattctaatcaaggactacttgcctccaaattctgcacttgtaaccattgctgtatctcttaccctaacccacaatcctacttttccatgtgaatttcacctgctagcaatgcatgctcccggtgggttgtgcattggtgcagatgtctttgccatctcaaggataaaccatgtagatatttccctttctggccattttcaactcctgaagacaactgtggccagggaaccacagttcaaattgcaaatgctcagagaccaagaattaaaaaaaaaaattatctttcccctttctctctttcctagagttgggctgtgggatgtttggtttcctcatttttggtttatagaactgacaaatacttttctgtccttcttcagaggatctcccacagctgggagatttagccgtgtctgaggttggctgggatggcctcagactcaactggaccgcagctgacaatgcctatgagcactttgtcattcaggtgcaggaggtcaacaaagtggaggcagcccagaacctcacgttgcctggcagcctcagggctgtggacatcccgggcctcgaggctgccacgccttatagagtctccatctatggggtgatccggggctatagaacaccagtactctctgctgaggcctccacaggtacttcctctccctgtcaatgctttctccccaaggttctttgcttccttttcaag

SEQ ID NO: 134755 - DNA, 1048 bp, Homo sapiens
ataatcaacactaaccagacaactcatcccaaccttagccaaaatgccatctcacctgaatcccagcgtgcaattgcctttttaagtaactcagcaactctgtgtccttatgcagaggaggttccagatatgggaaacctcacagtgaccgaggttagctgggatgctctcagactgaactggaccacgccagatggaacctatgaccagtttactattcaggtccaggaggctgaccaggtggaagaggctcacaatctcacggttcctggcagcctgcgttccatggaaatcccaggcctcagggctggcactccttacacagtcaccctgcacggcgaggtcaggggccacagcactcgaccccttgctgtagaggtcgtcacaggtatatgaccctcctcccagactggagacatgataggagccagcatgtcattgaaatagagaaaattcacccgtgtggcagaatcctaccccaatgttgttgacagacagcgtgaatctctaactcaggaaggtctgtgttggaattccacctcactagctaaatattcttgggactatatgtgtatgtatatatatagatacacatatatacacacacacaaatatatacttatatatatagtgtgtgtgtgtatatatatatatgtgtgtgtgtatatatagatatatacttttttttttttttttgagtcagggtctcattcttttgcccaggctagaatgcaatggtgtgaccatggctcactgcagcctcgaactcctagactcaagtgattctcctgcctcagcctctacagtagctggaaccacaggtgtgagccaccacactcagctaagttttttgtattttttgtagagatggagtttcaccattttgcccagcctggtctcaaactcccgggctcaagccatcttctcaccttggcctcccaaagtgctgggattacaggcatgagccagcgtgccctacctctattcttgggtatatttctttacatccctgagcctcctttttgtatctttaaatcagcaatgaacc

SEQ ID NO: 134756 - DNA, 1057 bp, Homo sapiens
caagacatgttccaaaatgaaaactgaagctcagagcatcgctaacatagacatatagttttctaaatctgcaggacactgatcaataggaaaataccatttccaagagaaaaacccaaatatgcatgaaggcaaaagaaattttttgtttgtttgttttgagacagagtctcactctatcccccagactggagtgcaatggcgccatctcagctcactgcaacctccaccttctgtgttcaagcgattctcctgcctcagcctcctgagtagctgggattacaggtgcccaccaacacgcctggctaatttttgtatttttagtagagacagggtttcaccatgttggccaggctggtctcgaacccctgacctcaaatgatccacccaccttggcctcccaaagcgctgggattacaggctcgagccaccatgcccggccacaaaagaaatatgacattgttgtcctgctggtgttttaatagggacagcaccagtaggggatgcagtgaacaaagcctggcacttggactgcaatggcctatagatgtggcattgggtttgccattcccaggttctcagaagcaaaactttctgaggaatagtttaactgaccccatctctgtcattattcagaacaagcccctgagctggaaaacctcaccgtgactgaggttggctgggatggcctcagactcaactggaccgcagctgaccaggcctatgagcactttatcattcaggtgcaggaggccaacaaggtggaggcagctcggaacctcaccgtgcctggcagccttcgggctgtggacataccgggcctcaaggctgctacgccttatacagtctccatctatggggtgatccagggctatagaacaccagtgctctctgctgaggcctccacaggtatctctttcctttctatttatagcttctgtttttcccagcaggaaactgcccatgaataatcagacacgactagctttggaatggacttgttctgccactacttatgtctatggggtctaattgtgacacgaggccatcacgctac

SEQ ID NO: 134757 - DNA, 1067 bp, Homo sapiens
gaggcaaacatagatgtgttaaatggaatagctaaagaagtagaagcccaggcacctgaccttggtaagcatagaggaagaaagaaaacaggaaaagcgagagctcttgggtgaaggagccatgtggctataagtcctgaaatgttgcagagttttaggttcaaccatcagaagcaagaaccttccagctctgtatcactggattcttaatagcagaagcctgccaggcgccactcaatgtctgtggggcttacagagaaaaatgaagaatcagtggccctgaagaatttttcctggggaattccagggttttactgatggattgggccataatgtaagtctttttcttgatgtggcaccatactaaaaatatgcataacctggccacctatcacacctctcgcccaaagacccagccatgggttacagggccctacagaatctggcacggccagcccatcctctgacctcagtcctgccactcattcccttgctcacttcaccatggcctcttgggccttcacactgttccttaagctttctgagcctgctcccaccctcgggctttggagtgtgctgctcccactccctggataccactcttttcccagcacttcacagagcgtgctccctcatttcactcagcagctcagatatgacccagaacagagggcttctctgactaccagcctaaaaaggcacccccatcctgatctaccccttcaagctgctctaggtttccttgtgaaacttatctgccttgatattatgcaagtattggtttactataatatctatggcctgcctccccatcagtgagcagaatataaggactgattccatcatccactgctgaatcccagtgccctgaaggcagacaagtatgtggtatgagcttcatgagtgtttagggaccctggctacttcagagtcagcatttccatagaatcttctgattcttcccttccacctctgcattaacaccccaattctttccttaaggcataagggaaatcattcccttggaaagtcttcaattccgcttaatctggatagaaaaggaagga

SEQ ID NO: 134758 - DNA, 1897 bp, Homo sapiens
aaatgtcttcacattggggattaggtttcaacataagaactttagagaggcacagacattcagtgcatagcaatacagcatgtaacattttgaaactggctttttttccttcagcataattctctcgagattcatctaaattgcttcttttatcaatagttggttccttttaactgctttaaatctgagcagcattttatggaatggatattccatgacattattttcaatcttctcagactccgatggggtcatgtgggtgatgtataattagacctattttacaaaagtaaaaagagagacccagagatgtgactctcctgtggtccctcagctcctctgtggcagacctaggattccagcccagatgcagttgactttcagccccagaagcagccctgtcttgcagcctgaagagcattcatctctctgttctcctcccagagttggacacgcccaaggaccttcaggtttctgaaactgcagagaccagcctgaccctgctctggaagacaccgttggccaaatttgaccgctaccgcctcaattacagtctccccacaggccagtgggtgggagtgcagcttccaagaaacaccacttcctatgtcctgagaggcctggaaccaggacaggagtacaatgtcctcctgacagccgagaaaggcagacacaagagcaagcccgcacgtgtgaaggcatccactggtgagtctgccctgagcttcctccaaactctaggttgattctgaggttagcagatctcctcagccagggtgtcctcacatgagaaagccaaatgcaaaagcaagccactttctccatctctgaagcccctgaacaccactttgaaagggctgcttactcgtcttttctacctcctgtcaactgatacagcaaatttcccccactgggaaataggggttttaaaatatttcttcctaggagaactttaaacatcagggtttgtgtttgcatttacctatgatttttgttttcttttcttaactgtgcatcacagcatcttttcaattgtttcttgtttatttccttcttttagcctaataattaatttacttttcattttacttcatttaaagatgaccaagatgttggtaataatattttttttgttgttgttattttctacaaactgtttttattccaggtcttttgctttctgccaaggttacccctgaagagtggcacacggccctttgagacttccatggtgccctctcattttctcttttctcttagtcattaagacattaacctagtttgtctatgacgacagcttaatcctgacattgtggcccatgcaacttgtgtccattctggcccatgcaacctgttcactgaacctgaggccatggttactcggtggctaaactgaagagacaaccaggtttttaaaatatttcttcctttatgaaaaataagcctattcaattttggccaccaaatattcgaaatgtataggtggaaaatgttacttttccagggtttggcaagtaatagtctttacttccaatttaattagtaagcatgtattgagtacctactgcatacattgtaccgtactgatatttgaggaaaagtagttcccaaagtcagcattgttatgtggactcatttgtgcctgctcatagtgcttgcggaagactagatactcagaatgctagacagaactcgagaaaaagagtgatccaaggaaatcaggagagctggcaaaggtgttatggcaagggatgttattccagttgaagcttgatatgcaagaaaagggttagaagtgtggacatatttggaaatggcttgaagagtctttctcacaatatcttcagtctcaaatcacagtcacttacttaagatagaagttggttttctttcttat

SEQ ID NO: 134759 - DNA, 1033 bp, Homo sapiens
acttgatgaggtgagcaagcttggtcaaggcgttctgtcttactcacctctataatataagaaagttggaccagatatgcccaaaataccctcccagtgctagggacacgtaactcaaagttcagagcagggagtgaggctcagactgcactttcccatgccaacagcctgcatctgagctaagacccaggaagcacagaaagttggagaggccagaaacacccaagggcacactgctgacctgggactccagcctgaaggaaatggactaaggaacagccaccacaggtcttaagatggatcacagcagggggtccctgatgccatctgcattttagaggcaacagaagatcttcagacctctgtggctgacagtggaaaagacaggtcaaacaaacctagagagattttagaggacacactgttgacaccagatgtcctttcttattcctgccagtgtctcctcccaaagacctcgttgtgacagaagtgacggaagagacggtcaacctggcctgggacaatgagatgcgggtcacagagtaccttgtcgtgtacacgcccacccacgagggtggtctggaaatgcagttccgtgtgcctggggaccagacgtccaccatcatccaggagctggagcctggtgtggagtactttatccgtgtatttgccatcctggagaacaagaagagcattcctgtcagcgccagggtggccacgtgtgagtgagcagaactcttttgggcagcctcacctgatgtcagcccacccagtgtataaccctccctcgccacggcccctacaatcctatagttgttctttacagttataccaaataagagcctagaattaagtccatagaatcacttattaaagaaatccctcattttccatcaaatctttctccttgctctcctatatacttcctgccagagaaaatcattacaagtaacatttagcaagtgtttactgtgtatcagactttgttgtaagcagtctacatattagtataagagtcctcatttggccgggc

SEQ ID NO: 134760 - DNA, 1884 bp, Homo sapiens
gaaatagtaacatagccccagcctaatgcatttcacaaggcagtgactcataatcatcataggaatagtaagacttcttgaaaatgtgacaaaaactatgaatccgctccccaggggtggaaatacacacacacacacacacacacacacacacacacacacccctatgcataatcacacactgttttggcatacaagcctataatttcagggaattcaggttatgaattcctacctggtataacaggatgtgagtctcatctgatttcacacactacaacaaatggttctcaagccagatggagcctgagggtgcaaccgtccttcagctgaatttgaatctgggtgccctgggtagatacagaaaaatgtggctgcttaagcctggctgagaacttctgtttcttttgttgcaggccgcttggacaccaggcccttctgtagcggtcggggcaacttcagcactgaaggatgtggctgtgtctgcgaacctggctggaaaggccccaactgctctgagcccgaatgtccaggcaactgtcaccttcgaggccggtgcattgatgggcagtgcatctgtgacgacggcttcacgggcgaggactgcagccagctggcttgccccagcgactgcaatgaccagggcaagtgcgtaaatggagtctgcatctgtttcgaaggctacgccggggctgactgcagccgtgaaatctgcccagtgccctgcagtgaggagcacggcacatgtgtagatggcttgtgtgtgtgccacgatggctttgcaggcgatgactgcaacaagcctctgtgtctcaacaattgctacaaccgtggacgatgcgtggagaatgagtgcgtgtgtgatgagggtttcacgggcgaagactgcagtgagctcatctgccccaatgactgcttcgaccggggccgctgcatcaatggcacctgctactgcgaagaaggcttcacaggtgaagactgcgggaaacccacctgcccacatgcctgccacacccagggccggtgtgaggaggggcagtgtgtatgtgatgagggctttgccggtgtggactgcagcgagaagaggtgtcctgctgactgtcacaatcgtggccgctgtgtagacgggcggtgtgagtgtgatgatggtttcactggagctgactgtggggagctcaagtgtcccaatggctgcagtggccatggccgctgtgtcaatgggcagtgtgtgtgtgatgagggctatactggggaggactgcagccagctacggtgccccaatgactgtcacagtcggggccgctgtgtcgagggcaaatgtgtatgtgagcaaggcttcaagggctatgactgcagtgacatgagctgccctaatgactgtcaccagcacggccgctgtgtgaatggcatgtgtgtttgtgatgacggctacacaggggaagactgccgggatcgccaatgccccagggactgcagcaacaggggcctctgtgtggacggacagtgcgtctgtgaggacggcttcaccggccctgactgtgcagaactctcctgtccaaatgactgccatggccagggtcgctgtgtgaatgggcagtgcgtgtgccatgaaggatttatgggcaaagactgcaaggagcaaagatgtcccagtgactgtcatggccagggccgctgcgtggacggccagtgcatctgccacgagggcttcacaggcctggactgtggccagcactcctgccccagtgactgcaacaacttaggacaatgcgtctcgggccgctgcatctgcaacgagggctacagcggagaagactgctcagagggtgagtgccagggcgcagaccagcatataatggccatgatggagtggactcctagtat

SEQ ID NO: 134761 - DNA, 1008 bp, Homo sapiens
gattcaaacctaagacaatttgcctataaaacttgtgcccttcaatgccattctatttacattctggtgctttggaacctgctacattctcaaagaagacctttctattgggtaccaattccaactagaaaagtctttctcctgttgtgctgaaatttgtcttctcataaccaaccctccctccctgcatcatccccagcacataaacgcacacacacacacacacacacacacacacacacacacacacacacacacacacagaggcacttgttctgtccttaggggctacaagaggcaagccagtgcctgctttgccaggatttctacatggtaaccctgacccactcaaccttggttttctcaactacaaaataaacctgcccaggtctgtagtccttcctcctacaagatattttccagaccttttattgctgatcaattttctataaagattagaatctgtgttttctaaagagtctctgtagaataagttgctcattctgaaattataaaagtcctactatcagaacatgattcttcatgtctgacctaaatacctccaactgcaatctcaagtaagtttccctgggttcatccacaaaggagacttaaaacagccagttgtctgcatgagaatattttacattcttaaaggtcattatttgcttcctattttttccctctctcatataaatatttctagttctagtaaatttacctcctcacccaccagtgatttctgcagctcctctttgatctagatccaagttgctgctgagtttaggactgtattcaactaggcggtcaagctcaggcttaagtaaaaggaggctattgacatggactcttgttaggttttgttccccaggagcgcaacaaaataggaactactgtttaatgagtgcctactacgagcttgacaccatgctgggtactttatgtacaggtctctaatccttaattttctctggaaaggttttgactcctttgttatatatgaggtca

SEQ ID NO: 134762 - DNA, 1057 bp, Homo sapiens
tatttgttactgagtgttttgcctgtattatctcatttttctcactttcagttgaaagaactttattgtgcagttgatattagtgttaccattttacagatgtgaaaattaaggcccagacaggcaatgttacacaaccaaaacagctactggatggaaccctttggatttgctactacccaactatttctgacctaaaagagtggtgattccatgtggttcaaattaatagcaagtggcagagtaaagatctaacagtgtttgactgatgtagagcagatatcctcaaacattgcacagatgtttcttggatatttgtccatgttagtatttatcattcttcacaacaagtatctgtttacatgtctgctttctatacctgactgtgagctcattaagggcaagacctatccatcattggcttctgaaacaccccaccaccactaggctatcccatagcccgttcttacacttgttcaacacatctctgttgaatgcaagaataaaccatttagaaattaattctcagtcctcttggataatcactggctcccccagcatcttaactgggcaccagctaagccactgtgctgcctaaatggacaaccacttctcagttctggaattcttcaaacacctagggttaggagggtcttcgctttggcagttagagttttctcaattcttttatgacacaggttgcaccggactcactcaactatggagatcagatgtcctcaggaaaaaaaaaaaaaaaaaaatacacacttaaggctgtttcctggctcctctctcttcctgacacattccaaaaaggaatttatggatgttgggaaggacaaagggtgaggaatttctaggacatttaagaacgcccatgtaagcaactctatgcttgacaggccatgcacaataaaactctttggcctgtaagcgagaagaaaaatttggtgtaagctgcctcatgggttgccaaaatgatgtggaaacaaattcatctgcatttctaaacaataggaattctcctcgtcctcccaaacctagaatatttcatgta

SEQ ID NO: 134763 - DNA, 1028 bp, Homo sapiens
attccctcatttggtcctcaaaatattcaccctggaaatgagagctgggggacagaagagaggaggtggctcctgggccagatgaataactgacaggcagctagagagtggtggagaacagctttactggggtgcctagagccagcagcgtcccacatgtctctagaatcacctcctcctcctcacctctcatcacagaaagatctgagcaacaacatcccccaggtatgggaaccctgctgcccctggtgtactttggaaagaacacaggggttcttctcacccatcagtgttgtaagaggaataagagcttaggtttgaagccagaggtgtttggtattctccccaccaccatacatatgaccctgagaaagatacatcacttccttaatcctcagttttcacatctctaaaatggggacaatagcgtctgctgtcgttttgaggagaaaatgaggtatagaaagatcagcaatgactgcttaataactggaagtttggataatcattgtcattgccaaaaactgccatcactctggaagttaaaagaggcattgagccagtcttggattgtttcttgtgtgttgttcctcagcccgcccccagcccccgctttttatctcacccaatctgagggtgtctcactaggctggcaggtctgagacttggctgtattttacaagcaggaggttgtgttggcacaggttggagaaaaggtagtagcccggggctggaagttaatgtcaaattttgattccagaatgtcaggaggttttgagtttaggcatctgcagattctaaagctgacagctatgaagtacgatgctgttggaaactctttggaaaagctttctgtccggagggagggcaggacagggagcaccacttgaagaatgaatgcctctttttcatgtttttgtagactttttcccccatttttacagagctttcccatatgtgttttagaaaggaaaactactatccatcccagccaggcaagcccaattcaggactgaagaagatttatt

SEQ ID NO: 134764 - DNA, 1085 bp, Homo sapiens
aactgggctcagtccctgtactcgctccgaggtgccactgagcagctgctgcccagagcccaggcgagccctggtcccatttccagcttgaccaagtacaagaggggagccagggctgcggatcctactccctcttgctccccaggcatccgtctcacaattagaaaacccgtgtggggagcaaagcaaaaatcacatttcactaacagctactcggggtcgggggcgggcaggcgggaattcctactttcgccataaattgtatgcaaatgggttccttccctggccgagagccaggagtgagtgcgtctttcatgagctaaccctgttccgctgggagggctgttcctttaattcgccaactgaaaaagtgggaaaggatgtctggaggcgaggcgtcccattacagaggaaggagctcgctatataagccagccaaagttggctgcaccggccacagcctgcctactgtcacccgcctctcccgcgcgcagatacacgcccccgcctccgtgggcacaaaggcagcgctgctggggaactcgggggaacgcgcacgtgggaaccgccgcagctccacactccaggtacttcttccaaggacctaggtctctcgcccatcggaaaggtaagtctgttttgccctcatcactagagatccttatgatgtaaggattgcattcctggtaccaaatgagttgtgattttatattataattacaaaacatatggggtttttttttccaccgctggaaaaaaaaggagtgtgtattggttatatcagatgcaccttgacttttctggtcttgtaattttgtttgttttaactttatgaatagtcagacttggaaggaacttttcgtaaagttgttatcttctgctgttctgcagaggaaaagtaaaaattttctcttcaactgctctcctacttctagtctggctgattcacctgtatatatcttttattttgagggttagggcagtagagttttaaggcagactttgctcatagcctgcccctgggatgggttagagggagtttgatagaggagtgcagggagaatataaaagtttatatctaaaca

SEQ ID NO: 134765 - DNA, 1048 bp, Homo sapiens
gttgtgtggcccaagtacatttaaaatgctactttgtagtagaaaatgtgaaagtggtatcaaactttagagatagaattttgagcctaggaaagcaatttcagttttagaatcctcaagagactctgtggataacattcccctgtgtataaatatacatcaatttctctacagttgaaatattttgtaacaatcactataaataaatacaggatttaattttaaaaaagtatattatagaaggataaaacagccaattactatataaagcattgagacaggtgtttgtaactgtgatctaatttaaatttcatcatgatctatgaaaaagatgtttcctctaccaaggtggaaataggcttgaagaaagtaaactatttgcttgaaataacaatgctctagaactaacccttatctatcagatcagaaaacctatgcttctgtcatttaataagatccagtattggatgatggcttttctcaaggccctctgctttttcaaggcccttgaatttatagctccttgtagagaacaatccggaggcagaaagttgggctgttttccacatgaatactgtcaggtagagaagtcaccagccaatttgaaaacagaaatgggcttatctcaagcaagcccatcccttgggcaaagtgcaggggcttgatccaatgtattctgtgatggtttccaccaccgtgatggctgggtaagtcctatcttgtcaaaaagataactaggcaccatgaacactagatgtgactgtctctggagcctgaaattagtaaccacccagtgaacagcacacctcagtggctgctccaaacagagattcagaggcaaaagaagtgggatgggtcgttcgagactgaaggaagccagcatgccccacatggtcctgttctagctctcccacccccatttcagccagcgtactcatgcatacaaattcatcctcagctagcgggtctctgaatgttagccttctgaggcaccacatgacgggcttggtagttctctctcccttgttcttggttgctagagcactga

SEQ ID NO: 134766 - DNA, 1061 bp, Homo sapiens
atgatctcagcctgtctgtgaagctaaccttggaatgagatctggaagggatttgctgtcctgtaactgtgggtcaggaagcctaggaggcagcatatcagagagtcgtgggtcgagaagaccatcctaggggtaagatggtccctcctgaggcaagtacctgggctatccatgtgtctgtctgcctgtcccaagccttctccagctcaggttactgtgcctgactttttcagttcagaaaatgagaaaatcagctcagattccaccttccttgaactgagcagagtcatttcacataccatgtaaattcaatcaaatctctaaaaagatcagctgctttccaattcagacatgtaagtcccaaaatgacatgttaattctaagggaaatagagactttgagttcagagaacacagtgtcaaatctcaataccaaatttgctatatgaactttaacaaataatttaaaggctccaagctttagttttcttaactgaaaaattgagaagatatttaccacacaagatagttgggagtattacatggaaaaccatgaagaataataatagcatatccatttgttgtgtgctaagccctgacctaattataatttctagtggaatcatcaaagaaataatttaactgagaaacctcagaattgaaggatgatgggaaccaggtaagtggcagaattcagagtccagagtcaaacctgggtgaatctgactctacattcctgcctttcagtttgatattatattatctccatgttgtattcttttgctattttgctgttcttttccagctccctttctctaccttttctttctgcatcagtgaaaacatcatttggcccatttataccagaagacacttgggcttctcatctgaatcctgtgcagcccaacaccaacatgtcatggttctgctattagtgaatcacttaactcaagtaatgttacatatttggcaccaactgttaatttttatttctttacaactgactccaaattaaaggctatctgagacttttgcctgtggatatcagcagctgaccggtat

SEQ ID NO: 134767 - DNA, 1033 bp, Homo sapiens
aatgttcatttaactatggagcatctaatgcatgatgaatgtggttgtaggagcagagttcctgtcatgaagtaggtatttgataaatgtatcatatttggatcaataacccaaatccaaaaatgagtactcatttgagggtcccttccctcaaggatcatgcagtccagtggagaagttcattcactctcattcacttataacattatggtgcatgaaaagagaagccaagagtggaaagaatggaaactctaaaactcatacattcctctcctatcaccatcctcccaaacatccgctagtccctctgtttcctcctctgaaaacttatactgttcttgggagttctgagttgtctggtgtatctgtttcttttgctgggtgcttcaccttggcttcctcccaaatgcctccagcaactgtttatttttataaatgttgtatacacagggcagaagatagagaaaggggtgagccagagtcatttacgaaagcactttggcattctgctctggaaatcatttccgcaggaggctgccctggacagagtgcacttactctcagacctcccatccccacttccaagcagaagtcaatgcaatttttatttacagtcagaagctccatgaaattctgagccaaaaggcttctttcctgaaaagctggtagtggcctccaacattcagctatcacctttaacaggaactctttgttgtttgcaccaaacaaataaccagacacctgggtcagaagcagaattaaggacctaattcgtctccatccatggacatttaatggacacctactcgtgcaaatactatcacagccactgagaacacaagacataggatcctaaaagagcaggaagaggctacttttattgatgacatatcatatattgtcatgatttacatacataaaaaagatactatcattctgctttacagattggggaaaggaggaaagaaggaaggggatggaagggaaggggatggaagggaagggaaggtaaaggaagggaagggaagggaag

SEQ ID NO: 134768 - DNA, 1016 bp, Homo sapiens
ccaagcacacacactctatgttcaagaaacatcagctcccattttgtgcaacattttccagagctgtttagcttcttaaaaattccctttccctgcaaagcctctggtgttttccactacatccatcaatgccaacctctcgcccctggccatcctcatgtcctcctgctgttctcacatctgtggtctaagagaatacaagggtttcccttaaaaaaacatattcagatcctcccacagcctgtgtcctcacacatgggcaactgaataaataattcaaggccacccctggttttcctaactcctttatttttatctgtcttgcaaacacgtgttgactgggttgtttcagttatctgacaattggccatggtatattggaaatagtactggactgaaaaccaagaaacctgggtctgaagtctttgcgacctcatccattccctctgcctttggcctcagttttctgatgtgtaagccaaagatgttctaggctttctcaaccaaggttcctcttctaaattttaagacatggaaaatgatttgtgtaactatttcctcatttctcccaaagatggtatataataagtactattttagtttcataggagacaagttaattcattatatacaatggatgccttggagaaacactgtccaataggatttgctgcaataacggaaatattctatatcagtactaagattatagccattagccaactggggcttgaaatgtgactggtgtgactgaagaatcaaatttcaaattttatttatttttaattaaattaagtttaaatagccacatatggctaataggtgccatattggacagcacatacttagagctttaagctttaattttcatgaaacccaagtaagaaagatgagctctcccagctttggtatcctgcatgtctatgatttcattgtgtatgtttgtgtgtgtttatgtgtagatataggtatccatgaagacaatgtgaatgtgaaaggtaggaaacacatacaat

SEQ ID NO: 134769 - DNA, 1015 bp, Homo sapiens
cttaggtgagtcacttgtcctttctagtcttccgatgcctcaactttgcatgcaggaggttgcactggattaattcttctctctctctttttttttttttctttccaagacagtcttgcactcttgcccaggttggagtgcagtggtgtgatcttggctcgctgcaacctccaccccccaggtataagcaattctcctgcctcagcctcctgagtagctgggattacaggcacgcaccaccacgctgggctaatttttgtgtttttagtagagacggggttttgccaggttggccaggctggtctgagaactcctgacctcatgatctgcctacctcagcctcccaaagtgctgggattacaggcatgagccactgcacctggctagttcttctcaatttggattgcacatttaaaaactgggacatttaaaaattgcctgggtctcacttgtatcccatctccactctcccccgagatatttatttaatggttaagaataaggcctgaccattagaacttttaaaatctcataaggtgattataatttgcaacaagtttaaacaagtttaaaaaccagtgcacttaaacaagttctcaaagtgtggccccagaccaatggcatcagtatcacctgggaactgagaaaggccaggctctcaggccccagtccagcctagtgaatcagaaactctgagtgcagggcctctccaggtaatttggatgctagttaaagtttaatagccactgctctaaattatctccaaggccaggaatctccaaattctctttcactcatgcaactacttgctcaactcacaaatatgtaatgagaacattctatatgccagattctgtactggaaacagtattaggatgactcagaccagtccctttcttgaaggcactcaaacttaagtgctgagctcctacccactttgtaaaagtgccacgtactgtgccaaatcatcagtagtgaggtcgacactcttatgcacaatttgttctttcattca

SEQ ID NO: 134770 - DNA, 1069 bp, Homo sapiens
gtcaaagtcagctaactgtcgtctacttaagacttctggtcatttccaacttatagaggaagggagtctctaaaatctcttcttcagaaggcacctcacttctcagacttaaaattccacatcaagtgttccattaaaagaagataaggcattctgagtgcaaacaaatgggggcttcttaaactacacaccagcagtcagtgaggaaaactttgaacaattattgagttgctttcttgggtctctataatcaataacctgtctgcagatatctatctatataaagatattatatataaatataaatttacatatatatgcacatgtatatatagttgtacatatatgtgtgtatatatatacttaaatgtaatatttacaaaataaaactgtgatctcgtctagagaaaatgtattcatattacaaactgctcttccatatttatgtaccatattatacctttttattattgttataattattatgggtatttctaattaatatgatgttgaaacctgtttggcaccttctggaagctaccaaaaaaatgacactccattgaagtgcttaaaagctgttctcataagaattcttctggcctattgtaaaaaagaaaaaaaaaaagaaaaagaagaaagacacaaagaaaataatctaaacaccaaaaactaaacacaattccaatcctttttctgtacctcacgcgcataaatttgctgctcctatttttttttctgtttatgtgtttttatggatctaagttaaatcttttggcaatatataaaaatgtaaatagtaaactttatttattaagaatgtcatcttttttaatttatatttacacaattgttcatctaatttattttttctatacagttttaaatactcagacatattttgctgttcatgatatttttatcctgttctcatggatttgttttcccatactgttttctctgatctcaattacaggttggatctcacaaataataatgtcagagacagaaatattttgccactgttgattactatactttaaagttctatattatgaaaatatataatagc

SEQ ID NO: 134771 - DNA, 1027 bp, Homo sapiens
ctcaaaggagttctgggcccataaaatagggaagcagaggtgatggaaatgacatccaatgagtactgttaactggctgaacataaagtgactgcaaaatcgaatgtcagtgagactggactcttctgatgttcctcacctactattagctacgtggacagtcttgataattatatagtttataagtgaggttcttctccacatgtagagttgatactagtggcttgtattttaaaatttatttctagctgacaaacaattattgactactagttctaattactggggaaattccagagacaggtctagctgtaattcaaggtagaagatgtgtactcattctgtttttgttttgataaccctaaaacagagcttgagcacagattaggtaggtatccataggaaacagttatgaaggatcatgaacaggacccagaaggggaaaaagccagtacagggatgtgttcacaagattactattgatgtattgaggctcttgctggcttaaagatgcaaagctagattatgtcttctctagctccctatctcaattgtttaaagattgatgtttcttaaacttctaggctatacttgctcatatgagctgagagaggtcccacggcatcattgaaggccttggggcaggaagtgcaaagatatacctggcatatattcaaggaggtaggtcttggggcagcgcaaagtgagtttgaactcacattggaactgtccattgcaattgaggctgaaatcagaggctaaggatgtgcggcctttgtgaataaagtgggctttcatctcaacctggaaggatggaagggatttcaataatagagaacaagtaagaggaaattcagacagatggaagagcataaagcaagaaaatcatgaagatggaaatgaaaggtgtctggagaagtatagaatgagcaagactggaattcatggtcaagcggatgaaagccttgaaggctaggttatgatatctgaagttgattctttgggcacttgagagtgatgaaagttg

SEQ ID NO: 134772 - DNA, 1442 bp, Homo sapiens
aactacagaagtattaataacttgctcacgtctccacaataagtagtagagcttgaattcaaatccaggaaagcctgatccctcaggcctgcttccttaatctatataatactgtccactcctagttcgtgtcttttagtcctagttctgttgtgtgatttgtggtcttaatttccctctcctggtcttagttttctcatctattttacaacttgagattactaccttttcttccccttttgcccaggctgaagtacagtagcatcatcacagctcactgcaacctccacttcctggtctcaagtaaggagattgctacgaattctagcatttcatacttagtctctgcttgaaggagctacagcagctcattttctgggcaagacaagttgtaaattcatttacccatcagtttttagcctgtatgtctggcattctcaatcaaaactcttcaaaactgaccagcccttttattaatctttatatgcctttatatgccatgaaaggaaaggttgttcatgctttcaaaatgtagtttgtaaactgaatgcgttattaatactagtactagttattgttaatgctgtttctggttattatttatttagcatccttttattgtacacctaagggtatcaggctaagtactttatatgcattttccatagtcattacagtactctttttataaactaagaaaacaggtttagacaggttaaataaattgcctgcttccccacaacttgtgacagtgctaagatatgatctcagtcctatataactttaaggttcattcttttgttttgtttgctttttctactaccttggttactcatttcatggaatggggaaaacccagtggtgctagaagaggcgagattaatatggaatataattatgtaatttttctgagtcttagggcagccagagtagacacagcttaagggacagattctcatcgggagctgaagagatgtgctagtacagtatggtatgggatgtacagtattaatcattaggtcaagggatgtgggaagatggtaggctgatgttagatgaggtgggaggtcaagaattaatggcacaaagtgcacaacaggaaacagacattcaagggatcatgaagggagccaagatgatacatagcatgttggatactcattctgattggttgtacagttgatagctggcagaaaatgggcagcttacttaaagatttggaatgataagacaattccttttatttgtgtagtcttttggggaaactgaagtcaaattgaccttctatctgagtcattctcagtattacagtaatgaccagatgtgcccttctggaggagacgggctctatctgcctgtctcttagctccatttcaggctaagatccttcacaaagcagtgttttcaagtcatggaagtgggaaaagtggttctggcttttt

SEQ ID NO: 134773 - DNA, 1078 bp, Homo sapiens
cttgacccagctgacagacaatctgacagtgctaaagatcattgatacagctgggctcagcgaggctgtggggctgctcatgtgtcggtcctgtgggcggcgtctgccccggcaattctgccggagctgtggtttggtgttatgtgagccctgccgggaggcagaccatcagcctcctggccactgtacactccctgtcaaagaagcagctgaggagcggcgtcgggactttggagagaagttaactcgtctgcgggaacttatgggggagctgcagcggcggaaggcagccttggaaggtgtctccaaggaccttcaggcaaggtataaagcagttctccaggagtatgggcatgaggagcgcagggtccaggatgagctggctcgctctcggaagttcttcacaggctctttggctgaagttgagaagtccaatagtcaagtggtagaggagcagagttacctgcttaacattgcagaggtgcaggctgtgtctcgctgtgactacttcctggccaagatcaagcaggcagatgtagcactactggaggagacagctgatgaggaggagccagagctcactgccagcttgcctcgggagctcaccctgcaagatgtggagctccttaaggtaggtcatgttggccccctccaaattggacaagctgttaagaagccccggacagttaacgtggaagattcctgggccatggaggccacagcgtctgctgcctctacctctgttacttttagagagatggacatgagcccggaggaagtggttgccagccctagggcctcacctgctaaacagcggggtcctgaggcagcctccaatatccagcagtgcctctttctcaagaagatgggggccaaaggcagcactccaggaatgttcaatcttccagtcagtctctacgtgaccagtcaaggtgaagtactagtcgctgaccgtggtaactatcgtatacaagtctttacccgcaaaggctttttgaaggaaatccgccgcagccccagtggcattgatagctttgtgctaagcttccttggggcagatctacccaacctcactcct

SEQ ID NO: 134774 - DNA, 1097 bp, Homo sapiens
gtgctgtgcggcccaaatttgtcacctgtgatgctgagggcaccgtctacttcacccagggcttaggcctcaatctggagaatcggcagaatgagcaccacctggagggtggcttttccattggctctgtaggccctgatgggcagctgggtcgccagattagccacttcttctcggagaatgaggatttccgctgcattgctggcatgtgtgtggatgctcgtggtgatctcatcgtggctgacagtagtcgcaaggaaattctccattttcctaagggtgggggctatagtgtccttattcgagagggacttacctgtccggtgggcatagccctaactcctaaggggcagctgctggtcttggactgttgggatcattgcatcaagatctacagctaccatctgagaagatattccaccccataggggatgagaaattatcagtttcttctgctcccaagccaacttcccttcccttagttcttggttgttagtggcacatgcagaatagactcagcctatgtcctgattccagctgggtagttctagaacttcagaagctccatcttttaatgtttttatttgttatgtccccctccccgcttcccacctaaatttagagctttaaaagatgcactgcccaaataggacacacgatggtgttagctgaagtttgattagcaattaggcacttccaaggctttagtagagagagccactttagccctttgtgccatgtttgaaatttgcccttgtattaaatccttgattttttcccatttggctttgatgcccttgatccattgtttccttcctactataatgtgcttcatctgtgacactttctcttgaactctgattggattcactgtgcatgcttcagtgggatctgctccacctttcagtgacatttaagacatcatattcccgtaacattatgtctcagtctgatcgtctttaccagtatgaaagtcattcatttagtgctaccaaaggggatacacaagccctttaggaagcagtacctctcgcctggaggatctgtgccatcttggattgagaattgcagatgtgacagaatggattgaccctagt

SEQ ID NO: 134775 - DNA, 1009 bp, Homo sapiens
tgtgagtcaattaaacctcttttttaataaattacccagtctaggaggggcacggcagctcatgcctgtaatcccagcactttgggaggctgaggcaggcggatcacctgaggtcaagagtttgagaccatcctggccaacatggtgaaaccctgtctctactaaaaacacataaaattagccaggcacctgtaatcccagctactctggaggctgaggcaggaggattgcttgaacctgggaggcggagtaggccaagataatgccattgcactccagcctgggcaacaagagggaaactccatctcataaaaaaatcaaaataaaaatttaaaaaataaattacctagcctcaggtatttctttatagtagtatgaaaatgaactaatacatacacccttgtttgctttcctccattccttggctcaattctcagtccctcacttgcttcctggaatcacctcccaaatcaactactattaccacattccttagctctgggtcagctctcatagaactcaatccaagatttcatctatattccaggttctgtgcttggcaaatagaatacacttatgaataatatgtgattttctgcacttaacaaggacacttaatgactcaggtcttctgactatttgtttatttgtttgtcttgccatatcatatccatgcatttaaattcaatggcatttattgttttttaaaaatcaattggtcttctcacagtctgactaaatgaagttttattgtaataacctaattccactccctttttttatgtaaagacatgactaaaataataatccttacacacacattttaactggaaactgagccactgccccagtgctctattggcatctccatttttctgatatttatgtttctcctccctctgctcttagtaaatgttgatgttcagttcaccctgatcagtatttagcccttctggtcaatttatcttatttattgatctaagcagaaaatcaatacagtcttcatttg

SEQ ID NO: 134776 - DNA, 1117 bp, Homo sapiens
ggagggatgagtttgaagatttcaaagtcagggctgtctttgggaatttctcagaacaaaggcactgaggctattcagcaatttttcttttcttctttttggttttctcttcttgccttttatgttgcctccttccttctcaagcttttctgttatttttttccttttatcttccaactttttctctctgcccttctgaccttactttctccatgtactgaactttctaccagtttcaactttgaaacttttttggaaatgtggctactaacaattcattggaaggtattggtgcaaacggaatattggacaaggtgttagaaggcttgactctgccatttcctatcttggagtaagacatatattgtgttttggggcttcaacatcccctcaataaaatgggtatatgttgctaagtgatcgacatatccacagtactgtggttgtgtctcctaagatattgtgtcaccttcgctgccactgccctggttcagaccaccattgcctttgactggctacttccaaagcctcagtccaggcctcctttcctccttcagtttgcattctccatactttagttagtgattgttttcaaagtgatttaatttgaacacatagattttctgtttaaaaccttttggtgataccttttgccattaggataaaatttatactcctaaatgtggcctaccagatgtctttatcactccaatctcatctcccataagcctcctctttgcaagctctcttgtaactaccataaattactttccaatgctcaagcatccgtgctccttctcgtttcagatcatcacacatgcttctccttccatccaggacgctgtcttctctgctctgtccaacctcaccctgatcctgctttctttactaattcttactcatctttaaggtctcatcctaaatattgcctccttctggaagcctattttgattctcagatgggtgtgatgacccttttcagtgatcctttggaattttgtactcttctattgcaaaaatattgcacaatgttagaattgtctggatatgtctcctactgaactaagaattacttgaataatgaattgtgtctcacatttcacgaccaagccctcta

SEQ ID NO: 134777 - DNA, 1465 bp, Homo sapiens
aacaggacctgctttaagcaccaggaagtggtagagctacaattgggacctgggtctgactccagagtctgtgttttttgccactgtgctatcctgttgtctagcatgctataaaataaaatagaagagagtcttgtattgttcactcggtggccatttacaaagtgcacactccatgtacagaatgaagtcactgtgctaagtgctaggttatagagggattaataccttcaacaagtttatggttgtgtgtaagagagttgagtaaacaggcaatttcagcagtatgaaatgtatttgagacatttgccagaacccaatcttagctctgatacttaccagctctttgacctggggcaagttatttgacatctctgggcttcagtttccccatctctgaaatagttatgtgagcattctcagcttatacattgctgtgaagaataattgaaatactccagatcatctgcagccaattaagccaactgggttcctttcctcatgggggcccattgtgcaatggctgcaaacagcagctttcttggtagtgtatgcagcctgtttgttgtatgggttgctttaagggaccatggaaacaggcctttcagatgtatgtttatgtttctgaccttgcgctaccccagtgcaggctccaaacaggcatgcgaggtgcctttggaaagccccagggcactgtgaccagggttcacattggccaagttatcatgtccatccacaccaagctgcagaacaaggagcatgtaattgaggccctgcgcagggccaagttcaagtttcctggccaccagaagatccgcatctcaaagaagtggggcttcaccaagttcaatgttgatgaatttgaagacatggtggctgagaagcagctcatccctgatggctgtggggtcaagtacatccccagtcgtggccctctggacaagtggcgggccctgcactcatgagggcttccactgtgctgccccctcttaatactcaccaataaattctacttcctgtccaaaaaaaaaaaaaaaaagatactccagatcagttgtttagaatggtgctcggtgcatagtaagcagtcaataaatgattgctgtgagtgtgctgaaatatggatatgaacaaatattccaggatcacagaggaaatggcattcaaatgtgctgacgatgtggatgagaacttccctcaagaggagacatttgagctgaatttgaagataagctcatcagtgaacccaggggcaagggaaaggggatgtgtaaaggtcccaaggcaacagggagagaacattgtaggaactgtgagaagtttcaagtggctggcaacaaaggaacatgaacagaaagagcagactgtagaggaagagatgggtcagatcaccagggtcctgggactttatctgggaggccccagggagccactgaaaacttttaactgagaagtgtcatgccca

SEQ ID NO: 134778 - DNA, 1036 bp, Homo sapiens
gcttatcttcaaattcagctcaaatgtctcctcttgagggaagttctcatccacatcgtcagcacatttgaatgccatttcctctgtgatcctggaatatttgttcatatccatatttcagcacactcacagcaatcatttattgactgcttactatgcaccgagcaccattctaaacaactgatctggagtatctttttttttttttttttggacaggaagtagaatttattggtgagtattaagagggggcagcacagtggaagccctcatgagtgcagggcccgccacttgtccagagggccacgactggggatgtacttgaccccacagccatcagggatgagctgcttctcagccaccatgtcttcaaattcatcaacattgaacttggtgaagccccacttctttgagatgcggatcttctggtggccaggaaacttgaacttggccctgcgcagggcctcaattacatgctccttgttctgcagcttggtgtggatggacatgataacttggccaatgtgaaccctggtcacagtgccctggggctttccaaaggcacctcgcatgcctgtttggagcctgcactggggtagcgcaaggtcagaaacataaacatacatctgaaaggcctgtttccatggtcccttaaagcaacccatacaacaaacaggctgcatacactaccaagaaagctgctgtttgcagccattgcacaatgggcccccatgaggaaaggaacccagttggcttaattggctgcagatgatctggagtatttcaattattcttcacagcaatgtataagctgagaatgctcacataactatttcagagatggggaaactgaagcccagagatgtcaaataacttgccccaggtcaaagagctggtaagtatcagagctaagattgggttctggcaaatgtctcaaatacatttcatactgctgaaattgcctgtttactcaactctcttacacacaaccataaacttgttgaaggtattaatccctctataacctagcacttag

SEQ ID NO: 134779 - DNA, 1172 bp, Homo sapiens
tcctctgcagatagatcgggtgctttatatgcttctttatttaattctctcaactactcagcaattcattcattcattcatttaccaaatactcattaggacagagcagtgaaagtgctggcgtgaccctttccctcagagatgctatcctctaatgagaaaatcagacttgagactggagacttgaaccaacttatcacacaattactaatttaattaacacaaagctgccaggaaggaaacatactgcatgctctgggagaagaaaggggatacttgacctcaatttggctgttcaagaaggcctttctgaggaaggaagatttaagctggaattagaagggtatgtagcgttcaaccaaatgaactgaagaacagagaaagtgatctttttaaaagttctgttttattttttaattgacaaataataattgtctgtatttgtggggcccaacgtgatgtttcaatatgaggaagagtctcttgaaataaaaacttggcttgcttaatggcctagaaggccaatgtggctcaaacacagtgaggaagcctgggtcagtttattctaggacacagagatgggggcaccgagacactgcaagctgaagtggcttttaagacgttctgtaactggaacagaaggactgggattgccctaagatgaaagcttttcttctgccccactatggcatataccaccgaaagtgattgcttatacaaggaacagagaacagcttagtctgaggtcaggaatgctgtagacaaaagcagtgattaggaggtggtggggcaggccttgagtgcccggctacatttggaccttatctgttctaatttccctagagctatagggtggaactggattaatttcaaaataattctgtccatgctctagggtttaatatctcctgtgtctcctgggtcatccttggtgtgagaacactctgctcagatcagtggtatataaagtgttttcagtttttcattatgccatgtgtgcatctgtggggtatgtgtttgtgtgtgtgtgtgtgtgtctgtgtctgtgtcgttttcttccctgaagcatgctgagttcactcagggaaatgcctgggacttgggtgaaatcttattatttttttttttttggaaggcatgcagtacaaaatcatttctctccctacataaat

SEQ ID NO: 134780 - DNA, 1048 bp, Homo sapiens
ggaaggtgagactatagatctgcataaaacaacccattatggggcctcactacatatttaataaaaaaaagctcatccatacaaagaggagcacagcctttaatgattacttcaatcttatcggaataaatggttcttttggagaaaattgttcacctttggaagagaaggaatttttcccaggagtcctcagaagaagcaattttccaagaggtgccctgtagaaaacaaatgggccttaatttgcctcccgcagtgactagttgaaactcgcccccgcttccccagctcagaggagcggctgaaccagcacctcttggtcctttaggagtactttattttcatgaagtgccttataacaataagatctcagaacctgggcagctccaggccttttgcaagggagtaccatgtgggagaagcagcagctgattgctcaggcatgggactgagacgtgtacctgcttgagccctcgattttccttcacagacagaggacattggatgtgttcattctaaagcccctctggcttcatatttggtggccaggtcagctcatttgtaccttgagtctgactgtgagagtgtcaagctgggcaaacaggaaaggtgtggcttattcttcagagtgtacagcatgactaaattaacctcgatgttgaaattcctggcctccctggtaccagaggctcttcaacatctgataactctcacaggtgtctctctcctccaagccaggaagaagaaaagcctaagattaaccaagcctggatgggaaccccacagaatttgtagtagcccaaactctaagatcgctgtggtcatgttggattcagatgcaccataataatgaccataatacctaacattttttaaatgttgatttttctgccaggcaagtttttaagtgctgtcctcacaaaacttagtgataaggatggacattatcagtgtccccatattacagatagaaacactgaggcatagagaacacaagcaactttctaaaggcacccaaattcatgagtagcagaggtgggatttgaac

SEQ ID NO: 134781 - DNA, 1050 bp, Homo sapiens
taattttcatagatattgctgaaatgccctcttaaaaagcgatcctaatttacactcagagagtcaaggtgtaattttagatatggcaacaaatgcatgggacgtttatgggttcaggatgctgtccatcaccagtcaaaccaccctctgcaagccattagcaattctgtttacaggtgaggcgggtcctgccccaagggccttctctgcctggtttcctgcagtttagtgcctgcatagcttccaaaacagggttttagaaaaggctttgcagaatggggaggtggcttggttaacctcctgccctattcagagccctgggcttcctgaaacagtcccagtggatcgccaagggctggccaacagctgactaataggtgctgtggcatctggcctctctcggctttcggccaaatcccgaggagttcaaaagacctctccaactccctcatccattcctagcagaggcccaccactgaactccctgaataatgcattgcatttatcccctcttggtctgatggatggctgagcttttcctttatccacctgccttccttcgtttgtctgcctggagtttctaagctctcagctgtaccttgagcataggcaagagaagggagtggttgtttttttttaaagattagttgcacagctagcggtctgtcttcaaacaaaggccagatgtctttgtttcttactctaaaacctgaaatcaggacagaggagagaaaataaaaatgcctaccatttattgagctcctatgatgtgctagatgcaatgttggacaccacacaggcattatctcattttttcttcccaagaaaacatcatagccccgattttccagttcagaaactgatcccagaaatgtgacacagcctggttgtgactacagtcagaagatctggagcttgaatccatatctagtctatttagctcaggcttcgctcctcccacaaatcctgctttgcctggctgctgagaaggaaaaattttgccttttgtcacacttatcaacattcagctaacccctaaatatttcttgg

SEQ ID NO: 134782 - DNA, 1051 bp, Homo sapiens
tcacaactccagggccctctggccacatccagctttcttattgcacagagggaggcaaaggctgggagaaggctactacatttcctgacgtcaagggagtgaggctacttatgaacacagaactcagaacaccagccttgagttcttttgtctccactgggtttcccagcatgcctacctttagggacggttgggcaggtaacaagagggcagtgtgtgtgagcgggctgccaagagttcctgtgttttatgaggtgcagagtataattcaaaacctattttggggatgtctcgccccataaaatctccagcaggaatggctgggaatttgttttgacttccccagcatgtttttttaaagacctcttctccccatctcattttcctttcttctgtgtttcctttcttctatccaattctcaggcaccctgccccagtggcttatgaggggacacagtgggggcggcatttggggaaggagtcctgctatataggttaatgggctgacaaatgattatgagaaagcactcctttcttggatgattctgcctctgaaaagacattggctcaggaaatgacttcagggatctgcctttcacagtgatagttagacttttagatgccattcttgttgtgggagaaataagggtcccatacagctttctgtcttgtaatccagtagcagctcttccttcctcatttcccccatgctctttcctcgtttccaccaccctcatcactctcccagtctcttggcagtttctactgctgcagtttctttcttcaagtagatacttgaagaatcattcccaaaggttgtctttctctcatgtggaatcctcagtggctccccactgctttacaggattaagagtaaattccctagcagctgagtcctctgcataaggacccaacccgcctctattgcttgtctctctcacagttcctttgcctacacttcagccaaactggggtttttactgtccggaaaataagctttactttcccatttctgtgactttgctcgagctgtgtcctctgtcagggacaa

SEQ ID NO: 134783 - DNA, 1052 bp, Homo sapiens
cctctctttaagccttagcttcccccatctatttgctgagattctggattgtctctagcttctcttccacctcaagcattctagattagattatggaggataaagggatattagcatcatttcagatctcgggtcttggtagcaggtccaagccttccttcctatctccctaaaaaatacgcccaattttgttcatattgtatgttttctcattgcttgtttctaggcttggtctagacatgtggctctggcggcgggggctcagatactttgcaagttagaagttacagtgaccacttcctgttccccaccccaaaatgagtttgaggccaagaggaaagctaggaaattctggggaaaaaatggaaatggagccacgggggaagcaggaaggaggatgccagcagcaaagtgctgaatcccagaagagagagatctcattactggagtatgagtcatggtaataggctgaacaaatccccataaagtcagggctaatgttgtctgctggagcccatatcatgtcataaacacagtggtccaccccaaccagggctgtgttaattgtctgactcaatcagcggggctggggagcctgaaatgaaggattagttcagggcagtgagttccagcctccccagcgaccctggctctgcatcctggcaggcttgagctccttatagaaagactgtccaaggcaaggatggccagagagaggggcaaatagtaccacagagaggtccacagtctggatttgggggccagtcagtgatccctgaacccccaagtaactgggggaatcctggggtccttctgccagggacctctccatttctttctttctctcgattgtcttctccctccttagtcttccccagctttcctgttttctatttcttcttttccctctctctctttctttcttcctttctttctttctttctttctttctttcttctttctttctttctttctctttcttccttttctttttcttttctctttctttcttctttcttttctttctttctcttcctctcttcctttctttc

SEQ ID NO: 134784 - DNA, 1067 bp, Homo sapiens
cattgttggaagcaaacaatcaggcaatccattcaatttagaatatgaagggagccttgaatatctcttactttgcatcagcaaccacctgttatgatcatggcaggattgtgggagaagtcgaggaggatgttgattctgcctttgtatgtgttccacagaagttcagaggtgtcttggtcaaactgaggcagctgacacccagcacagtagactctgtggtaactgaataccttataagccattagaagtgctaaacacctcccattaaacttctccaaatcctattggttaccattacaatgattacattacaatgactgcaggtgaattgaatatcttatttgttccaggtaattttccatgcactttgaagatagaatttactttttcaccacaaataatcacagattgatgctcagggatagggaagaaattgtccaggtttccacagctggtgcactacggaggcgatattcaaagccacagtcagccaaaagaaagcccctaccctcaacaccatacagcactgagtgccacagcctaatagccagaccgcattccggctgttgcaaatatccatccaggcagtgcactgggaacttcaaagggccttagtgtttgctggtcattcttgaattttgatgtttgattcttgagataaacatgaggttgaattgaccagatacctcccttgagactggaacatatttataggctcagagaaagcacagtgtaaagaaagagcactagattaggggtctaacagttttgagttttaacctctgcttcttctcctaattgaatatatgatcttgactttgtgtttcacccctgtaaacctcaacattttaaaatcgatcagcatatacaccaatgaggagaaaaaatgagataaagtattttataatgactttaaactttctttttattaatataattttaattaatgacatcttcagcttcacaatcaactgtcctcaatgatctaagcatgcaattcagaattctctgaactagatagtgcacataggcttttgtttaacatagacttcagtaggtctttc

SEQ ID NO: 134785 - DNA, 1023 bp, Homo sapiens
ttcttattctttttcccccaagaactgatagttggcatataaatttcttggcactcagtaattagttacctaatgaaattgagcattggtgacatatattttttatctaatactcatgccatctctgtgaagtagatgctcttggatcatttatgggttagggaactgataaggcagatgtaattaatttatccaaggtcacatgggcaggtaaggagcagattagatttattttgctgactttactgttggacttgatggtcaagatcactgtgcagagcagcaagaatgcatgctgtctaagcagtgggcagtggcagataggagactgcactgggtttgggacgccctggtttagtgtatggtaaagccaaaggcagggtttgctcgtcaaggttgagggtagtagaccaacattgaaatatatatactgtagtgtgctgagatgcaggaaatggccctgaacatggagccctgaattaactctcaagcccaagcagaaacccagaaagacatgttccctgtaggtaaccagaagaggcctggttcagtgcagtccaactcagcatacatttcctgaaagcttactatgtgccaggctttggaagcatgaacataagtaagattcattccactccagcgcccagtgcttgttgagaggacagcaacaagataattccggaccacacctgttgatggggaccagtaatgggtcgaccagatatttattgggtagtcattatatattaggttctgtttgaggatctggggatactgtgatggatttctgttagcccgcaggagagctgaccctagtgtcagactgcagctggacatatcaagggaaggcagggacccacagtaagattcctgtggcttgtcttgccaccaggagatccttacactgtgcagttaaaaagggaaagatggactttaagtttggtctcagctattactggacactgagactttttaagccttggctttatcacttataaaatgggtataataatttctgattgc

SEQ ID NO: 134786 - DNA, 1026 bp, Homo sapiens
atgagccaccatgccctgtgctaatatcctctcttaagaggataccagttatattggattagagctgacctaaatggcctcatgttaacttaattaccactttaaagaccctgtctccaaacacagtcacagtttgagatcctgggggctaggactttaacatataagtttggaggggtatgtaattcagcccagaatattataggaggtagcttttgatcagatctttaggtgaaaaagctgtgcatcccaaggagcaacgaagctcgatgcaaatctgattgaggagggccatgtttgaccatgataagaattcaaacaaataacctctttcagttacggtgattgtcatctcagaaaatggagagtaagatccaaaggtcccaaagacattaggcaggcatatttattaaagttgagtgaaatctccagaacaccaagcatcatcagatatgctaagttcaagggaagactcgagaggattttagaaggagggtagctggataggtattacaagggaagaaggagggacaaagctgggtaataggagtaacactgggaaaagtcaaggagtctggatttgtcctaccactagtaagctgtgtgtccttgggcaagtcacttcaccatgctcagtgcaggtgtctgcatctttgaataagtctctgctctccttctgcaagtcgtcaggtgtaaatagctaaaaatgctctaccatcatgggaccttcaaagaaagagctcacagtgttgccgtctctcctactaaggaggagaaaacctgccctaatcatcatattcttctcacctggagaggatgtctggcgttccaccattagcaggtcactcaattatattaatttgaggaattttgagtgctaggtaccgaggggtaggagcacacagacactaggctctgtggctaattcctctgaagccttcccaggagagatgaacttccttggacgggctgtgggccgcttcctgacatctgaatctgaggctttaatgagtatttctcacaccg

SEQ ID NO: 134787 - DNA, 1009 bp, Homo sapiens
cccgccatagactataaactccatgagggcagggactcctctgtgttgctcacctagaatggtgtccgctgctcagtagatacttgttgatgagtgacactctccctatggtaggcccagggctgggcactggggaggctgatatgtggtccttaaatagctcacagcatcctaggggactagcatgtgctgacaattccagctcaggtgctacgagcagcaataggctgactgccatggcagactgaggagtggtgagtccagaggggtcttccagaggaggtgttgtctataacaagtaggcaggtggtggtaggaggggctggcctaggggcacagtatgcaaaagcgtggaggcaaggagaatggtgaggtcccatccccacgagacatgacggggtgctgtggtgaggctgtgcgtgaaagatggcagggtgggagatgagcccggatgggcagtggggcctgagcctgactgagggcttcgtatacccatggcttcatcctggggtgaggcagggacaagtcatctccaggttgcagaacatccacttctagccccttcccccaccgggcttagtatcaatccactggagacagttcccgccacatcaggctgagctcctcctttctcccagctctatgagcccaatcataccacttggaactcttgggtgacaagtgacagaaaccccattcaaaggaagttagacctggaaggggtttaagtgtcttgtgtaaccaactgggaggggcaagggtggggcagcctcagaaggggctggaagcaggacctctccatgctactcagtgctccgtacctctacaggcgactcacatctctcctaggtgggctgggagtgggggccacatagtggagcagcatccatgctcacactgtcttcttcttttttatttttatttttttgagacagggtctccctctatcactcaggctggagtgcagtggcacaatctcggctcactgcaaccttcacctcctgggctc

SEQ ID NO: 134788 - DNA, 1002 bp, Homo sapiens
agaggagggcatggatttgagaaatacttctcaaggcagatgccgagactcagggttggtgaggttaagtaacttttgtaaggtcagtcccagttctgatctagccactttggagattgtttgggagcagctctgtctcctggtttaaaccctcagcactccctcccgctgcatttagaggagcaggcggtagctgagtttccattagtgcctgttggcaacatggccctggccaagcctgcgctgtctgtgtgtcagtttccctgtcttaagagaactgctgactgcagcactttttctctggaggtgccagcctgccttgtgcggctctcctgtcaaagtccaacatttctggggcatttctgagaagcacaggacagagattattgccaagtaggagttctccttagccacccctgggaaccttctgaaaatagactctgtgagactgccagtgtttggactgcaaaagagaggagcgcagccactgagcaggcactgagttcctgttctttgccccttacgccaggtcctggggacagagatgaacgagacagtctttgccagtgagggtcgtgggcttaataggggagacacagagcttagctgcaggacgatgtgctgagtgcatcctaggaggcctgagaggtggttcaagactgactgggtcttgaagaatgactaggaatttgtcagcgaaggggcaggaataggattctggcagatggccctgtggacttgctggtgtgctcccaggggtgagagagaactgagtgctcagggacatgcttaggacgtgcaaagggttttcctctgagagatgagtgagagggagaagcaggaaccaggttgcaaggagccttgtggacaggactccaggacgagcagcagggaccggcggggtccatgcgtgtattacaagatcccatggctgagcttggaggggccaggaggccgggaagacctctttgggggctgcagcagtcccccaggtgggcagtg

SEQ ID NO: 134789 - DNA, 1110 bp, Homo sapiens
acaataaattggtgttatgtggtaccaggctttcgctcagcgtgtgaaacagaagccctacagtctggagatttatactgcatgttaaggcttgcttgtctaaaatctttttcaagactgcacgtaacagccttcatatcccccgtgtagggtccacacccagcaccactgagcaagtttgtgagcagtgtgagcacggccaagctgaccctggaagaggcctacaggcggctgaagcttctctggagagtctcactccccgaggatggccagtgcccccttcactgtgagcaggtaggtggtgacacatgtttcagaggctcaaggatgccactggggcctgtgtctcagtttcctccatgccaagcaggggcccacagcagatgtgcccaccatttggggtatgtattagggaggagatggcaccgtttgccatggcttcactgtgttcttacttgatccgtcccacactcctgtagccatgacccgtctgagcgtgtctttgttgagtagaatcccgtccgcattctacacatgagggaaccaggactcagggagctgaggcacttagtcaaggttagaacttgtttgaaaggataaatattggaacccaatgtttattcttttattttataggctctaagtcctaatttgtcctcatggactagctcattcttttctactcatcatctcttttattttaggtgcctttttctggaccttctgattcctatcgacagctttcatcatcatatttgagtggaccttgttcaaaatctgttttaagtacttaggaatgacaggctccaaaccaggagtcaggcagagtagaagctgtcctctgatttctgtgtgtgggatgcatgtggtgtcatgacaaggtgaacgcccactctggctaatcagagaaacctccctggaggaagggacctgcaggttaaggaagagttagaactctctgcttggtggtgtgatagatatttcaccctttgtttatctaacctatctgttcttgccaaaggccagtaggaaggcagaagggaaatttacattttttgtcattatctcatttagttaacccccttttgacagctctcaggtctctcaaac

SEQ ID NO: 134790 - DNA, 1196 bp, Homo sapiens
cagaggtggcacgtgaccatgtcctcactgcagggtggctaggaaagcaggaatctggcattttggctctgtggtgtagtaagtggactcagtgagtgtggaggacagggagggaagcatctgtctgccacatagagaaggcaccttgcacacagtaggcactttcctgagggtggccgtgaatgtgaatgttacctgtgaaatagaggtatctagacagagaagttggcccttgtgttttgttgtgtgattgtcttttgccatgatgggccatcagatgtttttgagtagagagtaacttaaatggaatttgtttaggataataaccccattggcagaacagccgggaggcaaggttagagagtaaagtgataaggcctgaactttaggacggaaaagagtaggccagtgttggaagcattttggaggaagcagcagcagtcatgattgcttgactgggcagtggaagagaaaggggtttagaatggctcccagctttctagcttaggttagggattgtggcgataccatctcctgaggcaggaaacaggtgagagagagcaggtttggaaggataaggagttcagctttggctctgaggactgagtgacagagctgcctcagtggtgaggcgcggcaggcagctggatatgaattttgacctcgggaaagacatctgtgaaggtgaagactctcactcactcatcccactcctggcccaggtcttctgctttgttctcccttaggtaagatgtgggggagcccttcctgccccctctttcaagcttactctcatttctctttggcttctggtaattcctaacatagttaacaggagggattttcattgtatgttgtgttaactctttgtttaaaactgctttctagaaagttctgtctatactgatctggagactgtttataaatcagtttttatgtgtgtttttataggttctacaagcatttttgcttctggttcagagcttcatagttctctaacatcagaaattcatttcttgaggaagcagaaccaggccctcaatgcaatgctcattaaaggatccagaggtaagagttaaaggagtcactggaagtctggaacgccaaagccttctgtgtcatggaaagaatgcaggcattggagtctgaccaacctaagtatgaatcctgtggctctgtgatggctttacaccatt

SEQ ID NO: 134791 - DNA, 1572 bp, Homo sapiens
ttataaaaatatcagcattttagcaatctggtaaatttcacatgccagtctaaagatcacacatattcctgcataaacacagttagctccgaatagagtgatcgtccatgaagaacttaaaaacattaccgcccactccccgccaccccgctggcataggtaagacattcatgtgcttcaaaaaatttaaacctccattctttacccattaaccctgttttcccttccttcttctccacttttttcttttcttctgtatccttaacagtgtttttttaaatgcaaataccagcatatattcttactcttctcttcatcccagaggtaacgtactctatatccatgattctgtccatttgtcatggagcagtaaatcttggacatctttccttattgctctagagagagttcctcattccgtaaagcatgtatcttgaaagcagcttggcgcactcagaaaagcccgagtttgtctggttgaactggccggagtgtggaccctgctgtcccatttattagctttgtgacgttgagcaatatactcatttctcccagtcttaattgtttcatagaacagggtcattgcgagattaaatgaggcaatgttatgagtagggccttgctcagtgcctcactcagtaaatggttgcctttatcatcattatcaattttattttactattttattctgtataacgttgcaaagctctgcaatgggcagggactctaatgtcattcccatttttagagatggtagaattgagttctggaaagatagtgccccatggcagcagcacccgagtccttggacccttgtccaggtctcattcttctctagccatcatagctaccagccgggagggacatctttcccaagtaccgtgcatgctgcagcttgcaagggaaaccgaatggctccatctcgccctctccctccctcctccttccctcctccctcctccctcctccctcctccctcctcgctcactgcgcccatttcctgcatatacccccctcaccctcagggaaattgattgatctgagttattagttgtatcaaacacaggaaagaaatacacgcctgggcccttcacattcactcttggtaatgcctgaattagattcattctgttttacattttccctggcaaatccaattatagaattatttgggggctcaaatggccaccagctacaatggagcagacaattgctctggagagtaattcactctgacgggaaggtttacaaaagcattcataaagtatttacactggtggaaagacgtgctgttctcaccatgttgtcacaatgtctgaaaagacaaaggaatacaaaggaataaaagtggctccgcctccccctgctgtgaaatgtttaccttggggagcaggcctgagaaaggtatggcttcttacaatatcgaggtggaatattgttaaaaaccggcctctcatgtgttagagcttccagcttgtcactacttgtacaggctgatagtgatgaccctcagaggaaagaatggcctcctagcatcggaagtggatctcactagctcaggtttaggtcggt

SEQ ID NO: 134792 - DNA, 1020 bp, Homo sapiens
ttctggcaaacgcttgtcagcatctctggtggtctctttaaatagagtcctaagagttgaattatttggtaaaagacattggaaaataacttttctaaggctaagtatagaagtagccccaaaaggtcatacacatttatactcatgctaataagatgttctgttgagatcacttttcttattaccattctcactagcattgttttgctttatttaagtcttaaattagtaaatgataaatggataacatattcctttcaaaaaattagtctcgaaaatatctggattcattatgaaggtagtttaatcaactctcaggcaattcaagcagacttgaaagtgatctgttagtttcaccataaggaagattttaaattaatatttgatatttggaagaataaaaggctacattagagttagcattaaaattgtatggaatataattttttctatgtgatgtaaaatatcttcctcatggagggctgcagagaatcattacagaagtgtgtctgtgggctgtgggaaatagctcaccctccccatgcctaggaaagaattgccagttgctaaccatcttaacacatccaatactgtttggaatttcaggatccctgcataatccataaattattcaatttgttgggggttcagactttaaattaaaaatggcttccttcctgtagacttactaatggaacacatacaggaaattcgaactttgagaaagcgtttagaagaatctattaaaacaaatgagaagctacggaaacagttggaacggcaaggatctgaatttgttcaaggtaaggaaagaccttcctggaggactgtacatgtctgtgagtgcttcactgtgacgcatttgcctgagtaagcatctgtgtacaaagcaggtgcttgataaatgttcatttttccatcttggagaagtctgccagcctctggcatcctgaattgtgactggcatctcatttaactttggaagctggagagaaatagataggaattttaagataaaac

SEQ ID NO: 134793 - DNA, 1093 bp, Homo sapiens
aactaaaatctcaaatgcttggtatagagaggttatttggtaaacagctgccgtcgacccaagtcctcttgggtccctcccctgtaagccatgctgtgggacaggcacaatcccctgcttccccttgttggcttcaaactcaagcgcactgagcctttcttgcttttagaatgtcattgcttaatgctgtagggaaataaaaggtctgactgaagttgcaaacattggggagttactaagagtaaagtaatcgtaagtattcgtaagtcatagtcctggcttgggattttagcatgggagatgatttatctttcaatctcaatggttaaggattgaggaagacaacttaacctaccaacatcttctgcctgaatctcctgagccttcagcctctcatgcgctctctgattatgaaacatctgaaaagtccttcttctcacgagaccagaagcaagataatgagacagagaagacttcagttatggtgaacagtttttctcaaggtaagctaagcctcattaagtgttttaaacatggcctgattaaaacaataatttgccatcttaaccttagtaagcagagtgtggtgacatttgagtatttctctgatgaaaggagatcccattagggccaatgctggtcattcagagtatcctttatcactagagaaagctatggttgttgaaagtgttggcgattggggaaaagccatttttattttttaaatgacgacttaatatgtgacttgccatttcctgcaggctgtgtgtcattgaacttgtatgtcagtgcagatttggttaatttcctattgtttatttcaaactcatcctaaggcagggtcatttcagagactcttctgctttgagttgcccaagagtatctagccccctgttctgatatttttatataaatacaacatttgtgattgtaggaatctactttgttttcctttagtgtgacccatggcccattgggtcaggccttttgtcttagtctatttggattgttgtaacagaacgccatagaatgggtgacttataaacagcagaaatttatttcttacagttctaaaggctaggaagtccaagat

SEQ ID NO: 134794 - DNA, 1524 bp, Homo sapiens
ttggtgtgtgtcagctgctgttgtaggcatttcacatttactagttctcaccatataaagtttgaagtaactattttaggatgaggaagctgtgggtcagagttgcatatttgccattacaaggcagagctaggatttgaacttgaatctgtcacactccatccaatgcatgtcctcttcctgttattccacattgtcttttgagggcaaagcctatgtcttgaatatctctacctgctccagctccaagttgctggcatgtagttggagatcagaaaataatcatggaatacatgaattgtataatttcttagcttgtgtctatggccaactgaaaatgccaaggtcttgccctcctttatttagttgttaaagattctgaatgctattattgttgctgtgtactttcctcttctttaaagatgtggtcctttgggcttctgggaataaaatagagaccagtctagggtgcagacttgtagattttattggcatcacgaagggcacttgcatcgttagagcgagtgggcagagaggtatcacagctcacaggaggagttttaatcagggcttttgcaaatttaaaagaaatactcttctcccattgcagcattgtcaaagatccctcccaattcaatcctccacttccattcttataataatagatcacatcccactggcatgctttagagagggcaaggaaggcttcccagagtggggccattcttagctgagatctaaagggtgagagttgaaggggctgggggctgtcaggagaatgtccaagcctgaggcaaaggagacacggtccctttgagcatgtagctggcacatagagggtcaaagctggagaggcaggctggttcttgttgggctggtcctcaaatgtgttaaaagtccaaacactattctataggaagtagggagtcttcgaaggaaggtaagctgggactagacatgatcacatttgccatttaggaagactgctggggttgcttgcagaaggagttggagtgagggatggaacctctttagcctcctcaaccaatgtgccactccttttcatttctgacagatttgtttttttccttctgttctgcctctctcaactgtagtttaacttgggccacttctaagtcaattaagtgggtgcccttggcccatgctgcacttctgcaagccagcagcaagcctgtgcatccatcacactgtctgggcaaagttgcatcaggtgtttacctgttaatgaatgcattgcagccttagagtctttgctgttgtctgagctcatgaataatgagactgtggctgttgacaagaagtaataggaagacgtgggagaaaaaaagagcatcaattaaggagtttatctctaatggagattcatgtgggcttttcacagcattttttttttttctcatggcttaggtggtccttgggaaatacaggttaataaccagatgattgctagaataacgatattgaaacctgcttgggaaccatgagagttttgagatttttaaa

SEQ ID NO: 134795 - DNA, 1061 bp, Homo sapiens
aggacagaaatgtggagtcttgagagcatccactgatgaaggcctgtcaacctctatctacctttcaagaagccaaaataccatgccatttttggccaggatgtaaccaagaggcataggtttgtgattgaagtagctataaggatatctccatctgtcttgcttaactataaaatgtagtaaagtaagggagagtgtgatcagacaaagggagagttgaaacattaaacctcctggatttccacttctttgctttaaaacagaggtactaacaccgtgctcataggatcattgtgaggcctgaaggagatagtagatattaaagagccatactcaggccctggtgcctggtcactcaggcctgtgtgactcatttctgatggtgacagtgccctgccatagtaggtgactttctaccacttagcatgttgcactgactcttggtgcccaggtggctggcctggtgggcgatagggaacctggatggccataccagccagccgtgtgagtttgtaggtgggaacttctagacttaaagcaaatgtgcaaggattcagtgatcttttcctctatactgtggtgtttgagaacttttccttttaggaatagttttgaaaattgcatgtgtgggtgcagtttaattatagtctcatttttcaagtacaactgtagaagagtttgtttttttctttagccacgcatcagtgtcttcaaagagctcatcccagcctgcaatttccagggttctgaagtatttttaaaataaagttgttagtctctttgaaatctaggctcatgtgcttcctttcaaacagcaaatgataacatgcaggaagagagcagagcgtcttttgcccagctacattctgagctttattttgttttcttttgtcatttttttaaatcatttcccctgctgtagacagtgggtttttcagctgtactcatgtactccttttcctagttttaatcctgcttctgagacccttcctaaagaaataattaaaatgcagataaagctgtatgcacaaagatgcttattttatttgtttataaaagtg

SEQ ID NO: 134796 - DNA, 5653 bp, Homo sapiens
tgccctccttccttcatctagccactccccttggtttattttttagttatttaccttgacacacccaaggagagcctacttattctttgtgggttctgcaggcagacgaagcattttagacttagcagataacacaaacatagaacttgattttctcctacaaaaagcataaaagtcccagaaacctcaccacagctccttttcttggggactaaaatgtaacacagaggtagctctttcttggattcatataaggggtctggctcttgaattatgaaacaagcttatcataaaacagttttatattcgaggcagtcatatagcatgagttcttaaaaatttaaatatagcctttaaaaaaattaatacaaagcaatacatgtttactgtggaataaaagataagcaaatactcctatagttgcatcacacaacaaagtgtgaataccctggagtatatatgcccagaccttttttattcatatgtgtattttttatggaaatgggactgtttgcatcctctccctttgttcagttatagataataagtatacattgtaagttttagtggctgcagggcattcttttgtataaatgtaccataatttatttaataattccccattagatgaacattcagattgttcccattttggggctattataaagaacactgtactggaatctttgtgcatatccttgctatttctttaataatgtttggttggtaggctccaagaagtaggatggtagcgttgtttcttaatgcttataaggggactctcccttggctccattaaactagggattccactagggatctggaaacctgcaatgtacatttttctggggtgagggtctataacttagattcccaagagggctgggatcaaaatagatcaggaactggtgttgcagccagagtttccactgtatccttgttcttggtgcctcccaagagcagttgtatgaataaggcaggtggtattttgtctgtaggtatttttgagtaagctgtgtttgacactgggaaaggtacaaagaagacagtttgatcagtgagctcaccacatgaacaaagatagctcctggaatcctttgccttagttctctgctgaaagaagtgaacctgaaacattggtttcttctcaaggccttccacagtctggagggggcctttgccaggggcctttgccagcccaccaccctctgatgatgatgatgatatgaagaagttgaaggagaaacaatgaggaagtgagaaagactgatctttattgggtgcttgcaatatgccaggcattgttctcagcctaagaggaagtattatttattatcctcatttattaacaagtgaggaacggagaggttcattcacttggtctaagtcagacaggaagtgacagagtctgaatttgagtccatgtagttcactttcacagtctaccctcctaaccaccatgatatcgtgcttttcacactcctatcaaattggattaactggtcaaacatttcttcttcttcttattattatactttaagttttagggtacatgtgcgcaatgtgcaggttagttacatatgtatacatgtgccatgctggtgtgctgcacccattaactcgtcatttagcattaggtgtatctcctaatgctatccctcccccttcccctcaccccacaacagtccccagagtgtgatgttccctttcctgtgtccacgtgttctcattgttcaattcccatctatgagtgagaacatgcggtgtttggttttttgtccttgtgatactttactgagaatgatgatttccaatttcatccatgtccctacaaaggacatgaactcatcattttttatggctgcctagtattccatggtgtatatgtgccacattttcttactccagtctatcattgttggacatttgggttggttccaagtctttgctattgtgaatagtgccgcagtaaacatatgtgtgcatgtgtctttatagcagcatgatttatagtcctttgggtatatacccagtaatgggatggctgggtcaaatggtatttctagttctagatccctgaggaatcgccacactgacttccacaatggttgaactagtttacagtcccaccaacagtgtaaaagtgttcctatttctccacatcctctctagcacctgttgtttcctgactttttaatgattgccattgtaactggtgtgagatggtatctcattgtggttttgatttgcatttctctgatggccagtgatgatgagcattttttcatgtgtcttttggctgcataaatgtcttcttttgagaagtgtctgttcatatccttcgcccactttttgatggggttgtttgtttttttcttgtaaatttgtttgagttcattgtagattctggatattagccctttgtcagatgagtaggttgcaaaaattttctcccattttgtaggttgcctgttcactctgatggtagtttctttagctgtgcagaagctcttgagtttaattagatcccatttgtcaattttggcttttgttgccattgcttttggtgttttagacatgaagtccttgcccatgcctatgtcctgaatagtaatgcctaggttttcttctagggtttttatggttttaggtctaacatttaagtctttaatccatcttgaattaatttttgtataaggtgtaaggaagggatccagtttcagctttctacatatggctagccagttttgccaacaccatttattaaatagggaatcctttccccattgcttgtttttctcaggtttgtcaaagatcagatagttgtagatatgcggcattatttctgagggctctgttctgttcccattgatctgtatctctcttttggtgccagtaccatgctgttttggttactgtagccttgtagtatagtttgaagtcaggtagtgtgatgcctccagctttgttcttttggcttaggattgacttggcgatgcgggctcttttttggttccatatgaactttaaaatcattttttccagttctgtgaagaaagtcattggtagcttgatggggatggcattgaatctataaattaccttgagcagtatggccattttcacaatattgattcttcctacccatgagcatggaatgttcttccatttgtttgtatcctcttttatttcattgagcagtggtttgtagttctccttgaagaggtccttcacgtcccttgtaagttgaattcctaagtattttattctctttgaagcagttgtgaatgggagttcactcatgatttggctctctgtttgtctgttattggtgtataagaatgcttgtgatttttgtacatcgattttgtatcctgagactttgctgaagttgcttatcagcttaaggaaattttgggctgagacaatggggttttctagatatacaatcatgtcatctgcaaacagggacaatttgacttcctcttttcctaattgaataccctttatttccttctcctgcctaattgccctggccagaacttccaacactatgttgaataggagtggtgagagagggcatccctgtcttgtgccagttttcaaagggaatgcttccagtttttgcccattcagtatgatattggctgtgggtttgtcatagatagctcttattattttgagataacgttcgatcaatacctaatttattaagagtttttagcatgaagggttgttgaattttgtcaaaggccttttctgcatctattgagataatcatgtggtttttgtctttggttctgtttatatgctggattacatttattgatttgcgtatattgaaccagctttgcatcccagggatgaagcccacttgatcgtggtggataagctttttgatgtgctgctggattcggtttgccagtattttattgaggatttttgcatcaatgttcatcaaggattttggtctaaaattctcttttttggctgtgtctctgcccggctttggtatcaggatgatgctggcctcataaaatgagttagggaggattccctctttttctattgattggaatagtttcagaaggaatggtaccagttcctccttgtacctctggtagaatttggctgtgaatccgtctggtcctggactctttttggttggtaagctattgattattgccacaatttcagatcctgttattggtctattcagagattcagcttcttcctagtttagtctggggatagtgtatgtgtcgaggaatttatccatttcttctagattttctagtttatttgcgtagaggtgtttgtagtattctctgatggtagtttgtatttctttgggatcggtggtgatatcccctttatcattctttattgcatctatttgattcttctctctttttttctttattagtcttgctagcggtctatcaattttgttgatcctttcacaaaaccagctcctggattcattaattttttgaagggtttttttggtctctatttccttcagttcttctctgattttagttatttcttgccttctgctagcttttaaatgtgtttgctcttgctttcctagttcttttaattgtgatgttagggtgtcaattttggatctttcctgctttctcttgtgggcatttagtgctataaatttccctctacacactcctttgaatgtgtcccagagattctggtatgttgtgtctttgttctcgttggcttcaaagaacatttttatttctgccttcatttcgttatgtacccagtagtcattcaggagcaggttgttcagtttccatgtagttgagcggttttgagtgagtttcttaatcctgagttctagtttgatttcactgtggtctgagagacagtttgttataatttctgttcttttacatttgctgaggagagctttacttccaactatgtggtcaattttggaataggtatggtgtggtgctgaaaaaaatgtatattctgttgatcaaacatttctgtgggccaggccttgcatttcccctcttccatgattccgttcaaaccattatttttttctgtaagacttctactccctttccacttagagaaattagagaaattctgcctatcctccaggaatctttctttgttcacctgaagtggaagcaaaatttattctttccaccccctcccacccccggtttgtttatagcttgcacttgatattcacatctgagtttgtgatagaggctgttgcaagggtgttgggttagaaagaacaagacctttggagtcagacagactggagttcagatcccagctttgtgggtcatttatcctttgaagggccagatttcctctatgggggagagcagtacctgtcttatagagatgtttgtgagaatgaaatgacattatttaagcttgtccaatccgtggcccatgggctgcatgcagcccaggacggcattgaatgtggcacaatgcaaatttgtaaactttcttaaaacattatggatttttttgttttttaagctcattggctattgttagtgtattttatgtgtggtccaagacacagagtggcccagggaagccaaaagattggacacccctgatttctctcatttttaaatttctggccaaacaaaaaacc

SEQ ID NO: 134797 - DNA, 1115 bp, Homo sapiens
ttttctttgtggtacactttctttatcacacttcatgagaatttttggtagatcctctgacccttggggcacttgtttctacaattcagaatagtatttttgaagagtgtatggaaacttattgtttgcctgagttcttgccaatctgtactttaattgggggctttataaggttaaaaatgttgcagaagaatctttgttccagcctttgttggctgtgtgaaatcaaagaagagctgaccttgtacagtttcaatttttctaaaagtatatatacttgtacagctgcaggcttttaaaaattgtactctgtcatttttccaattagtgttaaggtcacaaaaattcaattctaaaatggtccaagtattttctttcccctcttttatcagatacgattcattagttcagtcccaagccagggagctctcccttcaacggcagcagattaaggatggccatggcatctgtgtcatctcccgtcaacacatgaacaccatgattaaggcatttgaggagttgctgcaggccagtgatgtggattactgtgtggccgagggtttccaggaacagctgaatcaatgtgctgagctgctggagaaattggaaaagctatttctcaacggtaggtagggtgaggtacgcgagtcttaagacatcagtaattgacccaggacttcttggaggggcacaggaggagctaactccttggccttagttatctttcacccctctgccttgatgaggtgacagcagaaccacactggctgctgcttcctcccagtgaccacttccacatggcttgtggtcggcactgttacaaaccaggagtccagtttagacgcctcaggggccgggctggtgaggtacatgagtgaagccagccagaaggcactgcctctcactcagcagtggtcacgtagttgccagttcttgcatcttacaaattttccagaaaagatgggattttttatttatttatttttttttgtgaaaactcatgtgttttaaatgttggcaagcaaaaaatccagtcaaccaagcaaaatttttatcagttaaaaagtatatcgaagagttaaggatggccagaggaagggtgaaagaaacctttg

SEQ ID NO: 134798 - DNA, 1191 bp, Homo sapiens
gggaagcatcattcagagtgttagaggcagactgccaggctttgaggaggggctctactgcttacctaccctgaaccctaagcaaattcttaagctccctaagcctcaacttcctcttctgtaaaatgggggtactagtgatgcctcataattacttaaggaaagtcctgggaactaatctttatttccatgagtgaacacgcttcttgccatgaagtacagaccaaattctattatcatgaggttattacagcaaagatattttcttgtcttggagggtgattcactggaaaaaaagccttatggagagatatctccctccccagttcctctttctctttcttgttcagccagaaatacttggtgagtacattctctgtcgcagaccctgtgctagatactggagaaacagacatggatgacacggtctgcaccctcaaggctcttattgagtaattatcataacattgtgtataataaaaatactgtattaggaatgcttcctttaggtcaggtagcagctgctttctgaaatgaaatgccatactttatggtatttgcatcatgaacagatacaagagtgtacctcaagtcacaaggagcagattgcagaaccagaaattgggacatgcagtctgatgaggatttgtgtgtgaatttctttctgagagatctcctaggtcacccagtccaacccacgttgttgcttttgtagcatttttccaggctggccttcgcacgcacgcctccggtgaagggcatctccttctatcttggaatggttagaggatgtttgtgttacttggattccttcactactatgtgccagacactgtgctagccttttttttctttttgcagattttgttccatataatccctaaaaacaaacacacacacacaacttttcagtgatgttctttccattttacagataaagctactaaagctcagagaggtcaagtaacttgcctatgtgacagagccagagtttgaaaccatgtctgttgaatttcaaagacaggtttttctactacattccgctgccccttaagtattcagacagctctctatattgaacggaactttccctgggcagccagcagtgtggcacagtggttaagaacagaagctgcactacaaccatatgagacatctctttctacattttagacacaggggaaactgagg

SEQ ID NO: 134799 - DNA, 1044 bp, Homo sapiens
acccacccgtccatgtgtcagcatgcttctctaccaggcagtgggctgggttctggtggttcaacatgaaaagacacagcctgctcttagggaccccacagctcggaggagacaatcatcccaacagcctgttagtattcagcgcggggctgcctgttgctgaggtgtgcttggtgttggtccgtgtgcccaggaggagtgggtcagaagagagcctgaggctgagactgggtttgtggggtttgccaggcagatcagtggaaaaggtgcagagatacgggtgagggcagaggcaagttgtattcctttctttttaaaattatgaagtattagaagcatacataagcacaaaagataatataacaaatactcatgttctcattcaaccagaatgaacaaatgcctacattctttttatgttagatatttttcccccttcattaaaaaaaatcactattaatccagatctaattcactctgttagaaataattgtcctcaagaatcctaaatttgtcatgggatggccatggggacaccagtctctggaaaaatactgagttgtggtatatacactgttgtatacttttgcaaggtccagagtcactgcagtgaacacatggtcacatgcttctgcgtgttctgggctttgaggagaaagctactctaccaggcaataaagtcccccttagctgaattgtggaaagttgtagaactatagtatttcttataatgcaaatattcataaatggtcttggggacatcttttgatttcttcttgatagttattaatacagacttcttaactaatcgacagcttccctttccctgtcagtacttcccttcattactgaatgtctttcatttttctgaatgtgcttccagaactttgtatgtgaattgcatctgcctgaacttccaccttttaattgttgcgcagctgaggctgggtgctgcgtgtgacatcttcattgctgtttctttttcacaaggcccttgacagatacttgggatgtgaataaaggattttacaggcatcttggcct

SEQ ID NO: 134800 - DNA, 1693 bp, Homo sapiens
ccttacagttgtttagttatagaaacacggagaccaagtatcctttcaattgtttagttacagacaagaggatggactttactgatatacatgtgtttgcatccggcctggccacttacctgctttgagcctttggcaagtgtctagtacagtaccttgtacatggtaggagctcagactgtgtgagttcctgtttcccttccattcccaaggaagaaattccaatgtgacatcttcaataatgtggtaggtgggactctgtttagagtccataaggtagcattttgtgtggtgttattttagaacaagcattaggttgactgacggcagtcttccagcttgaaattggctttggcatttgtgcacttgcagatatgttttctgctgccatatgacacacagatttggatccaggaataaagattggtggagactgaggacgaagcaaatgattgttattttccagccctctttgctgaggcatccacctcctcccacgtggtctccttttgccacctcaaactgttcttatccttgaacctgctctctcctcttacctggaatttcagagcagaaagcatctcacttttccgaactgagcagtggaccctgaagagctagtctgaggtctgactcttgaaccttcttgcactgtgacattggactagttgtttgacatctcggttcttcatctggaaagtaagaatgataatgtctcttatcctgtgagttctgggaatgcagagtttacttctggattatgggaaagtgtgcttgaaagcattttatatcctagaatgttcaagaaggggcccttactcttctttccttcttaagagacctcagtgatctcatttcttgggtcccaaatattttctgttttcctcttgggttccttctcctctgctatttaaaaactttaaaaaaaacacagccttattgagatttaattcacatgtcatacagtgcatccctttaaggtatacaattcagtgggtttttttttagtctattcacagagttggacaacaattttaaacattttcatcatcccaaaagaaaccttgtactcattaacagtcatttcccatttcccctgaacttgcccaccccagccctaggcaaccacgaatctactttgtgtctctttcaatttgcctattctggattatttcatataaatggaatcatgtcatatgtggtttttggtgactggcttcttccacttagcatactgtttttgaggttcattcacgttgtagcatgtatcagtacttcatttatttttattgccaaacagtattccatagtatatccatgtggatatgccacattcattagttgatgcacatttgagctgtttccacttttggttattagaaataatgttgctattcatgtacaaattttgggggtgataatgtttttatttctcttgagtatatacctaggagtagaattgatgggtaagatggtaactctatgtttaatctttttgaggaactgccagactgttttctaaagtgcctgtaccctctttacattctcaccagcagtgtgtgagggttccaatttctccgcttcatcaacacttgttgttgtcctttgattatagccattctaataggtatgaagtagtggtattttattgtgatttgatttacattttccttggtgactaatgatgttgagc

SEQ ID NO: 134801 - DNA, 1273 bp, Homo sapiens
ggttgcattgtggagatgtcccaaaatttatacagttttcattgtattgatgaacatttgcttttgcaggttgcagtcaaattgtcataacctgactttaggggtagggatgagaacctaggttttatcttgtgcagactttgtgtaggagaggtattattctgagggcttcatctatattcttttatcctgacaacactcatcaaagatctggaagccacaccccatgttcccgttgttaaccggtggttaaggggctgagctgggactcccactgtacctgactgcacagccacaccctttccctggatcaggctaccttccaacccgggtttgttgagtgaatgtttgcatgttgattttccttcagcttagatactgtctctaagctctgcacatcctatcaagtatgccagattgttaaaaccagattcttttggcaatgtttcattggacccttatgaaaatcctcttgaggtcacggcttgacccccccacggccaagaatccctatagaagggagatgtgttctgggagagaaggaaataggtcgtgtttctaatagtggttcagtgaaggctgttgatattcttgtttctgatgggtgttttgtatttgagaaatcaactgtacacactgctttatagcatcagaatggagaattaagtttattttctgaccactaaattactgcttttgcgcatacaaaagagagttagatatatcattagcaaaattgcttttgattgttttaaattatgcaccaaaactgtaatttctagaaaagagttttctaaagatatcagtagagaccagagagagagagagagagagagagagagagagactgccattatattaacggtactagaaatgcaaatttgtgcaatttggctataatagaaatgctctcatctgccccagctccttcaatttgtacctgtatatcaggaaaactaggtgtcttttgtttgtttgttttttttgtttgaatttttcattgtgtgagagatgttattctgtgttcaggaaaactggagaattgaatggacttaatttccccaaatatattaaaatatgtatttttttagtttgaaattattcctcttgctatgtcttcaaaaggaaggaaaccgtatttgtttattattatttttagtatctattagggattgtgctagatactctctgtttgtctgtatatatattatatatataatatataatatatataatctcatttaatattctcaacaagagtatgaatttggta

SEQ ID NO: 134802 - DNA, 1881 bp, Homo sapiens
cttagctttggcactactatctctgtgaccttggttaattagtgcttaacctctaagcctgagtttccttgtcaatgaggatagtaatacttccttttaggattatgatatttaaatagaaaggcatgtaataagtgctcagtaaataataattatttttattattctagacatttccttctttggaggttgcttattagttggatttaataactagattggtggcaaagaagaccctataagtaacaactcatttgtgtaggtcttgtcttccatttaaaaatcttaatcatttcaccagtatggagagatgggggtgatggctagtgtgtatatcaccagcagtaatgaagtcaagaggagttatttatagactggtagaagaaatttacagctttggataggggagaaagaatgttaattgcagcacctcaaagacatgcccagtacaggctttaactagatgcatctttgataccactcctctgggaccctcagtgatccaagaaggtggatcggtaaataacatctccatgggaattaggaactctctatcttcctaatgtgaaagatcaaagccatgttaaataatatgtgtctgaaaagagtaagtcagctttgtgatatataataaggaggatacattgcaagaagaatataataagcactcaaatcacaacatgggttccatactcttcttaggaagaactttcaaggattgggctgtaagggtgggagaacacatttccattgtgcacctgtagtgagtaagacatgtcacctgaggtggtctcatttcattctcctaaccacctcgggaggtaccattactacccccattttataggtgaggaaacagggtgaggagaagtgatgtaaacatctctatcctgtttctagaacatctccctgtgttaaagtgagtatgtatgcacctgcatgcctgtgtctctctctcttcctccttctcctcccccttttcttttctgtttctctctggctcagtgtgtctggcttattttcacttactcacttaccctgcatctccatcctctctccacacaccccattcccttcctccttattccattatttgaccaaatacttttatttgcagattatgaaagacctttccaaaggaggctgcaaaaatggatacttaaggcacacggagtctaagatttcagattgtgatggggcccacgcacctggctgcctagaagaaggtgcattcataaacctgcttgcccctttgttcaatgagaaggccacattattactggaatccaggtatacatggggcccaggcattcctttgtttctctagttctaggggagaacaaactcattttgctaaatgggtttagatgatcgtgctgtgtaatttacctgagagagctcctgaaatggcttggaaggaatcttgccagtcatgaaattaagtaattaggctgcatgctagtggctgtgaggggacgtcagcaaagcctcatgtaagcccattataaagaggagaaagaaagctttctttgggaattattcctgggagcccccagaaaggactgccttgctgtcagcgagaggaatcagccctaccgaaatatcttccagtttcgacaacagcttaaaaaataccattgtagttgtgattctgctgtttttgctgagcttgaattaaagttctcttctcattatatctgttgggagccattcctatgtgaggagatactacaggttgttttccttaaaacaaaaaaggagaaacattcagtacatttgtattttttcaattaatcctttaggagtaatttttgcccctttcatattcttcctagtccatccataacagctgcttgggctttggaaccaaaaagagctgtg

SEQ ID NO: 134803 - DNA, 1042 bp, Homo sapiens
aacatcttatctaagtatttgccttgaagaaaacaatcggtttcaagtggaacatttttctcaagaagaacttaagaaaaaggtattgacctattaatttttagtgcttttcttttctttttgttagattgtttgttgtatcttgggttcctcatgagaggttaagattctgaaggcctctctccttccttcctgtcccctctgccttgttgtgtgtgcccctcctgtgtccgttaactggagtaccttccctcgtgtctgataaactccccaggcctgagaacccagccaggctcgatctccttgaggaaaagctctctggcccctcagtttagagttagccacttttccgtcaggctgttcacctcttttttttgtacctaatccaaatcgatgtccttattttactgatctataattatctggttatttgtctatatttccttgctaggctgtgaacatcttaaacttagtgattatgtcttatttctgatttcccattgcctggcacacatataggaactaataatagatgcattttgaatgaataacgttccaggtttgatcaataaatctttttttaaactggaaagattcttcaatgtgttgatcagtgtcatggttagagtggtttagtgtttcaaggttctgaaaaacattcttagaaataggaggtttgagaccgcatagtttattataaaattatcatgtatgtgtgactaagattcagtttctatctgggaataatttacattctgatagaagagacaggcatgtaaacaagtaattgcagtatgaggtgcaaggttgctgtatgggcagctgtacaaggtgtagaaatagcagaggagaggctaattgcctgtatgggagatgggggggtgagctcacctgatcaggggaggcttctcagcagaagtgagacttgaagtgggtttcgaaggacgaattcggagtttgcccaggtctccactttctcagcagagaaagagaaaacagcctgtttaaggcacagaactaagaaatagcaaggagaataaaa

SEQ ID NO: 134804 - DNA, 1088 bp, Homo sapiens
ttccttggtacattagctacatttcaagtgctcaatagacacatttagctagtggctactgtagttgacagtgaagatatagaacatttccatcactggagaaagttctattggacaggtttccccaagattaatgcacattctgggaggtgtgcattttcttggtctcctctgggttttgggcttctagtccatgcaagctctctgtacagcttagcactacatctcctctcccagaataaaaatccactcatactatgcgtttctgagtggttcacccaccacagtggagtttttttggcccctaatagattagtccttttctccttcttattgttggctcactcttcctttatttttttctcttcccacctgtcccccacccttaacttccagtatgacttttttgaggagtaacacagcaggagtcctctgtctccctttcttctgaagcccgggtgcccaagtgacactcaggccctggggagcctccctttctatacccaagccctcttggggcattgttcagaacagagacacattctggaatggagaattacgttattttcacctagttaacgcctatagcaaaaatttggaaatgacccaagtatccactaataggggatgagttaaagtaagtggtgggacattcacctggtttaatattatatagtcattaaaaatgattttgcaaataatttctaaaatatagggaattatgaagtgaggaatgcatatcagcattgtatgtctagtattatttcagccatgtaaattacgcataggggaaaagattggaaggaaatacagtctgccgtgtgttagttggtagtaggagcatgataatttttgttttctttatactgttgtatttaaaattctctatagtaaacctgtatatacttttataaccagaaaaaaacacaaatgacataaaaatcacaggaaggctttctgggctttgcatctaaaagtacaaataggtctgttttaaaacttctggtgtcttgttttaccaagtatcaacaacctgcaggctgagttaaacaagatttttgccctgcggaagcaactggagcaggatg

SEQ ID NO: 134805 - DNA, 1912 bp, Homo sapiens
gtcttctcagcttcatgaggggctcccaagtttcacaggctctttcttaatgaatgaaaacttggatgggactgaggcgggtcagggctaactcggactaacaaagactaaccgggactaacaaggtttcttaaaaggcttcctgttcatcttcagacttgtaatacattcagtgggagacagacctaggtccacatctcagctctgccactcagcagccctgagctcttgggtaagtaatttctcaccctgagcctcagtgtgtttgtgaaattgagattggctggtctgcctacttacctacctacttagatgtctacctgctttacagggttgtgttgaaactagagaggacactgtgtaaagacctaatacttcctggcatgtagtaagcactcagtaaatggtaagatttcttaagaataatgacagcatgaaaagcttacatatgtctcaatatttcatcatgcataaacttagtttacaggaggtttttgaatcctcagaccttggcatatccagagggcagaatgtgggctaaggaaggtagagctctcttctgtaactccagcactgttcactctggaaattgacaggaaaggtggatgaccctgaagacagatgatgtactgtgattaaaactggaaagggaagtcaagaagggaggaaactcattgtgagcaagaatgtggctgatcctttcacttttactatttattcttcacagcagcacttagaagttggtggatgatccccaaattacagaagtggaaatgtgcattctaagacacccggtgttccgcagtgaaggattatcagtgcttaggtcgtcttggctcccaacccaggttcttgctgatacactccccatcttgaggactagcacagtttccctgtaactcaggatttctcagcctcagcagtatgaggctttgaggctggataatttttttgtcatgagggcatgtcctgtgctttgtaagatgtttaacaatccccggcctctaccatgggagggtcggcacacctgatcctcccatggcagttgtaacaaccaaaaatgtctccagacatggccaaatgtcccctggcgggtgggggcaaaatcatctccagatgattatcattgctgtaactcatgaaaatcagcaatcttggctcataaatattgtcttctgtatgggagttgttagagtatgtggaaggaaggaaatgatgtttgttgagcatctcatatgtgttagcccctgtcctaacgtctttcccatgtaatatctcatttattcctcaacacaatcgcaaagcaaaggtattattattcccattttgcgtgaggaaatcaggactcagttagttgaactggcttgcccagtagtggtggcgtgctattttgagcttcgatctctctaactccttgtttctgctcctgtctgccctgccccagttccaggaagaggaaggtttttgtttttttctgagtgaagcaccttttgttctcccaactcctcacaccttgaaaagattctcaagttgggaaaacataaatgacagacacaggagcagcagctgtgtacttttcaccctgtcagaaaatggaagagggagtgaagcagttagctttccccagccctaatcgcaggagcttctctaaaacagtctctttttttctccctggttaaatgcctctgcagcatgactgcatccaagcgagtgctgtgctgtgacacctctgtgaggtttttcatcagccttacaaattgatcattatgattgtcttaaaatggaactagatacaagttgctagtagggccctttcccttgcgtgaagactgcttcacaatgaactgtcctcaaagcagcaagcatagaagattagacataatggtttattttccttccaatgtgtgttgat

SEQ ID NO: 134806 - DNA, 1038 bp, Homo sapiens
tgctctctgactgtggcctgagccagagccaggcacagggcctctctcaccttcgtttgattttaaaaactgggactagctacatatgtttgcataatataaggatgtactctttcaaaattctttccttaatgtcaaatgcccattgtcatttccaggaaaagaaacaatcatcagactatgaagagctgattcaggtcttaaagaaagagcaggacatctatacccatctggtcaaatctctgcaggaatcagacaggtaagcgtttctgtctggacatcacacatgtgaatgcgaacacacacacatgcacgcgcatacacgcacacaccctttcaatcagtgctgatctctaaggcagcaaagccctgccagtttgcttatggagcttataaagcttgggtggcgactgccctatttgatagtcacatatacctgttttctatcaagaattgtctgatttttggcaacaaaattgattactcaggttttaaaatcatgattactcaggttttaaaaatactttattatatatttagaaagtgcttctatgtgtattatctcatatgatcctcacagcctttctgtgaagtaataataatgctatccctgtgttttctataaggtcatgaaaactaagatagggtaagtgacttgctcaaagtcacacagatgtcaagtgacagaaccctgggactcaagcaagtctccctatctctgcagaattgctgaaatgagttgctgccagcaaggtgtggtggggagagccaactctaggatagaggccttgttctagccctgactctcccactttctagctctgtgtccacaggcaagtgctgctctgggcctctgtccatgtgtctgtacacacagggttggcctcagggacttctcagaattgagaagtcctttttttttttttttttgagatggagtcttgctctgttgcccaggctggagtgcagtggcaggatctcggctcactgcaacctccgcctcccgggttcaagcgattctcctgcctcagcctccca

SEQ ID NO: 134807 - DNA, 1078 bp, Homo sapiens
cccttcagtttgggttgtttgtctggtgttttcttgctgattagattcagtttatgcatctttggcaggaatatcacagtagcgatgctatgttcttctcattgtgtcctgtctgatggtacacagttggatttgccccattactggccatgctaactttgataactttatcaagatagtgtctgccaggtgtcttgactgtctagttatgcttttttccctttgtatttaataagtattttgggggaggtgttttgagtctatgtaaacatcttgacttttacctactagttttagcatccttttgtgtttcttggctgaattatttattactgtgatggttggcgaagggtgatttttctaattccattattctttttacatttattagtcatcatcatttttctataaagaaaaacctactctttttccctcctattcatatcaatatggatttatgaattcctgttttatttggtgggttataatctgttactatcagttattatcagtgggttataaaccattactcattatttcaatgctcaaatcatcccagatttggcttgtgggagcctttccaaactgggtctgtgtgtccttttgacaacattccatcattatttaagcatttctttaaaaattttttcagctttgagttataattgacaaattaaaattgcatgtatttaaggtacactagatatttggatatatatatacattgtgaaatgatcaccataatcaaattaattggcatatcgatcatctcacattgttacctttttttgtgtgatgaaaaaacctaaaatctaccctcctggcacatttcaagtgtaaaatacagtattttttgtttgtttgtttgttatttcagggtcttgctctgttgcccaggcttcagtgcagtggtatgatcctagctcattgcagtctcaaacttctgggctcaagggatcctcctgtcttagcctcccaaatagctgggactataggtgcatgccaccatatccagcgaatgtttttatcttttacttttttgtagaggcgggggtctcactatgttgcccaggctggt

SEQ ID NO: 134808 - DNA, 1050 bp, Homo sapiens
ccactgcactccagcctgggtcacagagtgagccccagtctctttatttatttatttattttttgagacagagtcttgctctgttacccaggctggagtgcagtgccatgaccttggcacactgcaacctccgcctcctgggttcaagtgattctcccaccccagcctcccaagtatctaggattctacgcatgtgccaccatgcctggctaatttttttgtagttttggtagagacagggtttcaccacgttggccaggctggtctcaaacttctgacctcaaatgatccaactgcctcatcctcccaaattgctgggattacaggcatgagccactgcacctggctgagacccagtctctttaaaaaaacaaaacaacagcaacaaaggaattttaagtgatcacttaagaattgtaaatttctggtgtcactttaaggaatcccaactgttgcagccttacagtcgtacccccgactcccccggccccaagaaaggtgtgcttttcagatcgtagttctttctttgtagaaaatgtgaatttattctgctgtgcccttggctattttgtgttggtttagaatttatcctctgcccatttctagaaagaacttgaggctatgatcatgtctccatagactctgggcagtctgttttccttctaatcattgtgtgatcctgagaatcaatgctagatgactagggaattgaagaatagagagtgaaacacactgaccatatttaactaactacagccggagattcatggcttggttattggcatggttgggacatcgctgctgaattttcagggtattaaaattaatgtctttgttgcagggctgtgacatagctactgaaatagacaccatctatctaccaggcctctaaattgccttgattaccaagaagtgatccattaagctttctccttacatgtctgctgtctctttagatgtggtctgcacattacatgtgtttccttcaagtcattaaggaaactatggtaaagtagaaaatgcccggctttggtgtcagaatgccagtcc

SEQ ID NO: 134809 - DNA, 1314 bp, Homo sapiens
ctgaagaaggcagaggcagtgggatgcggggtagggagctgtctggcgggaggaatacctttcttagtactgcagcttctacccttcttcctttataattaaggagggaggagttactaatctgagtgatgagagttcaggatattttgggggccattcttgttaatgggtgagttataagaacccaagttccagattcttttgctttcctgctccagatgtagccaggcctagtctttgctgggcaggccaactccctcatttcctcatcagtcatctttgtgcacttctacttctacttgaataagagaacctgggcagctccctaagctgcacacaccctcccttttcccaaacagtaacaacatcaactaccccaaacccttaattttatcagaaagcacttatctggatatgaaattgtcacagaattgtactttgattccccattctgctattgttgtgtataactcctttgagaactctggggatagcaggagtgattgacagggtaggatttggacactcttggccatgaaaagcaccaaatcctcgcttttcatctcccaggtgctctgtgttgagggcgtgccacaccttaaggcctgggttaactgttggatgacaagatgcctgtgagagggaggggcaagagctgaaccttgttgtggggtggtggtggtggtggtgatgccatggccatgtgaggaaaccgggtagtgaggatcagtctgggggttgtatgtggggacagagagaggtgacacggcttcatttgctctgcattagcttctgtgctgggctcccattgtgcattctctcctccagacctccaaggaccctgggagtttgcattattgtcttcatttaccggaaaggaaacactcagaaagatttaagttatccatctctggtcacactgccagttagcagtagaggcaggattcaagactagggctgtctgttttcacagtccaggaatatcgaaggaggtttggaaaaaccacccaagatgatcaattttcagttctgattgttgtactcaggcaagacatgccatctccatgcctccccaaaacatttattagaaccccactggtggcaagtgcatgagcctgtctgctgtctttgtgttgccatggcagcactcttcttcagggccatctctgcacacaaacctgccctccccctatggtcattttgctttaaactttctttgactgctcttcatatgaggttgaaggtgcttggttctgccccattcattagaaggagggcctcagtctcaggctagagagtccatcaatccaagtc

SEQ ID NO: 134810 - DNA, 1407 bp, Homo sapiens
aaccatcctttgctcatgccaacaacatttattgccagtctcattgtgcctcttctttagcattttgtagggaggcaattcttctgctgaaaattgagcttggatcagaggcttatgaattcactgtgtctcattgtgcacgaacactgagaagttgagccccgagagtcagttctccatgtttgtttgttttaattgcctgtgattgcagtgacctagtgccggttgactcagcatgtgttgtaatttgcagttttttatttattcaacacatttattgagtacttgtaatgatattgttaggctctgatgaatacaagctttggtttttactttggtagtcttatttacagtgaagaaggtgaaaaagtgaggatcacagataggtcccctgtattgtagtatacctccctgctgccaaaggggcccatatcccttgaaggaaactcaggagacctttgcaaaaacaaacaaaaaacccagtgttcccaagtctatgccctaactgggatgtttaaagtgtcctactcttgaggttggtaacagggatgctgcttggatcctcacatctctgccttcatacatctgagtttgatacattgtcagagcccagaaacctgggctctccttttagtgtgtgtgagtgtgcacatgtgcatgaatgtgtgtgtttggtgaagggtgagggaaatctttattttaggtgcactctctctggttcaggcgcttggtattctactcagggtgggtgtgggagagaagcaagctaaggtttttttgttctcctttataagcaacatatattagacattgccttggccatattccccagactatttcagaatgctttcatctgttatgagacccgtcatccgctaccctgacaagtgtgtgcttcagtacctgggcccttagctctgtggggatgcatttgctggctaaagcccaaaaatctaattaaagtcgtaccggtcacccagctggctaatcccatgtgctttgacaggagtgggtttaatttcagggtagttcagcctgaacctcccagttctcacatgtactcattgatggatatctccaaatgagattgtgacagcatttagaacatctcttggtaaatcagaatcaaaacatggcatttggagacagtgtctctacaggctggttggttagggctaagaccacagatctgaggtactatattttttactaatggccaaagctcctcttgccctaaaaaaaaatgtatatatatgtgtgtgtgtgtgtgtgtattaggtgtgaaagttttgagttggtctctttatagaataatgtgcagtttaaatgacctatgttggaagaagcctgaagccagaaacacgagtcaaactggtttggagtcctggctccattacttactagttg

SEQ ID NO: 134811 - DNA, 1049 bp, Homo sapiens
tgcagtggtacgatctcggctcactgcaacctccgcctccgggttcatgcagttctctgcctcagccttcccgagtagctgggactacaggcacccacctccacgcctggctaatttttgtatttttagtagagacggggtttcaccgtgttggccaggctagtcttgaactcctgacctcatgatccatctgcctcagcctcccaaagtgctgggattacaggtgtgagccactgtgcccagctgagaatttgtgctttttttctggtcctttaagaaaatacttctttcatacaaccatccacatcataagaaacattatcttatgttattccaaaatcttcctattatttttgctttggtttctgaatgttgtctatgttaatctttttcttttctttttttcccccacggcgaaaaagagcccaggtttcttggtttgtttcatgaggtatgaaaattagctcatcttgcttctctgccttctcttctaggggtctgaagactatgagactgctctatcaggaaaggaagccctttcggctgcgctgcgctcacaaaacctcaccaagagtacagagaaccacagactgcgtagaagcattaagaagatcacccaggagctgagtgacttgcagcaggagagggagagactggagaaggacctggaggaagcccatcgagagaagagcaaaggagactgcaccatccgtgtgagtaccgccctgcccttctgacacagtggacagtgcttttggggctatgtggctgtgtctggttgtagggtgatattcagtacagaagacttaagaaaatatttcacttattatctcagtacctagaaatgaccagcttcatttgatctatttggtatttcagtccttttattctcctcgctctctctctctctctctctctctctctctctcacacacacacacacacacacacacacacacacacacacacacacagagttgttatcgagttgaaaatacagttttgtatcgtgcttttttaagtttaatgttctctctctggtttgttgc

SEQ ID NO: 134812 - DNA, 1079 bp, Homo sapiens
gctgggactacaggcacatgccaccatgcccggataatttttgtatttttggtagagatgggggtttcaccatattggtcagcctggtcttgaactcctgacttcaggtgatccacccacttcagcctcccaaagtgctgggattacaggagtgagccatcacgcccagcctgagtatcatatttaatcttcacaatgaccatatgaaaatagagaccattcctcccaaagtgttgggattacaggcagcgagccactgtgcctgacgaaggatgtgtttcttgatatgagtgtattcagtttgtgaacatttgttgagctatacactgatgatttgtgtacctttctgtatatatgctatttttagtagaatgctggtaaaccagctttcagaaaaaaagaaggaaaaaataataatttaaaaaatagaggccattacttcccatttcacagatgtgtatatatttgataatcatatgtattttctttagttaactgtgtattaacgaaataccacatattcttgacttattttgcccatggactttgctgaaattacagtctctcaggctggccattgaactagcatgctgaccaccttttttttttttctccaaatgaatctgggtttgagccattctgatgtggatgaacattgtaagtgcttagatatatctctactttttgtcaacctaaataacagagagaatctctcaaaaagaaaatgatacttattcaggactaggacatggcagtgggaatacatgtgccatagctatgtgcatattcagggaggttaaggaagacaaagatttttaaagaaaaatgagaattacataacagtattgagatacttgtccttggctgcaagtatcaataacaaggatgacaccagtcgtaggttggatgggcagttgctgggcagatgtccttgtggaagtattttttgtgtaggattgcggtggcctttgtgcaaggttgtggtttttacagagtcttttgtgatagtttttgttctgaggcatttatgcctgagtaatctgtcttcatatacccgaatctatttgtcaaggttgttt

SEQ ID NO: 134813 - DNA, 1030 bp, Homo sapiens
tgcttttactgtcatcccgtatctcccttacctggctgctttggtcccagctgctcctctccaggtttcttttccagaccttgatgtttttgacctgccttctcctccctccgtcccccaatgttgtactacaaggactcctgatggtcagcccctctttcttcctcattttaatttcgtgttttaaattattttaacatgtttcttatcatgtttctagttttcttatacagcttatacctatcactaaataacttaataaatcaatacagttttatcatcaaagtaagtccatactgcctaaagcttcctcctcccacctcttgcactgatgttgcttttggttgtaacgtagaagttagaagttaaatctgatttaagactgtttgattcccaagattcatatcccatgacttatcttttgcagagcctttagttaacaataagaataattgaagtaatttggtttaaatcatggtacgctaggaacatagacaaatctttgcttttggaatctcagacttgccttctcttactgttttgacagtggttgatgaaatggagctaagattacactttagactgtttctctttttccttgcctagaaaataacaagcttcagaagctgaattcttaggaaaattatgttttccattgcttgggtaaaaatctgttggctgctgatagccagagagaccggcataaacattgtgatattttacttgttatgacgggtcttaaaggaaagaaaggaatcttatacatttaaatgttacccagatgtattatatacatttaacttaataaccccagtcttagtcaaaagactttaagaatgagttttgaggtcttacaatgtacagtgttggtcaagtttcttatcttgcagcacacagagatcaggaactgttgtaactcttcaggttatacatgtcaggttggcttttcagaggaccctcatttaatccttgcccgaggaggtagcagatttacaaaccagcgagtttttgcaggacttgaactcaagtc

SEQ ID NO: 134814 - DNA, 1118 bp, Homo sapiens
ttgactggagccaggctggaggcaggcaggggaccagttaatgtcacacgaattctgacgcttaatctcctacctgcaaaatgtgattctgtttgtgttcagccattgtatatgtctactttgaagatatctggccccatttccttcctcctccagctccactgagctaagagaacagcttagaattaatatttaaattttgttctcttttagactgattgaggagttgaagctgtctttgaagagcaaagaagctttaattcagtgccttaaagaggagaaatctcagatggcatgtcctgatgagaatgtgtcatctggagagctccgaggactttgtgctgctccaagggaagaaaaggagagagaaactgaggtgaggtgacaggacatgaagagggggctttaattagccaaccagactcctctgtgggagatggaatgcgcattcggtcctcatggttcacacacagcctgcttctaaatatgagtcccctgtcagctgaggagtgagcagaaactgcctttgtcaggggccctggcattctttttccttcttagtctcctgttcctataaagagttgcttaaagaaaaccagtccctacctgcttacctctgttttaccatgtgttgatttgttgttacctggggactttattttcatcctttgggttttcttaggatacagttgtggtgcattgttttccatcttgcctttttggttagaagtaggtgtgaggccaactttggtctgcaacttgagaggtagggtgggaagaggactaactcgtatcgggcttagcagtatgggaggggttcagtataccatctcgttcaatcctcccagccacctggcaaggtagagctcatggtctccttgtcacgtttagaaacgggctcaggctcagaggaattgttacatttttccaggttccaagagatgggttgctagtagctgaccccaaagcctccctggactcctgcccccgccctaggcggcctccccagcaagctcttttgaagaggttgggcaggccagggaagtgcaggtaggtcttagtccaggccttccattcttgttggagtagctgctgcatgtcgtatgttcacattgggg

SEQ ID NO: 134815 - DNA, 1057 bp, Homo sapiens
cttggccacaggagtccccaccaggcctgcctactttttcttttctctatgtagaacttgctttaaggtaactaaaaaaaaaaaaaaattcagttttattggtgtataaattacatacaacacagtgcttcaattttaagtgtatatagttcggtgactacctctcccattgattatgtgacgatttcaaagttgagcccctagagggcaatcttacacctctttccaggttttctggggcattgcactggtgctgcctggcaccttgtctcctagtgcattgctaggtgctttagttacctttgtctccctctttaccttcatcccaggaagctgtgcttcactagggcagctctgtctgactgcaaaatctttcttctttctcccaaactaagttgctttcttggtttagctgcagaaaggctattctgagggtcttctgacaaaatgctaattgttacatgttaaaaaaaaaaagtaataattataacaactgtcatttgttgagttccaccatattccaggagcagtgcaagattgttttaaatagcttgtctctggtccacaatcacaagtcacccctattttgtagctgaggaggcacaggctcagagagatggaattacttgccatggccaaggggcagttgatatgggataatttggtaattatattgtgttatttgataacacagcccagagagggatgtgttcagctgttcctgagtggggcactaggggtgcaggtagcaaagcttcctggaggggagcttaattagctttggcaggatgaatgggtgtttgtcaggtagaggtgggggtgaggcgggggtagggtggggaagggcattttaggtagaaggaatagcacgagcaaaggtgtagaggcatgaaacagtctggcttcgggagagaactgaaagtgaggctactgagtggagatggagagggtgatggtttcccgtgagagatgagactgaagctgtcggcagggccctctgatctggtaggccctaagacctaggacctggaatgcctgggaaggagtttcaccgttt

SEQ ID NO: 134816 - DNA, 1100 bp, Homo sapiens
gtgagtgggtagcagaaattcattcctggagaaatcctgtagccaaggctcgggaaggaagggcttctcgtccagaattctttcggccgtgtataatgctcctcaaggagtgatagaaatgattgtgaatcactgtgaattcaagacagtgatccaaaaatgagccccgggagtggggggtgatggcattcaatggtattaatcaggaaatggaaataggcgccttggctttggccagcggagaccccagcagagggtagcatgaggcctctcacagcatgctgctcagcaggagccagtgctgtgtgggcctcagaggccaagggctagtgtgcagagcactctgatcagagaggaacaggccgacgtgtgtgagcacattaattctgagaggtaatcatctcatttttcacatgaggaaactgaggtgtgagaggtaatttactgaggctaggtaattcacccagagtcccactgaggacataatagagtaaaaatttagaagcagatctgtccagcttcagagcccatgttctttctttccagttgttcacattgaattccattaaaatgatatgacactggggccttctgaagctttattggtgaaaagaaaaaagatattaataaagtctttattttcaggcgactcatgtttgagatttggacaacaagtatggccctcttgactttccattgttctcagtaaaaaattcacatggcttgtacatatgagagatcacatggctctcagttggaaaaattttatgtatctttaaagtagggcatgggaagctggtggtgaatagatttgttctgttgcagtttttctgagaaaccagccttaggtggaagcatttcctttattattttgccttctggaaacctgcagtcattttagaaatctgacgaggactgctcatacagtcttacagagtcatgtccgacactgtttatcttctggcatcggtggttgtagtcctgcgtctgatttgggcgtgccgttcccaccactgccggtcatgtggagagaatattccatggtgctctagcagtgtgtactctgtgttttatgttagagtaacacggagtatgggctg

SEQ ID NO: 134817 - DNA, 1663 bp, Homo sapiens
aaagaggagctgtaagcccagtgctttgggaggctgaagcaggagtatcatttgaagccagaagtttaagaccagcctgtgcgatatagcaagacccaatctgtaaaacaaacaaacaaacgaaaagacgggtgtggcagtgcacgcctatagtcccagatactcaggaggttgaggtgggaggatcccttgagcccaggagtttgaggcctgcagtgagctatgatagtaccactgcactccaggctgggcaacagcagagcaagactctgcctctaaataaaaaaacaaaaaaacaaaaaaacaaaagggagatttccaataaattgtagatttacagcagtcttccacaaacgatgcacccaaacccccatctactacttgagttcatctaatattctgtctgggatacatttgtagataagtttgagaagtctgccactgttcagctgtctcatattgaattccatttgccctggattctcacgtgagttataagcccaaggctgtgtgcaactccctttgttccagtcagttaagaggaagacatttggttggagaacattgcggtgctccttatagacagcttgccccatgtggttgtagctttaagtgagaaccctgaaatcttatattgaaatgacacatgccatgatgtggtctcctgttttccatccacatgttttatttttttttaagctgtaacacgttcccactgctgcatccaccacatgcatgattgtaaacaaccaccagtaattgctttggaatgggaaaaacacaccgcagaattgcttgtaaatttgcttggtggagggcatacaatttttaaatcagccttccttgtatgacatttatgccttgatatttgaatgctctggctgttagaagcttggagcatttacataattgttccaagtctcacaaaatctaggtctttcttttgagaccaccagtgtttaataattcccttttccctgtgccctgaggctaatgagggtttttggaatctaacatctgcctattacaagcatcctgtagtcagtctgtgctggaagcagtttccccattgttgacattcataggtcctctattttacattgtttcttttctttcttaatcttgttttgtagaacattgagctcaaggtggaagtagaaagtctgaagcgggaactccaggagagagagcagctgctcatcaaagcctcgtgagtaccatcatccgttgaaagcttgcaagtcgcccacactgggttggtcagtgaaatagagccgtacacttttctaagacagttggtttccatctggactctgaggactgcaaggaggtttttgtttttacttaattatttacttttcaacaagcttttaagatataccatgcttatagaaaaatgaacagatcttaagtgtacagcgtgaatgttcacaagcaaacacacctgtggagctaccatccagatcaggaaacagaacatgccagccccccagaagccctctttgtgttctcagagctcacctttctcccctaaagataactaccattctgaccactgttagttctgcctgtttttaaactttatataaaaggaattatatagtagattctcttttgtgtctggcttctttcctcaacaatatatttgtgagattgatctatg

SEQ ID NO: 134818 - DNA, 1043 bp, Homo sapiens
aagtttttataattacgtgttctttagaaacaggcagtggaatggtggaatggttttggagttgaattctactgttaccaggtaacttgtgtaacttaggcaagtcagtttagcttttggggcttgcttccagaattaagtgataatccctttgtcatagggttatttgtatgaattaaaatgagaagacagatgaaaagctccagcacacagtcagtgcttgacaattaccgtcttcttgaggcttcctttggcagcccaaagttaggattgtcagtttttctgtgataggactcttcggtattcctgtgtgcttgcctgtaactgtcagaagaaaagcctatcctcatttgaagtcttgacctgcaggtctttgtctgaaaacaaaccttggttctgaaaactgaaaaaagaacttggctttcttgaaaagacaggagtacaaacaatatttcagtgcctgtttcttggctttttctagtagattagcccttggcctgggaattattctgacttttctcctctgaagtttgcaccagtggaaacttttgaaggaggaaaaagaactctccttgagtttcagcagatgaacttaaattgacttgtcttgaagagggattgtgctgtacttctgagccttttcaagaattggaaagcttctttgtcccttatgaaagtttttttcttcactctgggagtggaaagacagtgaggatgtccccttttctggaagggagtagtgatgcaatcacaattttaaaggaaaaccaatagcctaaagcagtttatacgtgagtatggtggtcatgcgtctagaacctcttgggtgataggaatacaaaacgtgtctgttgccaactctatcaggcactgtcttgggtatctgtacatttgcatcttattgtaattctcatgacagtcctgtgccgtggagtttatcttcatcttacaggggaagaaactgaggcttatagatgagtaacccacctgatgtcatatagctactacgtgaggtggattttgagcccaggtcttccaatctc

SEQ ID NO: 134819 - DNA, 1040 bp, Homo sapiens
ttttgcacacagcactcttaagtacattagcatgtgtctctttcttaggacattttcctgtaaaatcatattattacctaatataaaattgttattcaagtttccccgggtatcatcatatggttgtttctgtaaaaaattcaagattctattgtacttagtagtcatgcctcttcaacctccttttatttagaagagttcaccaaacatttttgccttaggattgccattaagatttttgaagagttcagttctgttgttttgcagaatgttcttcaacttagatttatctggtagactcctcttgattagatacaggttaaaggttatagacagaagcactttggatggaattatttgctctcattgatttatttcaggaggaaaataatgttagtttatcccttcaatggtgataagagatgaatttttttggtcaagatggtgttcgcaagtttcctaaattgtaaggttaccttttccttttgtaattaataagccatttgtgggtgatatgttatgactgtctgaatattatgttctgtagtgatctttcatctaatgcttttagtgctgctgattcttaccttaatcaatcattactgtagaggttttaaaatagtgattttctgttccttgtattctacatttattaactggatttcttttgaaaagaagaaattcttcttttccttttcttcttattatcagtgtggagttttgaattctttctttattcagtcattattcattcctgtcattattcattttaatgctcaaattgtactaactttggctagtgggaaccacttaattcttctgggttagtagaatggtagcaaaaataagctttctctagtatttaacatttgaatcagttttgtagcctcgtaatccatagcgactaatgtatgtactatctgttggaccctctgtcttttgtttgcttttgatgacccttctgtgatatttttcagcaaatcactgaattgaagaaagaaaactttaacctaaagctccgcatctatttccttgaggaa

SEQ ID NO: 134820 - DNA, 1234 bp, Homo sapiens
tctgccttaccattgaaaactgagcttgaacagtgactttgagaatggaaagagaacaacagatgcatgaactataatgtggacagacacactgcatttagtaaatatcatcagcactcgcttcacaattcagagtctcaaaaaaagattgcatttatctattatttaaatttatttcatttatgggaaatttatatggtacaaatatacagtgtacttctttatgcctactgtcatatcaagtaaataattatgtattcatatcccctgcccttttaaaaaatagtaacctatctatataatgtcccatactgtagtgtttttatttaacaatgtatcttggacttaatttcctatgagtgcacaatgtggtctctcattcttctttatggttctatcatattctattgagttaacatactataatttacttaaccatggatgaattgacttttaataattcatattaactatagactagtagactatttgactttaaaaactttaaaaaatgaggccaagtgtgatggcttgcacctataatcccagcactttgggaggcttaggtgagaggaatccttgagcctaggagtttgaggctgcagtgagctgcgattataccacttcattccaacctgggtgatagagcaagacatcatctttaaaaaataaaaaaataaataaactttaaaagaaatgtaacatacatgcaggcatacccacaaatcatatgtgaacagtttaatgaattatcaaaaaaggagcataccctataaccatcaccaaagccaagacatggtacattatcagtgccctagaagtttgctttgtggctcattccaagcactatgcacttttcctccccaaaggtaaccatcatcctggactaatttaaagtcccttcctagcttgtgtttctgtcactctctttataacagggtaacgagaggaattttttttcccacaaaggcagagacttaaaaatgtatgaaacagagagggagaaactggggatgttggtaggattttggagaacatttagctatttaaacatggtgatagaagcatactaggaattgctttactgtgtaggctaatatctgttcttgaagttaagttagactgcacagaaaagtttactggatgaaccaaaccaaaaaaaaatcaggaattttctctataggcagtgaggctgaattgacagatcatagttactggagtcagacagaagtat

SEQ ID NO: 134821 - DNA, 1037 bp, Homo sapiens
ataaaattgtatttatgggccgggtgtggtgggtcacacctgtaatcccagcacgttgggaggctgaggcgagtggatcgcctgaggtcaggagttcaagaccagcctggccaacatggtgaaaccccatctctactaaaaataaaaaaattagatgggcgtggtgacacccacctgtaatcccagctacttgggagactgaggcaggagaatcgcttgaacccgggaggcggaggttgcagtgagctgagattgcaccactgcactccagcctgggtgacagagcgagactctgtctcaaaaaaaaaaaaaagtatttactaaaaagaatatgatatgctattaaaaattattttttaaaacgctgaaaaaaatacgtgatgagtgtttatgtgtgaagatgtactagcgtccaagtgtagcttttcacattttgccctatttcattttagttattttaaaaatcagctttattgagatataatttacataaaataaaatgcaccaattttaggtgttggatgaactctgacagatgtatattcccttgtaatcactattgtaatctatatgtatgtatgtgtggttatagttttttatatgtgtgtgcagttcttggcacgtgtaatgatcaccacaatcagaatatagaacagttccgtaatatcaacaacttcccttttttttgcttctttgtggtcaaatcctctcttcaccccaagcctgtggcaactaatgccctgttctctgtccttgtaattttgcttttcccagaatgtcgtataaatggaatcatacagtatgtaatcttttcagactgtcttctttgcctcagcataatgtctttgaattttatttacgttgtgtgtttcatagttgctgagcactattctgtcatatggatgtctactgtttatccattcaccctctgagggacgtaagagtttctcccagcttttggtgattattaataaagctgcagtaaacatttatgtacaggttttttgtgtgaacataggttttcatgtctctaggat

SEQ ID NO: 134822 - DNA, 1052 bp, Homo sapiens
ccaggttcatgcccttctcctgcctcagcctcccgcttggctaggactacaggcacccgccaccatgcttggctgattttttgtatttttagtagagacggggtttcatcgtgttagccagatggtctcgatctcctgacctcgtgatccacccgcctcggcctcccaaagtgctaggattacaggcgtgagccaccgtgcccggcctcaatgttttaaattcttatgttttactagcaactatattaaacattctaattaatttcttttaattcttagactagctttttgagatggttataataatcccttttttatagatggaggaactgaggcatgtaggaaaagtgaacttcattaaggccatacagctagtaaagtggtctggattgtatttattcattaatttgttcactcatttaacaatttgttgaacgtctactgtgttctagatacttgttaaaaccttggaggaaacagccatgaaagattaagtggattatattcatgtaataaacatgataataataaacatgcaaagagatgaaacatatacagattgtgaaaaattctagcaagaaagtaagagctatgtattagagagtgagctggttgggttcatagagatggggcccactttagatggtgtagttggagaggccctccccaaggcagtgacattggagctgaggtggaagggatgagatcgagccaccctggcagacgcgtcagaaagagctttgtaggcagacaagggcttggcttatttcaggactggaaaggaggccagtgaggctggaatattgtgaacaggggagaagatgatacctgatgtggttggagaggtggacaggggccagatgatacagcactttgtggctgtggcagggagttttattctaagaatgatggaaaaaagagctaatagagggtttaaccagggagtgatgtataccagatcggtctgaagtctaagggggctcttgttacatcacactgccttaaagaaattctttttttttttttttttttttttttttttgagacggagt

SEQ ID NO: 134823 - DNA, 2794 bp, Homo sapiens
agtacatatcaggacagtctgctttgcaaaatgcctgatgtgtttgctgggttcatcctctgatgtgcacattgttactttggggttagtttaagtaatttgtaaattaatggtttagagctttccctggagcaaaatcagtaaatcacaaaagacagcaagtaccagccgcgtgtactgtggaagcagttcgtgttgttttcctctctgtgctctattccccaataggaacactgggcagtttgcatgctgtgacgttttcctctattttacctttttacagtgctcccaaatgtgtcagaagaaacagtgtctcccaccagagcacggaacatgaaggactttgaaaatgtaagtggaaataccaaattactgcccccaacaaattgtgtctgctgccactgtccagccagacccaggaaagctgtgtttcttgagatctaagttcggtgatgccagaggcaggggggtgccatgtctcatggacatcttctgtgagacttttacgtacaaatgcagtcagccctttatacaagggccaaatataggttctgacgggatcagcagttttcaactttgggtgaaacttttggttttcaactttggttttcaggtttggtgtctttctggtgtcctaaaggtgaggatgttcgcatgttgcacagttgaggggagctaacatttgtcaaaggccttactgttactataaggcatgttatttatggtcccctatttgatgctcactgcaacctttgagatattttgtatcattcccattttgcaggttaggaatcttaagactaggagagagttgtttatggtcatataatacataagtgtcagagttgggatttgaatccaggtttttattaattccaaagccattattctttccactgcattgtgcctccccttgcattttgaagactttatctttgctgttgaatgaaatgtgagtagcctgtacctagtactgtgtagtttctttctgagaatggattacttggtgatggatttggcttcaatgcttgatgtcttccagcattgtgtctttcatttattagcagagggggtttgttgtcaagtaacaggaaaataaggttattttcccaattccagttctctttaacaagttacctgttcagtgctctcatttatcatgggaagaattagacccttcttcatttgtaagcaaatgaaatccatactatgcaagacacaagagatacttaacagagagaagatggaggacacagagagaaggacattccacaattatgtttctttctccccagttgtctttacagaacagagcagtgctgtctctggatttaatttagaatgctcattactgctaatagttatctgcaaaccaccagtgaccaattgaagaaatgacttgtcagatctctaatggaaacaagtaatttctgagctttgggttgttataatttcagctgtacaactcgatctatgctgtggggtctggggcctcaaacgaatgagatttgattattctacatcgtgtataattaaaatatgctctactattaaatggttgttcctgttttatcataagagtaataacagctactgtttattgagctcttgctctgagctgggtactttaagtgctaagctctttgtatatgttactttaatattaaagcggctctgcaagatagttatttcatttttgaagggcactgttttacattttatttctaaattggaaaatttcacagaatattagaattttggtttcacatcttttatctgcttattgaactgaaaggaatcctagaattgaacacaaccctctttattatatataggagaaactgaggcccagggatgtgatgtgacaaaattgttctcagaggcagtctgtgctgcctaaggcccattggcttctggagccaggctgcttgtttgtccacttctcctgggtgccctgtggccggtcacttaacctctctgtacttccctcattttaacaatgggcatgataacagtacctacttcatagggttgttaggaggattgaatgagtgaatatttgcaaagcacagagtacattctatgtgtttgccatgactgcttcttccttttcttactgttattgttataattactgttatttttttccactctgccatgtgattcaagttccccttgttcagatgtgttcttgatgacctaaatcctgttttacttgaaggtgagggagagccttctatgccaacatgttttaggatttatgtttttttctttatgactgtagtcctttggttgctgttaggtttttatggcattaatattttttattgtagcattttcaagagcaaattctgcagccggaattgaaatggccacactgttcttgatgtctccctttcaggtctttatgaatcactgaaatttttcatttggcctgagttacaaaatgcatgatctgtatgtagtggtagtctgaactttctgtgggatgcttataggaaatgctcttggcacctaaagctaattttaagagcatgcatattaaggagggggctgagatactttgggtttaaagtggaaactcatgattcgtcctattctagtctcagatgattgatacctaaccatcaggagttgcatttagttgggagctggcaacacataggtcaccttctggttttcctcagagttcatccatttaataaacattttttaatatatgccactgtgccaggctctctgccagggggaatctgcagtggattaagaccaggtaagtccccctgtccagagg

SEQ ID NO: 134824 - DNA, 1286 bp, Homo sapiens
tttgaggattcctgagtggctgtattcatttccatctcccgcgtaaattaacggactagggcccgctttggccctcaacaaagatggcacccgccctcgcctctccctaagtgccctcacaaaaaatggcagccggcctttttttgtctcttatttttgcttggcttaagcacggatgctttgcccttagttaagatggcacctatccccgcttccctgcccgtcctctggcgccagccggtcggcttcactgcgtgcgcctccgtgaccccgcctcgtttccgtaggaagaagcgccgggaaagatggcggcgtctgtggtttgaattccagcggcgccgccagagtctgaacaagagctggggtggagggggcggggacctggggagcccggcgggtcgctatcgcggggggtactagtggcgccgccgccacagacaccaacgctgtcgccacctctgtagccatgatggacttggtgttggaagaggacgtcaccgtccctgggacgctcagcggctgcaggtgcggccggggcattggtggtcgtggtaaccgggccggggttccagctggtgggatttcgttctaacgcggccttggggtttgctcttgagggtgtctggccaggggcagtgtgtggggtgggttccttcggagagggtctctggggggcccaccacctgacactctggagggctgggagccgcgacctgcaccacaattgccagtagcattgcgccatgtactttgtagagcgtgtgaagaacaggtaaggagttttctgaaagagtaggacgagggtggggccacttggagtatcccgttagtggggattggtggagaacagggaccttgagggcacctgatggttccttctggtttgagagtttgttttcattatggagagagtgtagccggtatgcccagactttgctttttgggtcacatagtggccacccaggaggcaatggagtgcaatgattaagaaccttggctagagttggacaaaactggattcaaatccagccctgtaaactgactagctgtgtgaccttggtaaagtgatttcaccggctttcccatctgtaaaatgggctagtaatatccacccaacagagttggggtgaggattaaaagaggtgatgcctgtcgagccatttgcttggcaggtgtagtgcctgccacataatcagtgcttaaaaaatgatcttgtgttgccattagtgtcattattactactgtcatcaaaggtgatatgaatcagggaataatggccaagagtg

SEQ ID NO: 134825 - DNA, 1026 bp, Homo sapiens
atccctttataggagacccctaagttgttctcagggtttggagatgatgttctggagggagtacaagcaaataatctacttctggtaatctgagggtgctttgcgtatttggccattgctcagaagaatagaggttacattatattacattatatgaaaattatttagtttttctatagccctttgtagtttgcaaagcacttttccatatgtgtgtcctctcttccacaccatagccccctgaggaagtaattgttgtccccattttatagatgaaaaggctgaggcacagaggagctaaatatcttgttcaaggctatacaatgtgtgtgattattaggcttggaatcagggcctctaactctaaagcacatgttttttcaactatatgcagaaattgcctagccatggacacaagaaagctgggaggaagagttctacttgtggatgtttttaattttttttaaatatcaggagcaatccagggccatacagctatgaagcacttagtgaaaagaacacaagaagatttactaactgaagttagtattagtgattagaaaacaaaactgccagtttgtgcttcattaaggtgaactcatctctccaagcaggaagggaaaatttgctttccctagcagttgctgcatatgtgtgtacagactgcacaattctaagaaattgtgcaaaatggcatacctgtctttctcccagatacaccgccccctgccccccccaaaaaaggtcaggattaaaggtggtgagaagtgaacatttattaaacagaagttaaaccaatagagagaaaggaggtttgttggagtctaagaggattttgaccatgtagaaattccttgaaacagaccttaaaaggtattgaaaaattgaatcacaaagaaagtttacctttaaatacttgttaatggctcctagatcatggttataatttttctcaatgggaaaaaaagtcttaaaatttgttttaaataagatcctctaatgtctcgagctttttgattctggaaa

SEQ ID NO: 134826 - DNA, 1037 bp, Homo sapiens
attttgacagcatctgtagaaagtgccaatgtcacggccatgtggacccagttaaaactccaaagatttgtaagcccgagagtggtgagtgcatcaactgcctccataacaccactgggttttggtgtgagaactgcctagaaggttatgttcacgacctcgagggaaattgcatcaagaaaggtaaaacttcacctaagtgattgtaaatttaatatctaaaactagcagtgaaaaatggaaggctttgtaaaaccttctaaccctaccagaggagtttctggaaatagattttgatagatatttgcctaaagaggtttccttccattcctgctgctcttctgacactccacagtcaactccagaaatttgaggaccaagacaaagtcattgcgacagtgagacaaaatgttctcacatttttctcttcatctatttttatttttatgttaataatttaagaatcctatcatttcttttattctttgcttcctttattctcatcactttgagggatcatcaaaggtcttttgaagtagggacatctaatctggttagaagttccagctgagaagctggagttcattctagcatctgtcctaactttgggcctaagtttccccatgtacaatggaggaaataataatattccttttgaattttaaaagcaaaagttatccacatggcaaaatatttcttataggaaagctcagtaattaaaattaatgattatgaattcaggatgagttaggatattgagggtttattaggtcacagagagattggaccatgctgttctacaaaccactctttgatattcttaacatgctgaacacgaggctgatgaacagttggtctatggcaactgtcatctttctgccattttcttgatatctttatactgtagtgatcaaggcaaaaagattcagattgaaccctattactagctagagatcctgctactcagttctcttacctatttgggaggcacactttgtccatagttagctgacagaactgatgatttttcttattag

SEQ ID NO: 134827 - DNA, 1042 bp, Homo sapiens
cctcggcaagttaatgcaggaacagaaaaccaaataccacatgttctcacttataagtgggatctaaacattgagtacacatggacataaagatgggaacagtagacactggggactactagaagggggagggtgggcggggggtaaagggttgaaaaactacctattgggtactacctgggtgatgggatcattcatacaccagacctcagcaacacagtttactcatgtaaccaacctgcatatgtagcccctgaaaaaagtcgataaaagtctaaagaagaataataaaattttaaaaaagattaagtacatggaaaatattaaatggactgaaatgaaaataaatattgcgcttagaagtcatcaagagttaatgaagaaagcacacatagactttggagccagattatgcaatcattaaacaaagtttgcatgcctatcacatgccaggcactgtgctaggcactgggaatatagcagaggaaaaaacacataaaacccccctgattccacagaactgacattctagatgggaagagagataataaacaagaaaataaaatttatggtatattaaatagtaagaaatattacaatttcagatagtgtggctaggcaagatatgttgagaatatgacattagaataaggaacaaaaagaagtaatagagcatgccatgcggatcccctgtggaaaagtattgccaatagagagaacagcaagtagagtccctgatgcaggaagatgcctgatgtatttgagcaacagcaaagtcattgtggctgaagtggtataaattgggaacaggagttagggggtagtatgtaaagcaaaatatatacacagatatccagaataccattcttttgatttatctatattttccaaagtttttatacagaaacattggagagaggtaaagctatagtaatctagacagggtggtattggttcaggataaacaaatagataaaaaagaaagcccagaagtaaatcatatgtataaagacatttgatatatggcagaggaggtactaaa

SEQ ID NO: 134828 - DNA, 1051 bp, Homo sapiens
tggaagtttataaactggtatttggtggaagttttaacactggctcttataagagctaaaccccgtgtgaggaaagttgctgtaacaacatcatagcacctttgcttcaacttcaaaagaaaaaaaggctatggtaaaaagctttaataacagacaatgtgatttcataggcaaccaattagcagattaatggatcatttaactttctttacttaaaaccaatactccactcaagaaagatgaacccaaaatgcatcctctaacactgaccaacataactaagtacaaatgaagtcaatggtgtaccccattagcatgctgcgttgtatgtcaataaaacaagccctcccccaccccgagccctggcccctggcaaaacatagataaatgattgtgcactgcgtgatgataccattaggtgagaactttggttcatgcagtcggctgccgcagaggttgcacccaaaacccgcagccccggcacccaaagtcagtcagcggtggtggctcatggtgtcagccgtgctccttccacaacaccaggtgaatactgtggtcaggcatgctggtggcaaagaccaagcccgtgtcattgtgcccatccagtccattcagccaggatgcttcgcctgccaggaagcttgagcctctctttgatttcctgtactctggcagaggccagcgactaatcaggctctctgtccgcaagtccatgatgtacaggtagcggttgtcaaacagcagggcaaagatatctccaaagccaagcaaggccaagtttgctatctcaggagtcttgatgaccctacaaggatgagagttagggactgtgaaagaaggcaaccttgcttctgtttatgctactgtaatcttttctggagatatttaaaaccaatattaaattcaagcaaatttagagttaaatgtttttgataaaaagtaaaatataaggagaaaagctcagcccacttataaaaaagccgggagcgggagaggtgcgttcagtcattatataatattggcatggaagggaaaggtggtgtttgatcaa

SEQ ID NO: 134829 - DNA, 1050 bp, Homo sapiens
ccaagtgactaaagtgctactctactcagcaggcagcaaacaaatgggtttctctctaaaaacagtaaaggctgaaaatatttaaagtttcccaaataacttagaaacatttattaataatagattcataaaaagttattatgaaaaaaactagggaagaaacaactaggggaagcagagaaaagtagggagttgggaggacagccctaactttctcagaggcagtttccaagacatcaatgacaaaggctaggagacacctagctaaacagcagcacaaaggaaaacaaaaaacaacttagcttctgttgtctgcgcccttagtgaagcaaaagattaacaagaaaagctgatgtcctctttggaggaactaagagctgagctaccagacaagcagtagacaaatactgctctgtgacatatggtggggctcctgtgggaggagagtttagcctaggttttaaggacaccaccaaactagtataggttcaagagagcaaccagaatgggaggacctggagaccaggacaaggaagaacagctgaaggctatcagctgagatggggaaggaaagagttggcaggcatagggtaactgtatatgaggatcacttctgaatagtgaaagatgtgtaagagacagcccagacattataagctttagaagacagaactaggatcagaggcaaagagttacaaaggagccaatttcagtctcatatcaggaaggatgggggacattcaatatttatcaagcatttacatgtgcaaggcaccgaacttcataattaacatgttatcttttttaattatttttatttatttatttattgagatggagtctcgctctgtcaccaggctggagtgcagtggcgtgatctcggctcactgcaacttccacctcccggattcaagcgattctcgtgcctcagcctcccgagtagctgggattacagatgcccgccaccacgcccagctaatttttgtatttttagtagagatgaggttttaccatgttggcgagatggtctcgatctcaaccttgtgttcc

SEQ ID NO: 134830 - DNA, 1008 bp, Homo sapiens
ttgtatttttagtagagacagggtttcaccatgttggccaggctggtcttgaactcctgacctcaggtgatccacctgcctaggcctcccaaagtgctgggattacaggcgcgagccaccgtgcctggcccattattggatcttttatactgtcccgtgtgataggcattatcttcattgcaggagctggagttaagagagattaaataatttacccaagattgcacaggagaattaagacttgaacctgtgattcttggctataaaacctggggtctttccagtatacttcactttctatctgacttcacaaatgcagaccattttaaggacaagcttttctgtagtgatgtgatctctcatctttcctcattttcttttttctgtagatttggccaattgggagagaaatcaactgtaagtgcttaaagacattgtctgtctctgaggatagaagtatctgcctgcagccaagacttcattttgatggcaaatacattgtctgtagttcagcacttggtctctaccagtgggactttgccagttatgatattctcaggtaatgtttccttcgacctcacgctttacctttgaaagcctgctgcagttcagtagtaaagacaagactaaatgtttggatgtaccagtcagtagctggcttttaggaaatgtatactgtatcacttgtaaacagggttatatatactgaacatctcagacaggaaaaatattttagaggaagtaagcaaatgaaaaagagttacgtactggaacgtccgctgcctgactgtgagtcatgagccacttctttcagatttaacatgcttttctggaaaatgaggggcatggatgaaaagatctttcagatctccataagttctaatattttaagtcctatttcatattctgttgaaattctgcattgttttacaaacttggtaaactttagtggtatctagggatcaagtgaccttctgttgactagtagaaagacagagacttagagaa

SEQ ID NO: 134831 - DNA, 1104 bp, Homo sapiens
cgtggtggctcatgcctgtaattccagcattttgggaggtcaaggcaggcggatcacaaggtcaggagttcgagaccagcctggccaatatggtgaactcccatctctactaaaaatacaaaaattagctgggcctggtagcaggcgcctgtagtcccagctactcggtaggctgaggcaggagaatcacttgaacccagggggcggaggttgcagtgagccaatattgtgccactgcactccaacctgggcaacagagcgagactgtctcaaaaaaaaaccaacaacaaaaattaagaataagctgaacataaatttatgtgaatttctttttcatttacaaatccaagttaagaaactacacaggacatagagctagcaaatcatctcttcttccggtgggtttaaaatggcttggactaagacactccccctcctcttcctagaatgttcaccctttgccataccactttcattttcttatgttttccagtttttctttaatgaagcaaattaatggagaaaaaaactcaccttaatctcatatttgtctgcacttaagaggatgtagtctccaggactgtgcaagagagacttgactttgcacttctgcaaaactacctgcaaatgtaaaccatgttacggaaagatccttttaatgctgctcctataatgattttattctttaaattaaaatacaaaaatgagcttaacatatgctagaatagctaagccataactccattaccaaattaacctctactaaaagttttactacaatattctctgttattagcagtatctaaaagtgtctaacgttagccagatgaggtgggtcacgcctataatcccagtgactcggaaggctgaggtgggaggattgcttgagcccaggagttggaggatgcagtgagctatgattgcaccactgcactccaacctgggcaacagagcaagaccacaacgcttaaaaaaaaaaaaaaacagtctaaacattggcagcatttaatcttagcattcgtctagaagcaaacattaggactgattttttaaaattataaaatgtaacttaagagagggaacagaaaagaaaaaagcccgtag

SEQ ID NO: 134832 - DNA, 1045 bp, Homo sapiens
agattacaggcgtgagccaccgtgcccagctgctaattaaaaaaaattttttgtgtgtggagatgggggtcttgctgtgttgcccaggctggtcttgaactcctggcctcaagcagtcctccctcctcggcctctcaaagtgctgggattataggcatgagccactgtgcctagcccatgttaactttttacatggaaaagctatatagtgtaaggcagtttggtgttgtggaaaatagttgattggggctaggacactgacggtgatgtcttggacaagttactccaccttcaggacctgagctgtgtcatctgctaaatgttcctgtgaacacgaaatgaaatgttgggacagcacccagcaaggtgcctgatacttagtaataggtctgtttcagttgagtctgcaatccagacttctgaatgagtgaaccctgcttcccctctcaccttagcctgattgattgcaaaaatagctagaacctgatgtttatatacttatctcaagtgctaacagaatgttagcttttattttgttactactataatttacattgttactttatctttactgtaattaaatgaggtaagataataggtgcttgtctcctgttttaaagatcaagaaactgaccgagtttagatggtcttgtccaaggttgcaaagtcagcatatggcagattctggtcccaagtccagtgctttttcatttatgattcacatagttatgaaagcagatcatttgcatctacgtcagtgtctacgggcttttttcttttctgttccctctcttaagttacattttataattttaaaaaatcagtcctaatgtttgcttctagacgaatgctaagattaaatgctgccaatgtttagactgtttttttttttttttaagcgttgtggtcttgctctgttgcccaggttggagtgcagtggtgcaatcatagctcactgcatcctccaactcctgggctcaagcaatcctcccacctcagccttccgagtcactgggattataggcgtgacccacctcatctggct

SEQ ID NO: 134833 - DNA, 1031 bp, Homo sapiens
atcttggctcactgcaacctccgcctccccagcttcaagttaattcccctgtctcagcctcctgagtagctgggattacgcctggctgatttttgtactttcagtagcgacggagtttcaccatgttggccaggctggcctcgaactcctgggctcaggtgatccgcccgccttggcctcccaaagtgctgggattacacatgtaagcctctgtgcctggccctagactgtcttatagaacactgtactgttccttcacaaaacttaacacaatttgaaatgatatatttacccatgaaattgtttaataaaactatttctcctattagactatcatccacagggtaaggactgggtctattttgcttactcctgttttctcagccccctcatagaatgggatggtaaactcaagaaaagtgcttctgcgtggtatatccattattaatactgcatttgatcctcacaacaatcttgttttttttaaaaaagaaaacattacaatattttactaaagatcctgtacagttttctttgtcctacttcttgtaagcgttattttttcaaaatgaaaattgcttttctgattaagaaagaaacatgtttattctaaagggaaaaacacgcccacaatcccaccagaaatacccaccttcaacattttgatgcatgaacacattcagaaaccggtatcacactctacatatttttttgtatgtaatctgttttatttgccccctctatccacctaatatattgtgggcaactttccatgtccataagtcatttatttgttaaaccatgtattaagtaccttctacttgctggtcactgttgtgtaccattatgctttgtaggtacagcaattccatcttatgactcacctaacacttataaggcagtgtctaccatcctccacgccctccctcaaaaagcctgataagcaggagacttcttccaagtcttcctaccttggtgacccattccgtgtgcccggtgagtgtgttcaggcatgtcccagcagataaagc

SEQ ID NO: 134834 - DNA, 2176 bp, Homo sapiens
gctatttcccagcctcttgtgttgagcagctcccttcctttcccccatttacccactgctttagcctctgagaatcatagtctgtaatgtcaagcattacgtttatgagcagccttccaaaactcccttaacaggttgcgtccctctatttcccagtaacttgtattactgtagaccgctcatcatacaaatataatcttgcttccccaccagactaaactccataaggacagtgatcttatctgtcttgttcacccatgtgactggagttacttgcactgtacctggtgcttagtgattctttgaagtaaaactagccgttaggctaataaaaacacgtattttttgcttcattttatttgtcctcctatatactcttcttcagtctttgctgtctgctaccacttgttagaaattaatatttgaaggtgcatgtatgcatggaagtatatgttaaattgagtgttatgttccacaatgttaagatgtaccatgacttccaggtgattttattcctgatcaactttgagaaccctgctctaaaaatttttattactgttgcctagacattgctgaggtttttcttaacttcatacctttactattccctctgcttgcagtattcttttttctttccttgataaactctgctcatcctttagggcccatctccaatatcgcctcttccctgaagtcctccctgatacccctgggcagagttagtcattctccttgatgtttccctagcaagaggtaaacatttatttttttctgggcttcctcctccactccctacttagattgagttccttaaaggaagaatcagtgtcttcatctctgggtccctaatgttcctttagaactggtatacatttgaaaacaaatatttgagtacacactatacagcttacactgtttttggcgctggggatacagctgtgaagaaattcagacacttttgagttaatggcttaatctaacctttgagatccttgtttttgttttgttttttctctctttacattgggttttcttgagtctgggtgctgttttgcagcttccattctttatattttgtcttactgttagtgtgtatcagagtaggaccatgtacgttttgttttcctgcataaattagataaagtattgtgtagtgtcaggcaggcagtcctaagaaggaatgccattatctccaacatttgttttgcctctcactgtagctaccacaaataaaagagattgtattattcctaggactttccaccttagaataataagctataatagtaagaattttgaaatagttttatcagaaaattgctagttgaatagcatcattcttacggtgtctctggttgggaaattatataattggggaaaataaacattattgaactctattataaaagacccactgacagagacatgttttaactttgtgtaattatatgcactagtatttagcgtggactacaatgatgaactggatatcttggtgagcggctctgcagacttcactgtgaaagtatgggctttatctgctgggacatgcctgaacacactcaccgggcacacggaatgggtcaccaaggtaggaagacttggaagaagtctcctgcttatcaggctttttgagggagggcgtggaggatggtagacactgccttataagtgttaggtgagtcataagatggaattgctgtacctacaaagcataatggtacacaacagtgaccagcaagtagaaggtacttaatacatggtttaacaaataaatgacttatggacatggaaagttgcccacaatatattaggtggatagagggggcaaataaaacagattacatacaaaaaaatatgtagagtgtgataccggtttctgaatgtgttcatgcatcaaaatgttgaaggtgggtatttctggtgggattgtgggcgtgtttttccctttagaataaacatgtttctttcttaatcagaaaagcaattttcattttgaaaaaataacgcttacaagaagtaggacaaagaaaactgtacaggatctttagtaaaatattgtaatgttttcttttttaaaaaaaacaagattgttgtgaggatcaaatgcagtattaataatggatataccacgcagaagcacttttcttgagtttaccatcccattctatgaggg

SEQ ID NO: 134835 - DNA, 1515 bp, Homo sapiens
agtggttcttgactgaaggtagaattgtggctggctttagtcatttcagctttttaaaaactggtcatttggtgctttcctaggatactgtgccattatcatagtgactgtatttagtggattctcaaaaatgtctttttatttgttgaggcttattgaagggtcattgtaagaatgaattaatcattaggattttaaacttaaagcaaagtcctgaattgtcaccatgattagtatagaattttcatcagaggcagaaataaagccaacttttcccttcagaatcttaagaggctttacaaactttttgttgagttgtgaatatctggggataatttatcccaggttttccttgaggtttcttccttcacgtatttcaagatgactggagcaattagcagttagcttttgcagaagttagcccaggctctgaggtttgtccttgacttgccttagagtggaatatatttcagcaaacacctttactatttaacaatccttatttgttcagaactgttgggtaatggacaagcatgcaagtgtaaacatgcagtcatgtgtaatacctatttatttgaagtcaaatcagagagctcgtgatagccaaggatttatgaaatttttcaagtggaagcaccaagggatgcttttagtctaatgaccttctgtagcctgaaaagttaagggaaagtgtctcacccaaaaagcttggattctgtcctagtgcttttgactccgttttggtgactctaagcaagttgtgttactctctccgtgctttgatttcttcagtggtaaagtaaagtgctagaggaagggaccgttaatgttcttgaagaacaccatgattttgggattgattttccttctttagtgtgtttgttttcttattaacctccctgtttttctcttgaagggtcagatgacttgtctgcaaagctgtgggatgtgagcacagggcagtgcgtttatggcatccagacccacacttgtgcagcggtgaagtttgatgaacagaagcttgtgacaggctcctttgacaacactgtggcttgctgggaatggagttccggagccaggacccagcactttcgggggcacacgggggcgggtgggttgccctttttcaagggtttttacaacttagcctcatccttttaagccaggagccaagaatgtgaaatgcttttttttttttaatttaacctgcttttttcaaccctctttcttagtcattgcagttatttccctttattctagttactcttatttcgaatgttttacccagttttgctttttcttgctttcttctatgtgtgtacccttctggtgggaagggtagttttcattctctctctgtttctctctctctctctcattctctctctcccccctcctgtttcatttatatcctattgaacagacagtcccttggcttttatcagattccatacctctgaactgagtaaatcctacttgtgtaaattccactttatttgtagcattagggctgaa

SEQ ID NO: 134836 - DNA, 1039 bp, Homo sapiens
aactgcagttacttggagtggaagtaaatgggaaatattcactgaattctctaactacctggaaagttaatatctacaattctacattttaagattattctcttggtgggtctgtatgttaatgtgatttttattctgattaaattcatcaggtttgcatatttaaaattacgctgtgcagtggttgaaaatgatccaaagtattagtttaatttttctaacagcagcatccctggaactgtgaagagaggtatttgtgacagaattgtacatgtgtttgtgtcatcttgttacttaagagattgaattctcattgtggtggaattgggaaaccctgaatttggcaataaacttagtgactctcacattagtgccttgagtaagcaatagacagttttattgaagagattaatggctaatgacattgaggtagttatctttctctttcgcaatttatttctgaaatggtaagaaaggaatctattatgctttgtgctgttcagtagatatttacttatgggatgcctactgtttgaaaaacaatgtgagggcatacacggatgaattagagcagttttttcttgtggaacatacacactgggaccaggaagatgacctgactgaggtaaaagtctctgtgtggactatagcaaatcaagaacacttgcctttctaaagagtgcagctggtgctccattgtaataaattattgccatgtgggtgggattcagggtcagagttgttagatctgacttcaagagaagcctgaaatctagagttctgtgcaatagtctgattttttttaaagtattattaagatttttaagatactgaatggggagggatttttttctttcgtgcagtgtgagagtccacatttctttagtcctctttcacctctatgctgcatcactggtgacctctttgaaaacatgttgggttagccagtgcagcaaatgggagtccagaggggaggctgacataaagccagaaaggagcagagaacagtgattcctaaaggattctcaggagtagactt

SEQ ID NO: 134837 - DNA, 1858 bp, Homo sapiens
aatataggcaaatcacataccttctctaacctgtagtttcctcatttgcaaagtgaagatgataatgtctattttctggtgttttataaacatcaggattattaatttgctttatttgtgcaggcctccaggacccctcatggctctcgggggcacgtggttaagagttgtcactagctcatatgaggtttagaaaaacagactaaagccacataagttcttttataattcatgttctaaacaggcagtgccataaagaagttggaagaaccagaattcctgaggcagataacttaccacacctgcttttcttccctaaaccttttcatctgaacatctgttgcaaaaccaagtagtcagttctatgattttggtgacaggttgtgcctgccatgacaatcagtgtctcaggttactgctcaggagactgtttctgattgtcacatcctggtgcttgcttttgtgattttagtacccaaatagaatgtattaaggaattcattaaggaaattgttttataatggttttgatgggggaagggtgtattgtaaaatatactgttttataatgaattgttggtaaatctattactatgaagatgcatgtagcacgtgctagacttcaagaggaataagtcacacacgccagtctgtttcactgacatgttttggattcatgatttgttaaagtatgttttctcaaatgtgttttcttttgtgtgcatggaaagtgttcagataaatatggtgtattaactgtaaagttgtaatgtaactacgcataaagttgtaatggcagattttttacactaatttttaatacttcatttgttagcagtcttgcttgaacagtctttttgagcagaactaatacaatattttgatgtgccacaggtaaatttttccataaccttatggagagaaaggactttgagacatggcttgataacatttctgttacatttctttctctgacggacttgcagaaaaatgaaactctggatcacctgattagtctgagtggggcagtccagctcaggcatctctccaataacctagagactctcctcaagcgggacttcctcaaactccttcccctggagctcagtttttatttgttaaaatggctcgatcctcagactttactcacatgctgcctcgtctctaaacagtggaataaggtgataagtgcctgtacagaggtgtggcagactgcatgtaaaaatttgggctggcagatagatgattctgttcaggacgctttgcactggaagaaggtttatttgaaggctattttgagaatgaagcaactggaggaccatgaagcctttgaaacctcgtcattaattggacacagtgccagagtgtatgcactttactacaaagatggacttctctgtacaggtaagagatgttgaaactgctttttgggttttgttttgtatttcatagggtgtaatcttgaaccagtcttgagctttgagaatgacaagtgttgattatatgagatatgtacagtgactttttttctctaatcctgagtggttccccccccttatcctcttccttctctctagagaacacaatcatttttataaaattttatgagaaaaacacttcagactgtcttttaaacattatgtgaattacaaagctatagattactttttctttgtgtttcctccatgtgtagtcctctgttgctaaattctgtttctttttctgttggcactgatatttgaggaaaaaaacagtggaaaaattggtatctaatcctagcaagtagttagatcattatggccaaattacttaacctctctgtatctttaaaatatgggaaaggaggtcgggcgcagtgg

SEQ ID NO: 134838 - DNA, 2176 bp, Homo sapiens
gccacagctccctctcctccgtaaaatgaggataataagaaaaactactgcagagctggtgcaagatcagattggaggagggacataagcgcgctgtgcaaacctggatgtacggtacgaaaggaacctccgttctaggttgcacccagcctaagcaccgtgagggccgcgcggcacgcgttcagcttcccgggacgctcttctccccacccctactcccggcctccagcctcccaccacccacctccgggcggggaccggaagtgcagccgcttccgccgggagccgcggagctgagggacgcgcggagatgacgcaggcagcaccggaagccgctcccctgtgaggctgcggaccgggagcagcggccgcaggtccgggtctgtatgcgaggcggggccggtcggggaggggactcttaggcgcccgcggctctgctgacccgccgcgccttggctgtttttctttccctgcaggcgccatggctgcggagcggacccggccgctgcaaggctctggcggtccgagcgtgcctagtagctgtgaacccggcgcgaggtcccgggccccggggcgctcgctcaggtcagtgccgcgcggaacacgattccgagagcaagggacctgggagcaacgaatgggttgatgggatctggattttagagacgggaaaacagggttttggagttactgcctcctactgcctccatttccttagctgcgaaatgagttaacagtgatgtcccagggctaccaaacgtttgaaagacgatgaagtgtgatgaggtggtttatgaagtacaaagcgctatactgcgccataattgtgggtatgccatgaaaacaggtgtgtatgtggggtgctgcttgaagtaaagcaaagataacaatattaatgctaagtaataatggtaactgacatttactgtaggcttacagcgtgccgagtactgtgctaaacgctttacttgcactgtcttgtttaaccctcataaaaacccttgtaggtaatgctcttggctgtattttacaagtgaggaaacagggcatgagacaggtgaagtgatttgcccaaggtcacccagcaacaagtggagttgcagaacacatattttataaacattatttgtattctttcaaagctttaaaaaaattcaccttaaaactaaaggctattttttgatagtatattatacttaacatggttttcagttttaaaaggtatacaataaaaagggacccctcattcctattctgcagctctccagttctctctggaggcaaccagggttatcagtttcttgaatattcagaatacattttatgcatatgtaagtttataggtgtgtatacattttcagcgcctctgtgctctttgtttgataagaaaagggggaaatgaagcctccttccctctaccactaacaattatgttgctttcactcttgactaggccaggttctgatagaggaggaggggaaaacacatttacactgttttccagaaggtcctgtctctaatacctctgagtataggttttgggagaatgggtactgggcaaaatattgagcctgctacttcctgtgccattctgggaaggccactccacttcttgagccgtaaatttcctcattaatgttagttaagggcggcattactgataccttccatgaggttatgaagatgaaatgagataatgtttaccagtggtactttttctttaaaaccaatataaatatgtgagttgcctaggtaacatagggagttaatggcagaacctgagaccaaacccaggctctcattttccaatttaggagtctttttgttgcatgacccactttgtgattattgatactgaaggcaagagggcaagttgaatgttaactctggggtagggacgtagggtaagggggccaaacagcagggaatgtgggtagaataaggcacctactgggaaactagagcctccaataaacaggtgctcttctttataaaattaaacccctagtaagtttgagcccttgagtttttcttccaggtattttgaagagaaacttagtgataagatgatagggtcaaaagagatgttagtggtcatgtccattccacccttagtgtcacagaaatctttactgccaggtgttcatagtagtaaaactaacaaaaagtaccattt

SEQ ID NO: 134839 - DNA, 1049 bp, Homo sapiens
atgtttggatgcaatttcatctcttctgtacttaccagtaagtaggtagggaaataatgaaggacagtgggatatgtttgggagaataaatctgtatgaatcaacatgataaatgtgatgaagtaaatacaagaagataaccctcattatatgactagtgacatttttaatttaaaatggaatcatagagtgttagaactgaagagactctagagactgcttaatcaaccacattcaaagaaaactgggaaaggtctgggctggatttgagaaagagtcctccagacttagccagtttcacacaacaaattaatgacagagtgccatcagcactcaggtgtctgacttctaaataagtgcttttctccagatcagttaacttttgatgagattttccttttctttcctgtagcctgagcagcagactgatgaccttctgaggatgacagaatcctggttttcttctttatctcgggatccactggagctcttccgtggcattagtagtcagcccttccctgaactacactgtgctgccttaaaagtgtttacggtaggtattcacttccataggtccttctgggaccctgccagctcaacacttgagtacttaacagtgagccagagcctgtgccatctctggggatgcacaagtgcatagtatagtttctaccttctgctaccttagagactaagtaaggagacagatgtgtaaacagattgtttcagtaaaagatattaggtgctgtttgaggtttgaacaggatgctatgggatcacacagttaattccagactttttatctgccatcctctattaacctagccctggtcttcctaatccttatttcccgtgcagaaaataaggcttctggcacctaatgctccagtggtaccaaactgtttgttttgtgtctctggacctttgctggggtctccgtatctaacactcttccttaactttgcttcttaacctcttactcactcgtcaaggactaactccttgtcttcagcacactttgcccagattgacaaggttgagttaaacaa

SEQ ID NO: 134840 - DNA, 1029 bp, Homo sapiens
agaatgaataaataaattcaataaagctgcaggatacaaaatcagtgcataaaaatccgtagcatttctatacactaacagtgaactctgaaaaagtaatcaaagatacattcccatttacaatagcattcaaaaaaaattaaatatttatgaataaatttaaggaggtgaaagatctgtacactgaaaactataaaaactgatgaaggaaattgaagaagacacaaataaatggaaaggtatcctatgttcatggattggaaggattaatattattaaaatgttcatgctgcccaaagcactatatagattcagtgcattccctccaaaatttttaaatttaatgacatttttcacgaaagcagaaaaaataatttttaaatatacatatttcagaatacattgttcacaataaagatatatgattttttgtcagttaaaagttaatttttttaaaaagatacctatagcctcttattgaggtggaatctgttgctcttggagctacgtactgttgactttggttttctggaaacatcagtgctatttagaacattaggatatttttctttttgaatatcaacaaaaacataaataaaaatactagtaatgacatttacagtatgtttcacagattaatcacatctctgagtgggagtctttatctgttgtaggatctactcttgccattctattctgggttttggttgattagtctttcttgaacacttccagaaattggagatgtatgcctgccttaggtagcctagcttattttattaatgaacatatccatttaaaaatttcttcctggtaatgagtctaaacttgccttcctgtaatttgtatccactggtcctttttctttgttctccctcttgcatatgccagtacttcaatagctggtcccagctccattgacgccctctctcaggatcacacatcacaggtccttcagaatctcctaatggtctctctgatctccaggcaacacactactctaacctttctatgcttttctggcctgca

SEQ ID NO: 134841 - DNA, 1040 bp, Homo sapiens
gttatctttgtgtatataggttttgatttttcttatcttaaatgattttctgattgtcctgtgttctttaaacatggctgaatttattaaacccatatgagtaaatcagtcactagttacattgcttcagtgcatttgagtgtctcaacctaatgagacaattaattttgttaattattttttagcattgtatcaaattttgtgacatagaaaaaaacctgtaaatggtcagtcaaaacagtttaggatcaaccaccaactaaataaattttttagttattttctttgatcatggttggatatgagatgataccaaagaattattgttaatttcttaatatgtggcagtggcattataattgtgtaaggaaacatatgtgttttgtagagatgcatactaaagtatgcaggggtaaatggcagggtgactaggatttgctttaaaatagttcagcaaaaagtagggaaaagagatgaaataagtaaagcaaaatcttcataaccataaaatcaggttatgtgtatatgggggcttattgtattctcattacttttgtgtatgatatttcaaaataaaacacaaatttagaaaatattttaggaagcagctaggttatagtggaaacaatagtggacttcaaatcagaaggtcaagatttaaatctaaactctgcctataataacaatatgattacagagaagtcactgcaaatttctaggccttagggcttcatgtgaaaagaggagccaagattattgacctttcgaatgtgataagaagaattaaataagataacctgtatgagagcaatttataaactatgcaaatcctgtgcaaaatctccttgtttttgtccttctgacattttagagccacctgtatagaaatggtgacatcactggcatatactcatcatgggcgacaatatcttgctcaagaaggagtaattgaccaaatttctaatataattgttggggcagattcagaccctttctctagcttctatctgccaggtaaggaacactgatgcctatggaaa

SEQ ID NO: 134842 - DNA, 1006 bp, Homo sapiens
agggcaggagttcaagacaagcctggccaacatagcaaaaccccatcgctactaaaaatacaaaacaattagccaggtgtggtggtgcatgcctgtaatcccagctactggggaggctgaggcacgagaatcgcttgaactcaagaggcagaggttgcagtgagctgagatcacgccactgcactccagcctaggtgacagagtgagactctgtctcaaaaataataataataataatctgtgccaaagtaatttcttatgcgttcactgaagtttttctacttaaagagacaaataatggattttttaaaactcatttataaaaagtacctagtcctacatttaacttaaaatgagatctatcaggcgtagggctgatttgacctttttcttttttctgtgtttttttttttatttcagctaattatagagatttcttccgtgtcaccagaatctttaaactactgtaccacaagtggattggtaacccagctcctgagagagctgactggtgaggatgtgttggtcaggtgtgttgactgagttcttaaagtgaaatatcctcttttgaagggctgggaaacaaccttgggacatctgtgattttctctattagagactttgcccaggttgcaatctcatgactgatgtgtgtcctgaaggagggatctttagaaaattgttcaagttacatcgtgacaacatactggaacttgggaaagccccacatgacaattcagctactttcaagtgactctgttccatgtccctaggcctgtgtgctcttaaaaagttgcaatcatgtggtaactgccattttgaattactaatattttatcatattcatttattttggcattgttaaatagcaacactatggcatgatagaaaaaacatgggctaggccgggtgcggtggctcacgcctgtaatcccagcactttgggaggctgaggtgggcgattcatgaggtcaggagttcaagaccagcctggccaacatagtga

SEQ ID NO: 134843 - DNA, 1004 bp, Homo sapiens
atatatatatatatttacagtgcaatataattactatgatagagaagatattgaaaccagacttgaaaaaatttgtagtagtaataagaaatggcccttatttgtaccagctttgtactaagcactatgctaaaatactcacatatattatctttaattcttacagtaaactttgtatgttgttatcattaacctcatattgatggagcaattgatccaagaccacacagttaatagggtgcatgtttgaaatagaatcctctatagtctaattccatcttcagaacactttcttactttgcatgtcatgataccatactatgctgcttttccttctacctctcagtttcttctcagcctcctggctcattatcctccgttgaatctttaattgttggagttgatgaaaacagagttccaagccctgctttcacggtactctactcattcctaggcagttttactcacttatgatttcacttcccatcagtgatgatgcctctcagatgtaaacttccaactgagacctttcttctgagctcgaaccttcatgctcaactgcttactcactcttggccccttgggtatattctaggccactcaaactcatgctgaaatcaaattcctgatcttccttatccaccctatccccctaataaaaaataagacaacaaactggctgtgtctcacagtctgcttagttgggtattagaccttggctcattctgaggcctgttttccttgccacatatccattcggtcatcatattttgttgattttatttaaacccctgcatttctcttcattagtacagcttctaccaccctagactaacttactggtgtcactcacctgggctactatatttgcatccaaactggtctccactcatccatttttatcatccctagtctatcttctcatgcagtcagaatggtcttttaaaagtccaaatctgattgtgtcatttctctgcttaaaacccttcagtgtcttcctatat

SEQ ID NO: 134844 - DNA, 1601 bp, Homo sapiens
gcaacagagcgagactctgtctcaaaaaaaaaaaaaaaaaaaaaaggccaggtgcggtggcccaagcctgtaatcccagcattttgggaggccgaggcaggtggatcacctgaggtcaggagttcgagaccagcctggccaacatggtgaaacctcgtctctaaaaatacaaaaattatcccagcatggtggcaggcccctgtaatcccagctactcgggaggctgaggcaggagaattgcttgaacctgggaggtggaggttgcagtgagccaagatcaggccattgcactccagcctgggcgacagagcaaaactccacctcaaaaaaaaaaaaaaaaaaaaaaaagaagactagagtgcatatcttattcttctctgttgccccagcacaggcaatgcgcataataggtacttagcaaatgtttagtaggtgagtgaaagctgctgtttcaaaaagaagtctgtgtggaggagacgctgacgcaagcttcagctattattaggttgttacttcctacctgggcaggatatgaactaataagatttatgatgtctccttcagggaaaagactactttgtgtgtatccattctggagagattgctccaagctatggaaccggttcacgtggcccggaacctcagggttgacctgcagaggggactaattcaccctgatgattctgtaaaaatcctcactctttcccaggtatgaaattctactaggaaccgacattgaccacctgctctgggccaggttctgcactgggacagaaagatgaagaaagcacagtatttctctctctccttccctcttccttctccccctctcctctgctccctctttccccctaggaaatgtgtggtctattccaatgtgcatagctaactataacctgggagatacaagctaaagaaagaagttccattaagtaccatctaaatcattcattaatcagatactgactgagttccttttacatgccaggcatggtgccatatgctgttagagttaccaagataaacaaaactgattactttccttcaaggagctcctagtgtaaagaaaaagattcctatgtgttcaaatagctctctgccattttagattctttacactggatgaaccaaatgctattgtaaaggtcactaaaccaacaattaagacagtaactcttatcatcctggtaaccaaagcatccttgctatttgagtgaagagctgctgctaaggattatcttgttgaaatgttaggagctaaacagttactcagtagatactgaactactgtttttccttttctgtgtttattcagcaaaaaagggcgctgggcacagtggctcacgcctgtaatcccagcactttgggaagccaaggcaggcggatcacctgaggtcaggagttcaagaccagcctggccaacatggtgaaaccctgtctctacacaaatacagaaattagctgggcatgatggcaggtgcctgtaatcccagctactcaggagcctgaggtgggagaatcgtttgaacccaggaggcagaggttgtagtgagctgagatcgcgccactgcactccagcctgggcgaaagagtgagactcc

SEQ ID NO: 134845 - DNA, 1852 bp, Homo sapiens
tgaaaagattatgaaccactgaatcaacagtggatgatttcagagcgctttcttggctctgaccttctaagattccttccttttctgtaagtgttctccattcatgatgtctatcagttaacattatttgggtctgcctatgaaatgtctcttatttgtctcctctttaattcaagccctcattttttccctattgctaggtctgtagtgttagtctgacttctccttacctctgaaattccttttctagcaaattccttttctagcaaattccttcccaccttgtaaccccagtgagcatacatctcgagtcagctggtgctaatcttttccgtggtttcccattgcctgtagtgagtttttagaatgccatttgggccctttacagtatatttccatcctacttttccaacctcacttttttcctccactccacttcttttcatctgctccagctaccatgtggcacccttatttttccttaagcctgacttgcactttcctaactttactcataccagcctttctaactgaaatactttgctgtctgtccatattctgtccatccttttaggcccactaaagagccatctcctccaaaatatttttctcaattattccagttgcaaatgactgctccttagatctgctaaaggacattattgttatttctgttaatgataattgacactattacctatgttatagttctctgtgtgtctatttccagtttgtaaattctttgaaggcagtgaccgcattttgttcatgtctgcatccctcttagggcccagcacataatgcagtatacgcccaattaaatttgagactcacagagtttagagtggccaccttgtccaacctctcctattagagatgaagagacttccagaggtcataccgcaagttgacagcagagatgcagtaggaactgaagtgaggcagaatttgaggattcaggtccatggggaagatagtttgctgaatgaaggagcagtgctttagggaacaattttaatggaatttaaagacagaataattcagaactggatacatagtagataccaactgcaccttgtgggaataattctctggatagtatctggcagtcttcagatactttgctgttatcctggctaaaccacataagttgttgtgtgttggttcacaatctgatcttgcagatgtaagttagaatcttgacagttttttttgagagagtttaagtcctaagattactgctttagaacatgaaaatcaaacaagactaattttaagcattaactctttggctcgttggcaaagaagggtcacataggatctgaaatttgtgcactgtgcagtttaacgtaccactacttttttttaaacagctttcaaaggtataatttatatacaatgaactgcacttaataaaacgtacaagttggcaagttttgacatatgtatatacccatgaaaccatcgccacaattaagatagtgaatgtatctttcactcccagaggctccctcataccccttgctaatctctccctgtttcaaccagtcaaccactgatctgctttctctcactgtagatgaacttgccctttattttggccagacatggggggaagggatcatacaaatggagtcatacattatgtattcttttgtttggtttccttcacatagcatagttattttgagatttatctatgtggcatgaataaatagttcattcctttttattgttgagtgtaagtccattgtatgaatgtactacagttttttatccattcccctgttggtgaacatttgagatttgaattgttttctgtttggagatattacaaatgacagtgccgtga

SEQ ID NO: 134846 - DNA, 1414 bp, Homo sapiens
aaaccttcccgagatgtggctggttgggatgacagaaaaagaagcactgaatgccaaggcgatcagtccaaaagcgtttagggggaaacctgcagagggctgcagaaattgtcaagacggacaccgggagaaaggtgttcctgggtatgtccgcagtgagggggtcagggtatggagttcagatgagagtttaaaggaatttggctcagggttgaggccagtttcttccagtgttttgggcaacaacctaggtacctttatcaggcctgtgaatgttcaaggcccctggtttatggtcaagcctgctagggaaacctgccgctggctaggtcagagagcaatcaaggcactctgattttccatcaggacagagaaagaaagggggcgactggaggaccctacaacattatatgcaagaatataacatatcgtgtgtggcaccagaacactagaaacaatctaaatatccgttaacagaggattccaaattatgcgctattactctgtaacactgtgcagttatttaagttattgaggtagatgtatatatatgtatgtggacatggaaagatctctgtgttttgttttgttttgttttgtttgtttgtttgttttcagacgagtctcgctctgtctcccaggttggagtgcagtggcgcgatctcggctcactgcaacctccgcctccctgattcacgccattctcctgcctcagcctgccgagtacctgggactacaggcgcccgccaccacgcccggctaattttttgtatttttagtagagacggggtttcaccatgttagccaggatggtctcgatctacggacctcgtgatccgcccgcctcggcctcccaaagtgctgggattacaggcgtgagccactgcgcccggccaatctctgtgttgttgaatgaaaaagaaaatcgcagggtatatcaatctataattttaacctgtaatttttaaaaaggattacaatcttcccaacccccacaggcatgtaaaacttgtataacattgcaaatatctgcaaaggtacaccagaaactattaatagggaagtgggtctgaaaatagtaggacaacttttatttttgattttttacacatccgtagtgtttgattaaaaacactttgtaggcccggtgcagtggctcacgcctgtattcccaacactttgggaggctgaggcgggcagatcaccaggtcaagagatcgagaccatcctggccaacatggtgaaactccgtctctactaaaaatacaaaagttaggccaggcacggtggctcacgcctgtaatcccagcactttgggaggccgaggcgggtggatcacaaggtcaagagttcgagaccaacccggccaacatagtgaaaccctgtctctactaaaaatacaaaaattagccgg

SEQ ID NO: 134847 - DNA, 1930 bp, Homo sapiens
gggcctccactgggatgaaggatgcatgttaggggaacctgcgggccaggttggcaggaacttgctgggccgggccaccagcaggctcacggtcttgcccctctcagtgccagctcaggccagaccttcttctcagatgtcgactccaccgacgctgccagcacctctggctctgcctccaccagcctctcctatgactccaggtgagcttcctagaggtctggccttcacattttgcaaggaccatcattcctctcagcccctccacctcccacttctgtaatgtgtggctcattctatgtgtctcagtctctggcggggagtacctggccttctgcaattgtgagtctggctctcggaccctctggttctgagtcacggggctttagatgggacctaagtataggcattcagcctcccgtggttccatccctttggaatgcttcacctgctgcagaagcttgtacacacctctcactggacgattccagttctggggttgttggaccagagtttctttcacttttggcctccacgtgccatgagcttgggtgtctctctgcctcttggactacagagttccctgaccttgattcttggctgtctgaatatggtgcctgtcttccggggtctctaagggaaagagccgtttatttagaagcctgacagaagatggcatcctgcagggtggaagatttaggagtggggacagaaatccctgggggcctatctccagtacaactggtctggcaacagctggtcctcagcagtacggggagtggtcgagcacagggctttcctctgcactcaagctgcactgtattttaagatacttgaggcccttgcaaaagtagaattaaaagtataatgcctggccaggcacggtggctcatgcctgtcatcctagcactttgggaggccaaggtgggcagattacctgaggtcagtagttcaagagcagcctggccaacatggtgaaaccccgcctctactaaaaatacaaaaaaaattagctgggtgacagagtaggactccatctcaaaaaaaaaaaaaaaaaaaaaggacaatggtataatgcctgtagaggtctgtcttggagtctgtgtctcttgacatctgtctaggtgtcctctgctgttgcctgttttttctttcttcctgtttgttggttggtttgagacagtctcactctgttgcccaaattagagtgcagtggcatgatctcagctcactgcaacctccgcctgccaggctcaagtgattctcatgcctcagcctccggagtagctgggactacaggcgtgcaccaccatgcctggcctatttcttcctgtttctttggtttcaccagcacttcaggtcttggtttctgtctctaagcatctgaatctgtgccttgtcctgtgtgtctgtgtgtccatttctctaacacccgtgtgtgtgtgtgtgtgtgtgtgtgtgtgtgtgtgtgtgtgtgtgtgatgtctgtcagtctctccatccaggctctagggtacagggtccttcagtccctaacccccagccctatgtgacctatcttgttccaccagtctggtgagaggcaaggtgggataagcagggcctctgcactgcatggcctcaggaggctcagagaatggtgctcttgtgcttttgcagtgccgggatcctagctctaagagcatatgctttggagttggacgttcttacgtttgaatcctggctctgccactccctacctggttttctcctctggaccctcagtttccctcctcgcagggctcttgtgaggatctggtgagataatctatgcccaaggcatagattatctcagggactacataacaggcacctttgagagagcatgggagaagatggataagagaatgctgttcagcgcttttctcttccactttcctggtactgaggg

SEQ ID NO: 134848 - DNA, 1035 bp, Homo sapiens
cggcatcctagcgcgctggctgcaaaagaggcgggaaacgcctccgcgtcccttccaacagtaccggagagggagaggggcgtggctgagactagccccgaccacgcgcgcgcggcccctcggcaaccggcacaacacaacaaaatggctgccgcgccgctgggcccctgaggaaagagcccgaacttctcccgctctacctcagcctgcgggactgctcggctcggcttctaggcggtgagcgtcagacctggccgagcccgttccccggcatccggcccgagcagtgggggccggcggcaaaggcgggaaggcccggaccgggcgtggtgtgggccggcttgggatggattcggggcgggggcgcgtgtctgggaattgggattggacgggaaagaggggagggcccggaacgggcgtggggcggtggatgaaggagggaggtttggatgggaagaggtggggacggcgggggcgattggggatgaagaaccagagtgtggggaggtgtggaagttagggtgcggcgcccagaaggttgtgggtcctgccacctgagctgaggggagagctgggatgtgccagctgtctgtggggagtgagcgggagaaaggacagtttgggcgtcctgacgggttgtcacggtatcggacggagtacagtgcgtggagaaagatgacaggatatggggacgaaatgctaaaagaaggggaagaacaaacacttccgttatattcgttaagggactagagaattttgaagccagacaaacttgggttgaagcctcaattctgccaccttgtgtaacttaaccaggtctgtgaccctggatatgtgtctgagccttcctgatcatgtttcctcatttgtccaaataattgcgaatcatttttgggtgttcactatttgtcagatccagttttaagcactttgcacgtattaacctcatttagaatttaaaataacttgtatgaggttatcatccccatttaaaaagtgatagcactgaggaccagagaggttaagtaatttgcc

SEQ ID NO: 134849 - DNA, 1099 bp, Homo sapiens
ccatcagcttggagtagtatgggtcctagcatttatggcctctgagtttataactttatagacctgaaggttctagaaagaatagttttgataactcttaaaaattaatcttgttgaatatactgaaaactcttacaggttttgatgaacacctggctttattcttgcaatgaagaaaggttctcaacaaaaaatattctccaaagcaaagataccatcatcatctcactctcctatcccatcatctatgtccaatatgagatctaggtcactttcacctttgattggatcagagactctaccttttcattctggaggacagtggtgtgagcaagttgagattgcagatgaaaacaatatgcttttggactatcaagaccataaaggtatcactttttaatctaagaattggtctgaccacatacttcaagtagagatggaaaattttcggcttgcatttttggtccaactgtaacattctggtactaatttgatctattgtttttattaacagaaattaaggactgtaaggacagttggaggattgaggtttctgggtgagggtaaagatgtcagtggattcaaagagggagttttcagaaagaggaagctttgtttcctgtggtaggagagtgtcttaaaactcatcccaaaacttgccatcctctttggttaaggggagggaagatctgttcacttcagagtggagcgccttaattcagtaaaaaaacgttatacatacttggcctatgccagtcttcttattagcaaactgcttatctgtgaatggactgatttccacatatgggacatgtatgtatgttccactagtgttttagttttttcttaaaatcatctgttagtctaggaatctgttctcaaaagtgcattgttgggggtatagcttagtggtagagcatttaacttcaaaagtaagttattctttggtaagtcatgaaataatagccattaaactctaatcaggttttattagcattaacaacactgagtttatactatatctttgctgcaagttggcatattgttatttctaatttgattaatattttagaatgttatcaaatttagaatattaatc

SEQ ID NO: 134850 - DNA, 1027 bp, Homo sapiens
agcaaatgattttttttagtaagtgatgatattaataatttctatctcaaaggtttgttgtataaattaaattttaaaaatgtaaaccacttagcccaaagcttggcacacaccaaatatttatagtgtgtataaccattatcatctttgtatcattatagttactacattacaatacgttatagtattacaatacattaattgtaatatacaatacattatagttattacattataatacattatagtattacaatcattacatcattatttcattataattatgaaatgctatgaagtaaaatattattaaaacattatgattagaaatagccagcttttttggtatattcatggcttaatttttgtttttgttacataacatcaaaacaacttgttctttgtgatattcatgtctttcctctactgatgatgatctgtttctataatttcaggagctgattcacatgcaggagttagatatattacagaggccctcattaaaaaacttactaaacaggataatttggctttgataaaatctctgaacctttcactttctaaagacggtggcaagaaatttaaggtaggttaccaacaatttctgagcatagatactgtttttaacttttctgtgctttaatactgcgaaaaaaaattatcctaatgtcacctaatttgtggcagaccttttattgtttccagtgaatgttctaaatcagaagtatatgacatttccaaattaataagtttctattactcaatattcttacaacattgactctgtagagaaggggttggcaaagtacagcttacaggccagatcaggccagctatctatttttgtaagtaaagttttattggaacacagtcacccttatttgtttacatattgtctgtggttgtttttgcactacagtagcagagcttagtagttgccacagactatatggcccgcaaagccaaaaacatttactatttggcctttgtattcgttcattttcatgctgctgataaagacataccc

SEQ ID NO: 134851 - DNA, 2661 bp, Homo sapiens
ctcccaagataatggcattaattcattcctgagggcagaaccctcataacctaatcaccacatgaaggtctcgcctctcagaactgtcacaatggcagttaaattcaacatgagctttggaggggacactaaaaccatagcactatcttttggaagaaaggaggggaatgagagggagaggtatggcaaaagtgaggtagagggaatgacagtgagggaaatcttgttggatagtcttgagcttcttagtatatagacaatgttgttgtcaactgaagggcaaagagagtttggtagcttgagtagagttattactcctagtcaaggagagctgcatcaagggattctccaggagagcagtaagggtatattattttctgatgactgatcaaacagaccctgatgcacataagtaaatgttgtactttatgtcaagtcatctgttgtgtaaagtattcattcatttgtttccaattagtatattgagaatttggaaaaatgtgttaaacttgaagtactgaatctcagctataatctaatagggaagattgaaaagttggacaagctgttaaaattacgtgaactcaacttatcatataacaaaatcaggtgagttatataacaaaatctttaggcagcattgcagatagctttgttagagaggtagattaatgttatccacattactgaaagaatgatttgacagaaacagaagatatttttatctttattcatcaatcaaatgaatgtctgtctcttcacatatggtaggtaactgtctttatgttttggcattactgaagtacagaataacatctagcattatcaaagagatatatttttgagcaccaaattgtatcttaatttcatttctgacaggaagttttcccagatattgtctgtgatttattaccttattacattaagaatgttgacatgaagcagaatgttttaaccctgccattttgacccccaagatgttctaatctgttttgattctgatgttctttgcttattgctacaagaaatatgctctcaatcctgtttccaattcataatatatattactgtgagaaataaacatactaaaactgacactggctaaaacttcatatagaaaacttgttatagacaaaatgatacaagaatcaaatcttgaaattcttaatatctgcatgcttttcccccaagttagacttggtaaatatgatggccaagaaaatgactagcaatggcagaagttctgatatgacaaaactgaaatgaaaaaaaatgattaatgaaccaaacccttattataaaatttgtataaaaagttgactctgatgaaaatattttcagcaaaataaaattgaaagtagagaagcttagaaatatttacccagtgtagatagaggctttgaagtatttgtgcagtatagaaaattgaccaaagaattaaattgacaaataaattagaagtgacttgggaaaaaccttcatcaatcagaattcattaatatgtgtgataaatgctttatttaaaagttctggttaaattacttatattcctaaatacagtatcatctatgggctcccatatcctgctggcatagctaatctttttatgataacttaagacaataattaggaacatcttttggacaggaatgtagcagataggacagggtgctattgagtttcccaggtctccactggctgtttgctagtactgttcacagtagtcggtgagaatgccatggtcacatttttcttttctatgttatggagttgcaaagtctaataataagattgataggattcctgggcatagtaataaaaagttggcagtttagctgttctggtaaatttggctttagccacttttctttgttctcatttatgaaaagagttgataaattatcattatgaaaagtaatctaacatggagctaaagctgtttattctaaaaatacaatggagagactctataattgtactcactaaattttattttatcctttgctttccagcaaaattgaaggcatagaaaatatgtgtaatctgcaaaagcttaaccttgcaggaaatgaaattgagcatattccagtatggttagggaagaagttaaaatctttgcgagtcctcaatttgaaaggcaacaagatatcatcggtaagttattcaaaatagcaggaatttttagacttgttaaaaaataaaagattaaaaatatctaagttttttaaaaatgggatttcttcttttaaagattttgctcctttgactaaacactagattcagacatagcccatgattttctagattaattaaatacaagcagtcctcattttgcatgggttcctaggtcaacctagggttgacctcttagcatttttacatttatcatttcatgtaagcctcataacattcttgttaagaaggcagtacaaggattatttttgtaacactatgagttaggtagtagcaagtaaggtctaggacaggttaagtcccttatctagagtcacattttgtgccaggatccagatcactgaatgcctagaagaaagttctgggtttttttttttttgacagtattaacttccaatttcaaatttaccagtttattttgattataatgttaggtgttataggaggttgatcactagcttttcataa

SEQ ID NO: 134852 - DNA, 1057 bp, Homo sapiens
gagtatgcttgaagatgaggcagaagagggaggttgagtccaaattatgaagaactttatcagcttttcgcaagccttttggatcttatcctaagagtaacaggaagctgttgaaggattttaagataatacagaattttgcaaacatgtttgcagcatccttttaaatgtaattactaatgtctgataaaatattgcatgtttttcaaaggtcacctagaaaagaactcatttatcagcacactaattggattaaatacttggaagtaaagtattatcttttaaaaatatcattgaaatgatgccttcttgcctcaatttcaagatcaggatagtctttttttccaaaaccatggtggctaattttaaaagtagaattgtatttacaatatttttagacttttttcactattgtttgagaaatattcttacctttttaaaaataggaaatataatgataaataaactattaaattttcattggcagaagaggtagaaagactggaaagagacctagaaaaaaagatgatagaaactgaagagcttaagagcaaacaaacaaggttccttgaggaaattaaaaatcaagataaattgaataaatcattaaaagaggaggccatgttacagaaacagagctgtgaggaactcaagagtgacttaaacacaaaaaatgaattggtaagttcatattttacattgctttggctgtattctcataagacagataattctttgcccttgggtctaaaaatacaacttcctgaccatataatggggaagatgtggtttaacagaaatatgtggaaaggcttatgaattgtagttgactgtgtgctagatgatatggcttcccaaaagactaatgctgtcttgagctgcattatgtactcctagatatttgtattttttaaaaacaacattgtaggtgaggctgttcattggcaaaaacatttagaaggcgatctggcaaaattatccaaaattttgtgagttataggtctttttggacatggaatccatcttttattactaagataaaatataatatctttat

SEQ ID NO: 134853 - DNA, 1742 bp, Homo sapiens
tgcttcagtttagttatatttaaaatgaggattatttacctgtcctgctagcctcacagaattgtgaggatttaatgagctaataatgaaaataatttgaaatgaatcaagctaagtaatggaaggtagtaaatctataactcagaatgacaataaaatacatccatgtaagaataatgccaatactaaaagccatgtcttcctatggtaagttgtcagtaaagagcaacttgtattattacagtttaactctccaagtgacggtatctgtttgcttcttcttttagcccttgtcttggtttcttgcaggcccttttctgctgattctttattcttccttaaaggtagttcttccaggcctgaactgtgtttttcagggtttgcatgataacttgcattaatatgcttgcttacattttaagttttgaaactggcttgtcttcttgggaaatgtggttgtgtgcgtatgtattatttttttttaatggatgtttatataggagagcaaatttgaatgtgggggaaagaattatttttctgattggtaaatatgttaccttcagtcaactcttgattatccaaagctaatactgtgactagcctactttccagttcatttgacatctattttgcttttattcatgcatttcttcaacagatatttattgagtgcttacaatatgctaagcctggggcttataaaagtcacaaaagtactttgaaatgcacagcctatttattattatttgcctgcagagaccagttcatgtattctctgtgattccagtcacatttgcctgttgtttgccactattgccaatgagttttgaggagagaacccaagattagttgacagtgttgattgtgagttgctttcttgagactcggagacttatgatcattcagtgaaaatatcaatgtgggtaatgtgctggacaccctgcagcagtacatcgaaggcagcatggaagaataggcagtattggatttgaaatcaggagacttggaattgaattctgcctcttccactaccagctgtgaaattgggcaagttatttaacttctctgtgcagcttttatcatcttattgggtggttgtgaagatttagtgcaataacatatgtaaaatgcttagcacaatgtctggcacacattgagtatttggctcaatgttacccattatctaggctattacttccattttgatggataatcaggaggtgactgtgagctaaatcatgcacgactttgatttcctgggccttgtaaaatgtttgtgtttgtttatgttttattctcttcagcttgcacttttatattaatgaaatttttctgcatgttttttctttgatatctaccatcagatactggccaaaaaaagacaaaaatcacttagtggatctttgaaataaactcaaagtttggtttagtagaaaggagctagtactagtagttagttaataaaatatttagtttctgacactgatctaatatgtaactttagacaagtcagttcatcaatctgagacttaatttctgtatttataaattcagagaattagattggatcatttgtcttctccaagctccaaaaatttctaagaataaaaagttatagtagaattactttattaaaattgaatattacatatttggatctggttgagcttattcacatcccttattctttattacaaagaataatattctgaacacttaatactacagcaacaacagtatga

SEQ ID NO: 134854 - DNA, 1857 bp, Homo sapiens
gtgggcgcctatagtcccagctactcgggaggctgaggcaggagaatggcgtgaacccgggatgcagagcttgcggtgagccgagatcgcgccactgcactccaccctgggcgacagagcaagactccgtctcaaaaaaaaaaaaaagtatataaagagtttagaacagtgcatggcccatagtaagtgctatataaagttggctattattaatactatgtttattattaataatttacaagttgcctatactattatagaatgacagcttatttgtgcttgctattattagttttcataaacttttataaagtatgattttctacatataagcataaaaatataaaatatgcatggagtgcttagataactcccacatttcacttttatttttaaaaaactgatagaatatagaatacttattaaaattatagacattgtcttaataaatcagtgttgttcttctctgttaattatatattggggtttggggagattagatttcagaagcagggaaagaccttctttacaagcagttgagtggtagactacaacttgtaaataaattacgccaggaagctctggatctagaactgcagatggaaaagcaaaagcaggaaattgccggaaagcagaaggagattaaggacctgcaaatagccatagatagcctggattccaaagacccaaaacatgtgagtaaattaagaaattttgacttgttctgtctacatattacatgtctcatcattgttagcatcagagtccagagtcctttctgaaagtctgttttagtttgatgtacaaatttaagtgatatatacatacagtcagccctccatatccatgggttctgcatctgtggatttaaccaactgcagatcacatatattaggaaaaaaaaggatggttgtgtctgtactgaacatgtacagactttttttcatttgtcattattccctaaacaagacagtataacaactattcacatagcatttatactgtattaggtattataagtaatctagagatgattttaatatataagaggatgtccataggttaaatacaaatattatgctattttatagaagggacttgagcatcagtggatcttggtatctgcagggaatcctgggatgaatcccccatggatactgaaggaaaactgtacatatatgtgtgtatatataatgtatgtatgtgtatatatatgtgtattatacataaatatatgtgtgtgtgtgtgtgtgtgtgtgtgtatacacacacatatatggaatgtgtatgtctaaaacaaaacaacctagggcttgaagaaggtagctttcagtaaatgatggccgcatggtatatttatttttttttaagtggttgaatttcattgtattgcagagcaagggagatttgctccttacctttctctctccttgcctttttttcatctttctttctctctctctctctcttttttttttttttgctctgtcgccaggctggagtgcagtggcgcaatctccgctcactgcaacctccgcctcccaggttcaagcgattctcctgcctcagcctcccgagtagctgggactacaggcacccaccaccacgcctggctgatttttgtatttttagtagagacaaggtctcaccatgttggcgaggatggtcttgatctcctgaccttgtgatccacccacctcaacctcccaaagtgctgggattacaggcgtgagccaccatgccctgccgaagcgattctcctgcctcagcctcctgagtagctgggattacaggcgcgcaccaccacacccagctaatttttgtatttttggtagagatggggtttctccatgttgc

SEQ ID NO: 134855 - DNA, 1005 bp, Homo sapiens
tcgtgcctctgcactctagcctgggtgatggagtcagactccatctcaaaataaataaataaataaataaaaaagagagagagagacaatttaatgcaacgcaaataacactgacctacctagctgtgcccttggaaaaaccacttaacctctttgatcctcagttttctcacctgtaaagtggaaatgatttccgtatcaagttatcctgaaatttaaatgaaaactacccatgtgaaaacaatatagggcctgacacaaatagatgcaaattattatatttattttctattcttcctttaaaaatgttgttaagggttattacttttaaaggagtttaaggaacttggagttttgttgatttttttttttaattcagtcccatatgaaggctcaaaagagcggtaaagaacaacagcttgacattatgaacaagcagtaccaacaacttgaaagtcgtttggatgagatactttctagaattgctaaggaaacggaagagattaaggaccttgaagaacagcttactgaaggtaagactttcagtatgatttaaggtaaatcagtgttattgctggtaaaagaaacattataaagacaagcattaatccagatagtagctaaatacagttcacctattagtactagtatttgatagggaaatatttacaggatacccaaaagtagttaatgcaattttaagagttttgtttttgttttgttttgtggcattgatgcctagtgagtcaggtcattccagtcagtaggccagaagtcaatacgtgatcatgataagctctggcatgtgattgtctatgacataaaatccattcaggagcaaagcacccattggcatcagggaattcagtgtctggttataagaagaaagagttttaggatctagttttgcaatgctgatttaaactgcgacatatccataatagtggaaaaggaagacaataggccatagtggtttttacacatagggctcagtgtaaaaagatc

SEQ ID NO: 134856 - DNA, 1031 bp, Homo sapiens
gaatgtatgtcaatatttttatagctgttctcacagtaatctgctgaacaaactgcaggaaaaacaggtggataggatttttcagataattaaactctcgaagaagacagatgtctgaacaaacaagtacctgaatcatcactcagttctccaaatctgtgaggttgcgggcctcttggctggctgagatggtagctgttatcaccagaaataaaagggcagagtttatgtggcttggaggaagggttccaaaaaaaactacgtagggggatttgagagaaataagactaaactcacccaaatgttctcttcttctaacacttcaaatatttgttccttgaagtttaaagaaatctaataacctggaatttaatttttactgctctcagttccacttctgaagcaaatatcataaaagatatacatgttttccattactatgtgaggtgtgtgtgtatgttgggtcttacttgagttatcattttccatttttagtatagaaatttgcatataacacaaaaacagaatagcttatgacccttatttacccattgcccaacctaaacagttgtcaacattcattgtttcattttgtccacctcttttgttgctggaatattttaaagaaaaatttcatacatctttctttcacctgcaaatacttaagtgtacatctcttgcagaaaaggactaatataatattcttcagggggcttctccaaagtagaaagtgaagtcaactttctagaatgctgacacgtgttgtgggactaccttagttagaactagattctttgattacttggccaactaacctcctgagtacaagttaaacccactctacatgtctttgtcagaaatcatttagttgcaatgaaccaaaacctactcacactagctcaagaaaggagacagcttgctaggaaccagagctgctctgcctttcatgttgatataggggctctctcatttctctttttccatctctccgagcattgtatgtggcccagcatagaccccagccctgattt

SEQ ID NO: 134857 - DNA, 1021 bp, Homo sapiens
aaactcaaccctgaatgtggttataatgtcaaagtcaggcttgtttgtgacattgtgttttccttgatttagaagcaaaggcaagttattttataacaggcaggtaaataatgccacattcctagagtatggtgtgttgccagaatctggtattttttgatgtgatgattttaatgaagaggcaaacattccaatgactcctagagatcgttcaagataaaaccattcctgacaactcattagtaaaaaattaagttacagcctgttgtaaaatgggtgataattctataaaaagtttttattttgcttaaaacatattttgcctaaaaatcattcttgaaattgtatttcttcacagatgaattttgataagaggcaacatgaagcaagaatccagcaaatggagaatgaaattcactatttgcaagaaaatctaaaaagtatggaggaaatccaaggccttacagatctccaacttcaggaagctgatgaagagaaggagagaattctggcccaactccgagagttagagaaaaaggtaggggagacttagaaaatgagacacataagtacctgctgccagtgtcctgcccactggcaactaggtcagctgagatgggtgtgatctgtagtcacctctggctgcattgctggcacagtgctgaacctgacctaggtgggacctggatgcatgtcattgaatcaagaagctaagaccatgtgttgtggtagatggaaacgagaattgagaatgtaaggagtgactttcaagttaattaggtggtacttaacaaatgatattgggaggagtttgactcctttgaaacctcttgtccagttggatacatccatgggaaattacttttaaactcctcatcatcctttctaatacccctgcctctctttaatggcttttctccattccacctcaaccatctactcccattgtcacattctggactttgtcaagtttaaaaattgcacccacctctgaaatcacaaactgaagtgtcttgctctg

SEQ ID NO: 134858 - DNA, 1139 bp, Homo sapiens
aattaattggctctcttagaatctcttttatattttgagaaaggaagtaagtgatttcatatcaatttcatagaatgacttttctttacagacaacaaaggaggctttgaaaatgttttagaagaaattgctgaacttcgacgtgaagtttcttatcagaatgattacataagcagcatggcagatcctttcaaaagacgaggctattggtactttatgccaccaccaccatcatcaaaagtaggaattctgtggtgttgggaatgtatactgaattttcttgaagaaagtgtgacattgtccccttccccaaatttatgaacaggtaccaaaaacaacatttctatgctaagccgtgcattgaggttctgtagcgtttttaatatttgagatgaaaatagggccttcttggggaaggtgacagttgactgttcatactcgggcggtatgtgttagggtccttgaatgtggatgctctaaggagaaaaggtgatttgagcccagagagcctgctgaaatggacatagaattgtgcagagcctccgacagaaaaaaaggcacctggatttcatgtccttttaacgaacattcattcagtgtttactgaagcctaggccaagtgctaggtagtggtggggcatcacaatgaatggtaaagcccctgctctcaaagagttcattggccatgccagcataattgcaaaatggtgacatacctatgacaacagacctgacctgtattctctagttgcagagaggtattaaggattcatctgatgggaagttcaggaaggaatgcttcacaagcagggatgtgaagtcagcacttagcaagcagtgagcgttgggcttttaggagggaggaaacagctcgtatggaagaggagagttattggcttagcaaagacaaatagctttgtggggctagagggtttataggaacagtgtcagatgaagctgaaaagtagattggggtcatgcttttgtttttctttttgttttttgagacggagtcttgctgtgtcccccaggctggagtgcagtggtgtgatcttggctccttgcaactgctgcctccggggttcaagcgattctccggtttctgcctcctgagtagctgggattataggcatgcgcca

SEQ ID NO: 134859 - DNA, 1026 bp, Homo sapiens
acaaaaaaccactaggaaaaatgactacagagagaacagaggctgacacccgggagtctcatcactatggagaacttattttcatttctctcttggggagttgctgcataaaattaacccagtcaaacagctagataacatgctttttccattttggtatggccaaggacttgtgagttctagaaaattgtaccaaaagagaggataggagatggatgttttaaaatggcttttgaaaggataaatagacattaatttgtttgctttcaccacactttgagcccttcactttcacagaccagtctgatgtgaccccagccattacccacatagccctcctttctgcatggcttccctgaccctgccatgtcgatcaagtccagagggatgttaataagctgaattgtgtatggaactgcagtttatgtgaccatgtaatcacctcacttctgtgaaaaataaggataatgaaaagaagccaagttctttctcaaccttgctacatctcaactttgctgtagactttgacgtttcttaaaatcagcctttccatttataatagatagtgtgctctgctgtcatttgttttaggtttccagccatagttcccaggccaccaaggactctggtgttggccttaagtactcagcctcaactcctgttagaaaaccacgccctgggcagcaggatgggaaggaaggcagtcaacctccccctgcctcaggatactgggtttattctcccatcaggagtgggttacataaactgtttccaagtagaggtaagtcaaatcacataggaaagttgcatttctcttgcccgtttaataaccttttactgattctctgaaacccctaagacacaatccagactccttagctagctccatgaggtcttctgtgatctggtcttggccagcgacctcttgtcgttgttttaaaccctgtctggaatgtccttcctccttcccttcccatggtgatgcctactcatccttcagtgagacctaggtcctcaaacaatgct

SEQ ID NO: 134860 - DNA, 1119 bp, Homo sapiens
acttcttcagcctaggtctttccccttccgttcgttcttcaaaacccaggcaaaacacctcttcctctgagcagccttctcagaacttttctcccatgtggccagaggaaggagagacttctgtctatctcttctgctagaccccgaactctttggaggcagaggttatccacaagaggcttggcaaatgtttctcagtcatagttggactgtttgaaaaattaaaggttctatttgtctgtcagtttcatccgtgacatttaactttttataccaaagtcttagaatctaccatcattttttgggccattgataccactttaaccacagttaatttcagcttttggcaggaaagagaggaaacatcctgtgatgtttcagcactgcatttttttccccatctcattcaggagaatgaagtttctagattagaagacataatgcagcatttaaaatcaaagaagcgggaagaaaggtggatgagagcatccaagcggcagtcggagaaagaaatggaagaactgcatcataatattgatgatcttttgcaagagaagaaaagcttagagtgtgaagtagaagaattacatagaactgtccagaaacgtcaacagcaaaagtaattaatatattttttataattcagacaaatacgatattagttcattaatgctgtcgaacagaactttctataatcttggaatgttcttgatcttctgtccaaaacagtaaccactagctcagtgtggctgttgagcacttgaaatgtggctgatggagctgaggaacagaatttaatttcaattaatttaatagccacatattgagtaccatattgagcaatacaggtctgagttcttttggccaataatacaaatcagctcttattgtagtccctcttggagagtggtataaccatttcccctctccagttaccctagctaaaaatacagcaggggttctcaactctttcttttccattactctcctgtgcttccagttggtctctaaatcctgctgactgcatccagagagctctcaaactggtccctttctgtcatctccccttctctagcttttaattagtctcatcctagcgattgtaatagtttccacact

SEQ ID NO: 134861 - DNA, 1024 bp, Homo sapiens
atgttagccttaagatattgaattgtgtgtcacagtttttgatgtgtcaaatgttgtcaccagagttttacttcagccgaatggaataaatcacaaaatcaggtagtcttcaagggcagcctatgaactgcccttgaaggatagttttgagggaatggatgaatattgtggtagtggtttgctttatttttatacctcaaaagaatagaagtatcaacattttcttggtcaagtgctgacaacacaataatctttgttgttatatttaaaagggcaaacaattccatgtcatgcattttacatattatgcatttattgccaataggaattccatgtttaataagatggtaaacctagaccttgaacaaaatcaaatgtagcagtctttcttacctattctcatataaaattagaaaatcattgtagatctttttagtagttaggctacaagtatctgtattgtctacatttaacattttttaatgggtgtatatattattttttagggacttcattgatggaaatgttgagagtcttatgactgaactagaaatagaaaaatcactcaaacatcatgaagatattgtagatgaaattgagtgcattgagaagactcttctgaaacgtcgctcagagctcagggaagctgaccgactcctggcagaggctgagagtgaactttcatgcactaaagaaaaggtttgtcttcttgtggtttggggtgtgagctcagtgtgggtgagtcagcttactgtccacctgaaggattagaaagagaatgtgtgtgataagaggacagttgtccaagtcagacagccaggttccaggctggactctgctagttaagaagatgtgagaatttatgcaagtcatataagtcccctggctttgcttttcttatctataaattcaggctaagaatacgtaggcttttcggcatggattaaataaaacagcgtatttaaaattcctgaagttacttagttcctagcacaccccacgtccttatcctgtgtgtatcttt

SEQ ID NO: 134862 - DNA, 1070 bp, Homo sapiens
ttttttgtttgagatggtgtctcgctctgtcacccaggctggagtggagtggcgcaatcttggctcactgcaacctccgcctcccgggttcaagcgattctcctgcctcagcctcctgagtagagacggggtttcaccatgttggtcaggctggttttgaactcctaaccttgtgatcctgcctcagcttcccaaagttctgggattacaggcgtgagccactgcgcctggcccgataatattctttagaccacaacacagagggaagttggggagaaaaaggagttaccttttattgagccactgctgtggctacacatggccattttgtaaatgtttcatttaaccttcctggcagccctgtgtagatgatgttagcttggtttactgatgtagctcagagaggctcattactggcccagagtcacatagccaagggctcttttagttagatgagaattccaggatgaaaagagttccttacccacatgaaacacctcaggaactattatttgtattttgctatttcaacatgaatctatttaaattaaaagcagtctattacctaggaactaaattatttattaaagaaattctgtgagtaattaagaatggaaaaagtccttttcagatgagctgttccttctgttgtcatatgttggattactgtgagagaaaatagatgtgagcagaactagaggaaaaaaaatcactggtataataatatataataagatattttgataatatatcaaaatatcactggtatattttgattataaattttggtatattttggttatatattaatatatataggtatagatatataaaatcatcaaaagaaaattgatggcagtggtagtaggcagaggtagtaagtcaaccaaggctggtaagttctttcaccttcatcctcccaaaatgactcagggaggcagcttggtaagaaggaggaggagagagaaagtagtggtgttttggaaggagtgtgccagacatgttaaaacctgacatagaaggagacaaaaaactatttggtggcttttctggaatgcatagccagtttt

SEQ ID NO: 134863 - DNA, 1054 bp, Homo sapiens
catgaaggcctagccttttgtgatcatgtttatcttccctgccttaccactcaacaaggtactaagcccctccagagcaggagccatgtctcagtcaggcttttctctctatagacgttgccttgcttacagtaatgttgcaaatatatttagatgaagagaatatgttactttcttctattatatagaaataggtttctgtaaaatataatgctgttcttgacataaaaggcaaaaatgagcttgtttccaaattagaatttctatgatataaaacaataaataacagaacttattttgaagtaattttcatttacagtcacaggagggaataactttttttttttcaaacacaggaagtaaaatctcttctggaagaactgagttttcagaaaggagaactaaatgttcagattagtgaaagaaaaactcaacttacacttataaagcaggaaattgaaaaagaggaagaaaatcttcaggttgttttaaggcagatgtctaaacataaaaccggtaagtttaaaggaaaacaatcatacaaagtttgaggttggaaatgtctgtattacaagtcacagaaaaaataacaaatggccaaaaaaactttaaagtttaaccttactgctaataagcaaagcaagcaggttataaaaggaatatgatattttctgccattttaattgataaactttatttaaaagcaaaataatcatgctcattgctgatcagagtgtgctgaaagaagagcactcacagtctatcaattgaggtataaactggaacaatctcccagtgtttcaaggctcttaaaattcacacctgttgaactagtcagcccatttctactcctccagaaagggcaagtatgtacatcgcagcaatatttataatgacaaaatttggaaacaggctgggtgtggtggttcatgcctataatcccagctctttgggaggctgaggcaagaggattgcttgagcccaggagttcaaaactacctgggcaatgtatgagaccccatctctacaaaaatattcaaaaattagcgatgca

SEQ ID NO: 134864 - DNA, 1015 bp, Homo sapiens
tgtggaaggaagtagtactggtgtgtctccctttatgaaaatcaatgtttataaaaaacatttcagctgttccacacacttcaggattggtgctgggtttcctctcactggtctcaaagacttgaaagagaagatagtagctatctgtcactctgggatcaggccctccaggaaccaattacttcaaaaggcacccttatctgggttttttctgggcctttggtgtgggtcagggtaggcttgtacgactttgtaatggaggaaagcacctgcatgggtagcatatcaccattatgcatctgccacaagggaaggggagctctgcccacagctggctcggggtctttggctaaacctactgaaaatgctcatttcagaacggcagctttcagaaagggagcagcaattggtggagaaatcaggtgagctgttggccctccagaaagaggcagattctatgagggcagacttcagccttctgcggaaccagttcttgacagaaagaaagaaagctgagaagcaggtggccagcctgaaggaagcacttaagatccagcggagccagctggagaaaaaccttcttgtgagtacctgctgccgtggcagtttgtgaggaaatgataaatttaaaattttaaactgcaacaccacttcaacacagagaaaataaattacccatcaacccagtcctgaacccagctgttgttattgatgtatttatgcatcatttgtccttgaagttgatggtaagttttacctgggacgggtgcagcctcaatggagctctggctggctggggagactgttggtgtgaacagccattatcagcacaaagtagacagcatgttctgccagcaagcctcagtttacacctccactggcagggaggagggggtgttgaagaagccttctctagacggttgttttttaagatggcatcttgctttgtctcccatgctagattgagtggcgcaatctcagctcactgcagcctctgcttcctgggttcaagcga

SEQ ID NO: 134865 - DNA, 1508 bp, Homo sapiens
tttatttttatttttattttcaagacagagtcttgctctgtcgcccagtctggagtgcagtggcatgatctcagttcactgcaacctccacctcccaggttcaagcaattctcctgtctcagcctcctgagtatctggaattacaggcgtgtgccaccatgcctggataatttttgtatttttagtagagacggggttcaccatgttggccaggctggtcttgcactcctgaccttgtgatccacacgacttggcctcccaaagtgctgggattacaggcataagccaccgcgcctagccagttttattacactgctgtagtcagtgcctacaaatttttctcatcctgccctttttggccaacattagctttaatcattatcctaaaaccaggaagctcaatctaccatgctttcatccttgaaataaatttgggaagtgacactcaggtcagaataatttatggtggatggagacaggtgagcagcaatggaactgtcaagggggaggatttttccactaccctctggaggggttagtggagccctgttgtatgaaaggaacttttaaaccatgtgtgtctctcaaaggggatacgctgataactagtgataggcagatcgtcataaagatggaatatagatgtctaaaatttaatcctaccagtaaccctgtgatgatgggtattattattctcattttacagacaattaatgaagactcagaaagggatagtagcttattatcaaaggtaatgctaacagactctgacgtgtatatacgcccagctgtatttgatctgcccatgaaaggccgatagaattatccccatttgacagctagagaagctgaggcccagaaggggaatgaagttatagagctagtgagtgtgtaagccagcaaaccacacctccatgtgttagatcgcagagttattttcttcctcctgtgctaggagcaaaaacaggagaacagctgcatacaaaaggaaatggcaacaattgaactggtagcccaggacaaccatgagcgggccaggcgcctgatgaaggagctcaaccagatgcagtatgagtacacggagctcaagaaacaggtgtgtgcccagaaagcccagctggccagcctggggagagaggactcactgggctcaggcagattgtattgtttttaatatcccttctatagtagtatagaaaagctgattataagaatgttctttaagtcaaatctggttttttagccttaaaatttagaaacacaccttgactattaaaaatataaatttctcttaaatttgacaagctcttaaaatgttagtttttcaaggaaaaaaggtaattcttgagcatcatatttcatgtcccaaagaactatgttgaaatgctagattttatgccataaacaagtctataggagccaaaacctcccctaccccttgagcaagaaaagatggtccgggggaaacctttgatatcacataatgtagccaggcagagagtattaaa

SEQ ID NO: 134866 - DNA, 1058 bp, Homo sapiens
actagttaaaagttagggggctggcttctgagcgtaacattttatttccctttttttctggtaagaacagatactacacttgatcttagtcaaaaggctgagagctccttccagcaagttctgcaaggtccatcagaaccactagacagttactgacactgatgccatccctgctcacaggatagatgttacagatttttttttaaactagaacttttaattggaggatcttgaattttagcagttttaagaataaccgtttaattttttctctcagaattttgtacactggttcatcttaaaacatttttccaaagaggtactcaaatatgtcatttacctataagccatcatgccatcacttagttaagactgtttttactgtttcaagaatttgatttatccttccttttgtcttactgtaggaaaagaatgcctcagccagatgaggaatactgtcttgtgtaaatatattcaaggaaaacacctccactacctcactgacttcataattggaatgtcacatggtttttttaatcaagatgcagtgaactgagattctgaaactccactgtagtttactttgcctgtaccattaatgccaatgtttttataaatcacttgtacatagtacatatgggaatagttgcatatgggaatttaaaccaacatgtggctgagcctttttttttttaatcttcgtaacatgtttaaaaaaaaacagtgattttaactgcatatttgaacctacaaactggtaaatcttattaacaaaaagaatgtacttaaggccctctttatttatagtgtcgagttatttttgaattttgcttaaaatctatttttcatatgaaaataaaagataacaatcaacttgggtctgtcctctgactttacacttcacaggtcattctatggaaaagccgtcaaatttttaccttattccaagtaagtaatctttcaggtggttttcttttacctggaggctgaagtacattatacttatcaatgaagatttcatcatttggaaatacatcaattataaaactattatgctt

SEQ ID NO: 134867 - DNA, 1503 bp, Homo sapiens
aagaaaaaaggctgggtttactattgcacattttaagcttttatacctttatcttcttggaatggtcagattctgaactggacagtcagaaccacaggtctgctgttaagggattttaaattgtgcatttttaaccctacagtgaaataacttaagatatccctgtgttcacagtgtgaggggctgttttatgtcatgttggcataaattgttttgtaaaagggaaagtgtttctaaaggtgtttcagcgcttgtgctgatacaaagtaagttattactttgcaccaggtggtttggccactgaattaatactgtatagcaagagaaacaatcttatttttttggacaacatgttttattaagttcttcatttctgttgattttttttattgcatttatgattcagtggctgggaattgagaatttatttgaaatagaataggtaacacctcagcgtactatagaaaatgcactcagctcaactgctgtgtttaaaatacacattttaaatccctctttacagacactaacataaaagtacatctttctgggttgtaaacatgtggtagtaccagagtattgtatagtcaatgttaaataaaagccaaaactggaatgtgcagaaagtaggctttggttaatttgtggattcatttttatttttgtctttgtttaactttttaaaaaataagatttctggagtagattggtatattctgttaaagacttacagtgatccattttgcttacactgttgcatcacaagggactcacccagggaccatgacctgctggtgtgtgtgtatatttacaaaaacaaaacaaacaaaccacccattgggatataaggtagcaatcacaaactaaagactgcggcttgttgaggtgcaataccctgactcccaaagttagttacagtgggttttattgtttttgtgactgaaggatttattcagactgctgtactcttcatttgatgtaacaaaatgctattaatctaaatatttgtaaataaagtacctgtatctagattaaattaaaattggttgcattattttctgaactataatagggtttttcttcaggtgaacaatttgacgtgtcatcagtttttattgcagcactgtccatattcattgtataaagagaggtctacgtatgtagcatataaaaccacatcactaagtaatagacccacagctttattcttgtgtttacattacccttgaaatgttttcagtcaacccttttcagtgtaagatcagcacatttggtggctgatgctgttctcctttgactgtaccgggagccagattctatcatatgcatgtgtaatcccctgtaatacactcaggtgctcacaaatagagcagattgtcatattgtaacatgcgtgtgccagacaccgggcagtacactttggaaagaatgtgaaatccttttaatttttaatccatagcttactgcttgtgcagtcacctgcctcttgaggttgctcattgc

SEQ ID NO: 134868 - DNA, 2163 bp, Homo sapiens
agcttggtcaatctgttcttcctgtaatacttctgatcacattaaaaagcatgatttaagggaatagtgtctactcagaagcatagtgaacattttctaattgttcttccatgtctgctattgaactgtggtacacccatcattgttcttcatttattaggccaaaaatttcttgtggtgaggagaggctaacctgttttcgtttagtctcagctgtgctattagtccaaagaaaactgaatggaggtgttaacgtggctaagcatgattatgtcaccattacccgattaaaaacagctcagttcatgcttggctgagcagaccatattattcttggaatttttttcagcatgttcagagagatttcatttctgtttggagtatcctctctgttatcacagaaatgacctatctgaattgtcatggtgtgtattaacatacagtattttaatgattgcatataacacatgtagttgtccaaatagggtttgtagaaagggctttcagtacacgtatgtatgtatgctttccatagaaagtagttttccggccgggtgtggtggctcatacctgtaatcccagcactttgggaagccaaggcaggcggatcacgaggtcaggagatcgagaccaccctggccaacatggtgaaaccctgtctttactaaaaatacaaaaattagctgggcgtggtggtgtgctcctgtagtcccagctactcgggaggctgaagcaggagaatcgcttgaacttgggaggtggaggttgcagtgagctgagatcgggccactgcactccagcctggtgacagagtgagtctctgtctcaaaaaaaaaaaaaaaaaaaaaaggaaaatagttttccatgttctcttagctcagtgttctggtaatctcttattagatgacagtggttaagttggagacatcatggcagttaactaaagattagcaaaaggtcagtgtcttgtcttttgtagaaaactgtggttctccaataaagttatcaattgcctcttaggggagagaatgtagaagatgccttccttgaggctgccaagaaaatctatcagaacattcaggatggaagcttggatctgaatgctgctgagtctggtgtacaacacaaaccttcagccccgcagggaggccggctaaccagtgaaccccaaccccagagagaaggctgtggctgctagtgacctctttgctgtggcccctcatttgacctttcacctctgtctgttggaagcagtactttttactgcctcattgtcttctgtacatcttactgggtttaattaaaaaaaaagaaaaaactctgttgtaaaaacagtttaacacaatactaaactgctaaacaactagatgtaatcaggttatcaaaggcaagtagagtaataaatctctcctgcatggtaaatctagactttttttcccccttgtcctcgtgataagtatgtcaccaatatatgatttaaaccgagcactgatgctggacttcatgatttttaccctccctttggcaaggctttgtctcactgtacggtttaatttggtgatatcttaagcctttcttcccatccttaactgttcaagtatgtctgttgtaaccaataagtttattgctgtgaaattacttctgatggtagagaaggggttctataactgcttttgttttgttttggataaatttcctgttgtgtgggtggcatttttcttaacgagatttgcttctgtcttagcctcacacagggaaaatatccatttatcttctctctcgtgcttaattaatagctttatctttttttataccattttatccttttctctttaacagaaagtaaatatgtataaaatttgaaggaatcgaactaacaatacattctgtgtatattattttaatgaagaaaataaattgattactggcattggaacagtataaaataccagtttgtacagtatgacctatatgtgaccatgttactcccttccatttcacacaaagaaatagacacaactgcagttcacaagtagtactggctccaccccttggtgctggcagtgtttggggacattatgctggaaagagctcctagcatcagaggattaacactagcagattctgttccatctttgcactgttgcttacctgctgattttc

SEQ ID NO: 134869 - DNA, 1113 bp, Homo sapiens
tggatattgagttgtttatttaaaaatattaggtttggctagatttttgaaaagtatgcagttgtatttcacaactactgttctgagtaactggtcaaagcaaaattattattttaggatatgttgattaaatatgtattttaaatatttaagttttttttctataattatatggcagtcacaaatttaaacttttatttttgcagaagaagtacatataaccacttaagcagctggttgacagatgcaaggaatctcaccaatccaaatactgtaagttaaatggcatcttattacacagaaaatttaagaactaagctaacccaaaaagggaagccatttactggtgagatttttgtcttcaggtactaagaatgagagaatttttattgtattcttcaattagttgaagaaaacctaacagttatttttcagttcttattaaaccaggttttgcattttattatacctaggttttttgttcatgtttgtcattactattatgaatgtagtggtgatctcatgtgaagactatgaaatctgaaattatgattttaaaagggatctgcattaatttcataaaactttagcattggaggatactgggcaaaacgtagaagagatctttctgtactgttttttacaactgcatgtgaatctgcgttacctcaataaaaatttcaactacaggaggagaattaaggataaaaatttcagtcaaaaataaaaaggattctatatgtgttaaaacattagcttcttaaccagactgagatgatatttattgagattttaaaggctagccaccatgctagactctgcagtatacaaagataaacatggatccttggtcccaaagagcttatagtctagcagggagagaaccagcagatatgcagataactgtgctgcaaagtagattgaagcacgaattagaaatagagggactggcacagtgctggagagcctaggatgatcagtgccgtctggagagaaagcagctttacagaggagtggtgtttgagctggtccttgaggggtgagtgaagtttcagtagatattgttgagggtatgccaggaacaatgtgaggaaagacacactgagctgtgac

SEQ ID NO: 134870 - DNA, 1053 bp, Homo sapiens
ttattggtaagtttatttaacttacactcttgttcccaaaagaaggttaacatacaaaatatttatatgttaatacttaaacagtaccacttcaggactgagtgattttcttactgtaaaactaaaactccttttataagatttatttttgcattagcaatgcagcttttgcattgtggccatggatatttctgtggtacagtgctggtgggtaccttgtgaagtgatgttcattgttcttgagggctgcttgaaagctttttgatgctaggaagtatcagtgtttcaaggagtgcagaaacattcctaaaatactgtgaaagctctcagattcccctgggtttctgttataaggaaaaattggtagagaatattgtttgattccaaatcaattgtgtaatatatataaaatatagtatttttcttaattggtgtttttttccttaagtttcaagaaggttttgctcaaattaagtcttaatgctatttatccaaacataaaactacatttgaaagtacacgtttttcaatgaattgttcacattagaacagtttgctttcatgttgaacttaatgtgtcctttctaatgtttccttcatcaagggttaacattgctatagtacagtcagagatgacatcttttctcctggggttttcatgtaatgcaaattcttttctttcatagaataatacaagaagtataagacagggacctagtgaatcaagcttccagaactcagtttgttatttctgcttgttacatgctaccccatttgtcagtttttgaaatttgttgcttttatgcatgagtttaaggaaaaaaacaaaagaaaacaaaaacataaaattttgaaacagctcaaagtaaaaaaaattccattaaaaaaataagcacttcccagctggtggctatttattaacagtaataatttacagccaaattctgtcactgctaaagattgggaataatattccatttgtgtctcacagtgaaaacttttgaatcattataaagtaggaaaataaaaatttgttaagtgtcccagaaactt

SEQ ID NO: 134871 - DNA, 1057 bp, Homo sapiens
ggattgtaatgttaagtgggctcatgttttcagagtttgaaccagaccagcatttcctgtccttttttttagactcaagagttctctaagtaaagcaaaagtactgttaaataataggggaagaattttttcccttccaaagttaggtaaaaatatattcctcaccttaacaatagtatgtttcatgttcaagaaatgagactgagaaatcttttgttaaagcaacattaagcctatttagtattgaatataattctactgcaaatacttttgactgaaatgtattaatatcagtcaactatgggaatatatttaaatctagacagtatcttcttagaataagaaagggaagacctgttgtgagtgttggtggctacagtgttaaatgttttctgcctttgtttactgaaattagtaagtttgagtagttttcctttaattctgcttttatggtttttatttgtaatttttaaagaaacgagcaagaaaaatgtgtggtgtggtgagacagagccctggtattaaatccgaaatagtgatcatttcttttatttggaaatagtttctactatatgaatgtttgtaattttaagatacattttcaaaattagttatctcacatttaatgaatgtatgataattagcaggtacacaaattagtacaactaaaattgggtcacaattttatgatagtctttaaagcatttgaagtagaaatttgggattgttagaagtcatagctttaacataaaatagaaggagcaaagtatgtacagctacaacctttagttagaagagggaaagaaattaggaaaatcaagggagaagagcacagaagagacagtaatttgaaggtgactaagtgattacttttacccaggtttgaatggggaaagaatttagaagaattaaaaattgattagaagagtcggaagaattcaagttaagaagttaataatctttaaatatttttaatgtaagagattacttttcccccttgtgtttggcatctggttcagagatcaggtaaataatccagaccagttttagtctcagg

SEQ ID NO: 134872 - DNA, 1213 bp, Homo sapiens
cctgggcgggggcggaggtgtcccctgcgcggctccggcctgagcctcctgccctccccaaccggcggggcgctccgaggcgtgcagggaagggtgtgttccggcctcgccttccccgccttctcggcgcggctgggcaggaccgcatctcccgcgggcccccctctcgccgctgttccccgcggccgcagcccgcccccgcagggtgtacccacgcgtgccgcgccgccctgcagcccgcaagccccagacgtggcggtcccgtcccgtaggccgcgtctggctctgagtacaaaggcagctcttcgcagccctcttggcgtctcggggcagctccggtgtccttgtcgatgtggggagcccggccctgcagccgggccgggccggggccggggtctgggtctgtgcgcctgtgcttgcgatgtcctggttttggtgcgttcctgtgaggcccgtggacagcctctacggccctgaacctacagagcatctagaaataagagaaagttgtggcatttctagaatctaagagaagacgacagagctggagtgttttaagcgttttaactgtgggccaggtacatatttatgtatttttgtacctatttatcttgccccgcgtagccctcggagataagttgtctccacttcataagtgaggaaactgaggcctaaagttgtgatgtgtgtctggctgttgatggtacattacaaactggcttcggctcacactgtggctggtggtttctgtactacattcaaaaattaggctagggttacagacatgaccatttataatgtagttacaactttattccttttttactgtgttcgcattggatgacagctgattacccttttatgacctaaagtccataaagtcaaccactacactggcaaatcctcatgcttacaaaccccaaaggagagatgccaggatttcagtttcatatatgaagaagaaacgggttccaagaggacaggtgccttcctggtgaccccacagcaagtgtcagagcccagatttgaactcttgcaaagtttactgctcatttcgttactatcccaactgcctttaaaaaattcttttatttttctaaggtaaatattgtagaggaacaactgccttttatttagatttgattgttgaagacaaacttgaccttgcagtaatccagctcctacccctttattcccccaagcctttccaaat

SEQ ID NO: 134873 - DNA, 1898 bp, Homo sapiens
cagactggacaacagtgcgagactctgtctcaaaaaaaaaaaaaaaaaaagaaaaaaagaaagaaagaaaagaaaggagcagggaggtagagccctctgtaccctccatcaccagaaaaagctgaagaggggctgagtaggagggacagatgctggccagggcacaggttttgaagcataaaactcttgccctgtttgctgactcgttgagacagggtgcccagaaggggatagacttccctggggcgtggggagagcaggaggctcaagtgagatgctcttggtgctagaaaccgccctccctcatgcctggggtctctccctgccaggaccctgccccgcttaggctctgccctgtctcatcccagcccaacagcatggtggtggaacaccccgagttcctcaaggcagggaaggagcctggcctgcagatctggcgtgtggagaagttcgatctggtgcccgtgcccaccaacctttatggagacttcttcacgggcgacgcctacgtcatcctgaagacagtgcagctgaggaacggaaatctgcagtatgacctccactactggctgggtgaggctggccctgcccagcccctgccccagcccccattctgaacagtgcagacctttggggcatggtccccagggagggaactgattattgagcacctagtatgtgctgggcccttgactggtggttcatgccctgagacgctagagccagcctggccaagttcacacccccactctgcccctaacccatgttctgtcctttggcaagtcacttagtgtccctgtggagtggacatgatgatagctctgcactacctcacaggaatgttgtgagcgttaaacaccttactgtgacactcagaactgtgggtgaattggagaccctggacctctccacaacttccctggcccagctccaggcactccccagtttgcccttgagtcaggagcccggagtccctgccacacctctgccgtgggatgctataagttctgcccccttgctgagcctcagtttcctaatctgtgaattgatctgatgctcccagtcctgagtttacgctcaggagggctgagaatgaacataagggaatgtgacagagctgggaggacgcttagagaaaaatgaggtccatcgtcctgttatacagatggattaactgaggctcacagaaggcaagggctttctcagcttctacagctaggtcagggcagtgctggggttcctcctccacctcctcttcctcaggggtctgggatacttctggaaagccaggctcatattgctctgatgtcccgtaggcaatgagtgcagccaggatgagagcggggcggccgccatctttaccgtgcagctggatgactacctgaacggccgggccgtgcagcaccgtgaggtccagggcttcgagtcggccaccttcctaggctacttcaagtctggcctgaagtacaaggtgggttgggccccaccttgcttgagcggtagggacagatgcaccagtaacagggctcactcaggcccatctatcttttggccttgtgatgcagtgggcagaccgatcagaggtcaggctttggagtcaaccaacattgtgtttaaatcctggcctctttctagccatgtgagcttggacaaatcacactgcctttctgagcctctggttccttatcttaaaatggggagaagaaaattccccataagttcatagtgttgtcttcctagccccaacagtgaggagtgggccagaggtgaaaatccagttcttcttgcaggccctggggggctttggcctagtcctgttctggtaccccttaattcttaaggccttgccaacagagggccccgtgttaagtatttaatagggcattgttagtcacatc

SEQ ID NO: 134874 - DNA, 2081 bp, Homo sapiens
ctatcaactgaaccaaaaataacttgtcataggcagagataaagccagaaacactctacacatgccagatgacatctggagaaaagggtgctaagggaagcgtttggcagcaagatatgattgtaaggggttgtcccttgagttcaatgtctgcctatttctgatgggtctaaagcaacatggagttactgtgcagcagaactctcagtaaagacaccatttgccttggcaatcctcaaaaagcttcaatagcagattgcttcagaccatctgtagtccgtccttttctcatctggatgttgtttggcttctgtgcgaaagattggtggagtgtcccagtagatatcatggtggtgtgtgatcagagtcccaaggaacctgaatgagccaaggtgcccagcatgaagtcaaaacaaagccttgacatgagtttgccatgaaatagcgaagagagagtggaagagaggagccaatcactgtggggcagtgccaccctgagggcacttagggtatggggttggtgcttaaatacatcacagatccaggtactgaatgggaggaagtgtgggtgatttccaatctcattgaccctatgttcagggacttgaacggaagatgtttcttgtgttgcctaagtggtattcagtctaccagactctgcaacttgcatcttcaaatccttggtaaagagatgtggatggtgtcagagaaggcaaaggcctgcagtggattgaagaggcttgcaagcagttctgtttctaggatgtgggcttcatcagaagacactcggtcaccacttagctagtctaaacctcagggttcctcagcccatcataccccaacttggaggactgacatcaaggagtagactggagaaacagccctcccatcaagtaacctcttgttctctcctgctccatctgcactatagaagtgtaataattagacatacttggcaaaatggctaattgatttggtaacagaagcatgagccataacaatggaagatctagttatcatgactgaacagcttaacattcaattcccttctctaagagaagctgtgaaatcctacatattatttaaagttaaccaaatcaatgtaaagggagttaggagacagtgtgtacctatgcacgtatatttatgttttgcttgtgttccagtctcggtcatttgtttccattttcaagcaatttatttgaagagccattgcactagcctgatgtatactgcaatgagcttctttgataaaatgaaacttagatttttctcgaccatttcaccgtgcctcctacttcattttttgccagaaaatctcacatccaacaaaacaaaacaaaaaccctgaattagtgggctttgaaaaggaaaaagcagggctttgaaaaagtagatcacacatcagttaagactcctgcttctctattagtcaggttgtcttggattcagtctggagtaggcagagcttaagggtttttaagtcctgacccaaagaaatgatctagcctgaaagtttagagcaaaggactaatgtttacttttaaaggaatttcttgatttttttaaaaaacttcattaaagtttaaatccccaatggacaaattcataatcttgttaatcgttattactaaactttttaaaaaatgtcccaatttacaattaaataaattactttctcagtatattctggtctggtcatggattgtgcatttcctcccaaagatattcaaaattgtcaattagagaattttaggttttcagactcagaaaagtcctcacgcccttctgaaaatgtgtccactattacagaaatagaacagacttgggattcccaaatttttgtttgtttttgagacagagtctcactctgtcacccatgctggagttcagtggtgtgatcatggttcactgcagccccgacctcctgggctcaagtgatcctctcacctcagcctcctgaatagctgggactacaggcaccaccacgccccactaattaagaaaaaaacgtttttatagaaatgtggtctcactatgttgcctaggctggtctcaaactcctgggcttaagtgatcct

SEQ ID NO: 134875 - DNA, 1050 bp, Homo sapiens
gaatagatcctgtactaagcttcctgtaaaacccagagcagttgagaacacatgctctcttggactggctggctcctaagagccagaggagaggaaggatagggtagtgcatgtctagttctagttgctcttccaaaattggcagtgagataagtcattccagctccccacggactgagtgactgaatggtggagagtagccggggtattacactaacatgaaaacacacctggggtaggagaaatcattctcctactaaccataaaatatagacaagatgattttacatcacgtggtttctttcaggaatcccagcatgtggtttctttcaggaaacccacatgtgggttttttcagcttgtggtttctttcaggaatcccagaggataaatgttttgcttttcttctttgtttcagatataatgatcattacttggaggagttcataacatctgctaataggtacttcatggttggccacaaagtcatattttacatcatggtggatgatgtctccaagctgccgtttatagagctgggtcctctgcattccttcaaaatgtttgaggtcaagccagagaagaggtggcaagacatcagcatgatgcgtatgaagatcactggggagcacatcttggcccacatccaacacgaggtcgacttcctcttctgcatggatgtggaccaggtcttccaagaccattttggggtggagaccctaggccagtcagtggctcagctacaggctggcggtacaaggcagatccctatgactttacctaggagaggtggaaagagtcagcaggatacattccatttggccaggggatttttattaccatgcagccatttctggaggaacacccattcaggttctcaacatcacccaggagtgctttaagggaatcctcctggacaagaaaaatgacatagaagccaagtggcatgatgaaagccacctaaacaagtatttccttctcaataaaccctctaaaatcttatccctaaaatactgctgggattatcatataggcctgccttcagatatt

SEQ ID NO: 134876 - DNA, 2067 bp, Homo sapiens
acactcggctaatttttgtatttttagtagagacagggtttcaccacgttggccaggctggtctctaactcctgacaggtgatctgcccaccttggcctcccaaattgctgagattataggcgtgatccaccatgcctggcctgggctaaagtttagattgcaggaaagacaatcataaactaaaatgttcttagaagaattgtcttatcaagtttccctcaccccccctgaaataacctgagggttgctgggtcattaaattgttaactgtggtgacttggaagggtaatgagttgagtactgcatcttttcatcaaaaatatgtctttatgaataaacgcttagtgcctagagcctttttctggtcagttcacttagtgcatgcataatctgccttggaacacatttccacaagatattcaccagttctctgaccaccgcaatcaccttccctgccttacctggtttactttccctttgtacttaggatccacaattatcaacaaggggaagaagacatagacaaagaaaaaggaagagaggagaccaaaggaaggaaaatgacacaacagagcttcggctatgggactggtttaatccaaagtaagaaaagcggcgtcactccctgtgcagcaaatccatggccctgcagggggtggtgtggcagtggaggcaacagtgccattgagaacattcctgatttaggagaaagagccttagcatattagacctttaacagtagacatatgtatatgtgcatctatttgattgtgatgtaaagtatatttctcactgtgagttatggtcaaaaacactgtgctaggcattgtgttagggagaggagacaggagaaatcaatcaacatggttgtatttgagaagttcatggtctcacaggggtcgttactgtgaaactattatttgcctagattggtaggaggcaggatcaactggaaggatgtggttctgggagtgaggagatgggagctgtccagggtgactttgagacctgagagactggtgggtgatggtgccattggccagaaaggggactggaggaggagacacaggcctcagagctgggggaggtggggacctccattaggaatgcatgtggatgcaggtgcttatgggacatctggacagagtcacagggtgctcctgagcttagcagatggtatgtgctggagatgtgcaatgaggtatcatcagagtaatcaggagagaatggaatccttttttttcatttgatttttaatttttattcattttgagacaggatcttgctctgtcacccaggctggagcgcagtggtgcaatcgtggctcactgcagccttgacctcccaggcttagcctcctgagtaaggaggcttggtgtgcgccaccacggccagctaatttttaattcttttgtagagacagggtcttactatgttgtccaggttgctcttgaactcctgggcttaagtgatcctcccaccttggcctcccaaagtgctgggattacaggtgtgagccaccatgcccagcctgaaaatagcatctatcccattgtgaaggagcttgggctctggaaagactgaatatgttctggcaacttctcttattgtttggggataagggatccatgccagtgtgaagggatgggaattttggcttcccatatgtcatttgatgatctgcacaacagggtaggcatctctgaaatgctaaaccactcatagaaatgtgagaagatggaagcattgttgctttgataaagccccttagatggggcaatgagactccgccagggacaggctagatgggccagagatggtccccaaagtcccttctaaggagaatggggcaattttactgtggtacttgttctttgctgagcaggacttgggaggtggggctggggctgaatgactgggggcagagaggagggacagaccatagtcaccagctttcaccctcttcactcttccccttgcatggcttcatctccaaatgagtagggagcagatatttatttttaatttatcttatcttatcctttatttatttatttatttattta

SEQ ID NO: 134877 - DNA, 1044 bp, Homo sapiens
gatggagagcaagtaagctactgcctcttcctcttcttgtaaggacactaattccttcatgggggtcctactcccacgacctcatctaaacctaattacgtcccaaaagccccacctccaaatatcatcgcactgagggcagggcctccacatacgaattttgaagagatacaacattcacttcgtaacagtcatcatcatcatgatctgctccagagggcagaacaagaaagattttggtaaatagaagagctctagcagttggaagagtccaacagaagaacaagtaccctttggggttcctgcctggagtcggaatgtctgcttggataaccttcaagctctgagtttgaacacttgatcagataactttggtgtttggaattgtagccagagttgtatgtgcataactgagccaaaggctgaaacgtgcatgtatataccagcctctctgggcacactctctctgcatggtagccagagcaggttctggctgctcttcaggctaatcgtctggcacctggactctggccacaacatcctctgatgtgcagaatccacttgaacatctgcaaaaaacttcaaggggaggagttgttttttgtttttttttttttgtttgttttgtttttttgccactttacgaattggccacatgataggttgaggtgagccgaggacacaaaccttacacaggtaggcagcactaagctaaaatggattaaaaataactaactcaagcatgtcaaccaattagtaaatagaagaattgtcagtaaagcgtattgaaagaatatcatctaggatagcatttgatttcaggctggatgaaaaaataatcttcgaattttagagaattagaggaagccttcaaaattatgatgaaatattcatgatagtggtgatcatgatgggaactacaagttattgagggcatgtgccaggacccttgctatgcattacctccgattctttttgttttgttttgttttgtttttgtttttgtttttgttttgagatggagtctcagtactttggaaggct

SEQ ID NO: 134878 - DNA, 1087 bp, Homo sapiens
caaagactgacaaacattccaaatataacaaaatccagaaaacaacgacataagaaaatgatgtaaaactaatacaaaaatgattagtattacttaactgtctgatacacctgtcatgtttgggctacatactctttgactgccacattatctgacaacagttttctagaatcatttccaataaaagagaaaagacagataaatcagttttgcctgtggcatggttaatcaatgggtgctttttattactgagagtttagagcaatttattttagcttcccaatttgttattggcgatgccacttctctaagtcatttgacagtttctcaggtggctccagccagatcatgagaaaactcagccctggatccttgctaggcacagtgaggcagacgaacctgggtggagcacgaggtggctgtgagacctggatcatagtgacccctgagcagggagcagagagagtagtgtgtagttcatctccttcttcttgaggccaaaggaggaggggcccaggtgctcaacaaggtccacctgggaccggttgtttctgggacctaggtgggtgtgcaggtaatgggtcagcaccccagctcagcctgcagcccctggacaggcactgaggctagagagtgactctcccaggcaaggcaacactctacctctgggaagcatttggggctttctcatgctcaccctaatgggaaatcaggcccagtcttgcaaaggggcttgtgcacatgaggaccctgacacctaagcgtcattagctcctggtaagtcagcctctgcattcagcgcatattggttggtggttcctatgcatgatctgagccaaaaggctgagaagtgatagttgatgaatcctatcatttgatcatcacaccaaggggcccgtgtaggtcactgcagcagggtgagctctatgtggctaaaagaactgccctcaaaaaatgaggtttacatccctgaggctgatttctcatgcacatcctgggttcatcagagaagaactggggattactggggaatcttagctccaaaggacttgtttctgggccaaggagtctgaggccagagaaactc

SEQ ID NO: 134879 - DNA, 1064 bp, Homo sapiens
gtgccgcggagggtggcaggcccgctggccgaggcactgccgaggccgtccgagatgggagctggcggtgcctccttccgcgccctcgcctgggcctccctgcccctgctggggcctccagcctgcgcgctctgcgaggacacgctctgctgcggaggtaaggccgtgcgcctccaggcgcgccctcgccctacgcgggcacttgcccggggcctgtttctcctccttggccccagatccgcgactggcggcaaggtgaggacgaacacaggcatccgcgtagggctgggaaaaggaggcaggagctctcagcaaacccacctttagctggaaaacgtcgctgtcccgccaccacggtccgaaaagcgttcgccccgctctggcctcagtgtgcctatctgggaaatgggtcaataagatagtcacgctttaatattcagtcacgcttgctgaagcgggtcgcagacgttcgcgggacgttccctccagccagctggagtcctcgggagtttctgttggtgggagtgctggggtgccttccctgtgacaccccgcactgtccccttcccaagctctagttccccccattagtccccggctcctgaggttggagatccacgcagggcgcacataaaagtttaaggggtcagcggatgcgggaagattctagcgggaaggggagctgtagggtggaagagggataagtaaagcaaagtcgcggcccactcctcggtcccgtaccctcatagcgccgaaacggaagcagaggttatctctggactcctggaggcctggggactccgggaggggagggggcgtgtggtcccgccggcatctcgggccggcaccaggctggggagcgtgtgctcggagcggagggcctcggctctgcccagtccggcctgggcggggcggtggtggggaggtcgattgaccaaacaggtgcgcccccgcccctctgctccccgcccgcgctgggtcccgggcctggcgggcggagctgtgggcggctgggcctgcgattggcagggctgggcaggccgggtggccgcgggagcccggga

SEQ ID NO: 134880 - DNA, 1035 bp, Homo sapiens
tgtatgtttattaactctttgctccttccctagctaggccaaggcccctggtgggcaggacaggagctaagcaagatgtaagctggacagaccattggaaatcttctggtgcgatctatccattttagaattagggggatagaggcctgggtttgcctaaaacttcatgacaagttcctggcagagctgggattcaaacctggatctccagggctatcttggtccttggctgcaacatcacccacttctcagagccaccctgcttctcagctccaagagccaagaattcccagctctgcaagaatcccagttttgcagccttggctcctcctggggctgggagccagcaacgccaagcctgcaggttcccagagagggctcctggcgtcggtgtggcttagtcacagggatgagatcactactcacctctggataggggaggatgccaaggtttgggaactttcactctgagctacttgattttgtgtatgtgtgtgtgtgtgtgtgtgtgtataagaaaaacaaaccttttggttgggactttgtacttggctcatgaactgtgggcttggggaagctgctgagccatgataagcacttgtactgtgccatctcacagcttcccaggatagtggctctgtgttaggaaggagcttggaccagagccagaacctggtgttagcatttgctctgcctcacattggctgtgtgaccctgagtacggtgcatggcctctctgggctgtaatgataatacctagcagctcacactttctgagtacttcccatggaccagccactcggctcatcagcccatttagttctcacaatagacctgtgagatcctgttttcacctctgttttgcagatgaggaaactgagtcccagagaggaggagtgacttgcctaaggtcacccagctgggaagggcagagccagggttggaatgcaggtcttcccaactccaaagcctctcgtgtcaggcactctgctgccctgccctctagctgcagggctacctcctaagggattgtgg

SEQ ID NO: 134881 - DNA, 1054 bp, Homo sapiens
cctcccaggttcaagcgattctcctgcctcagccttctgagtagctgggactataggggtgcaccaccgcgttcggctactttttgtatttttagtagagacagggtttcgtcctgttggccaggctggtcttgaactcctgacctcaggtgatccacgagcctcggcctcccaaagtgctggtattacaggtgtgagccaccgtgctgggcctcttttcctttcagaagttatctcaagcactgtgccctccatgaaatttcctatggcccctcaaccttaactgccttagtgtatccttgttacgccttatgtctgcaatagttgtcggcccaagtatgttccatggaatggtaacctggtaagatgctttgtagaaaagaaggttaagaaaaggctgctgaatactttatgtacctgttttgtatagtaccaatccatatgaacaattttaaaggttctgagaaatcctgcagtaaagaaacctgctgagatttgtttactccagaactttccaaacctctgactgtagaacactttcttcttggaatgcctattgataagctttgcgacactcctggagaggtggcgttgtagacatctatataacagtttgatgctatctcctcttataatgaaggaaaccaaagcccagagaactcagtgactagcctcaggtaaatcccagtgtctaccactccatcacctcttgggtcaattggcaggtcctttataatgagtgtccaaggctgggtggcaaggaagggctggacatggtagccaaggacctgctttcaaataactttctttctttttttttttttttgagacagtctcactttgttgcccaggccagagtgcagtggcacaatctcagctcactgcaaccttggcctccctggttcaagcgattctcctgcctcagcctcccgagtagctgggattacaggtgcgcaccaccatgcccggctaattttatatttttagtagagacagggcctcaccatattgaccaggctggtctcgaactcctggtctcaagtgatccacctcc

SEQ ID NO: 134882 - DNA, 1082 bp, Homo sapiens
tccagacacactggaccctcattcctgttgtggtgctcagtagccctgtgaccttgggctggtgactgcaccctgagcctcagcttctgctctggtcattggtagcttggctgagtatagcagatgggacacaggttatgggtgacagcctcccagagggaggtggcatgtgctgtcacagaggacaggagggtgctccaggtgggtggtgcgaaggggtgagagatgaaggcagacaggaaagcatgggaagaattttcctagcaaaacctccagaaagagtggttatcccctgactgtgactagagagattgtggaggaggaggtccaaggaaagttctaagcaggaagcaccgtgcgggaacagcaagggccttaagagacggcgccaggctgaggatgagccatgtgggaagggagcttttctggaagaggcgcctggggctggatggtctggacctggtgtcaatgcctgccccaggcctgcctggaggtcagcgggcctgaaccagtctcaggacagctttgcctgcttggccatgagccaaggctcaggatgaagcctgtgcttctgtggactcctgtccatgtgactgtgtggagggaatggcctggaaagcacacagtgccccagcatcctgttctgccttctggaaagcctgctccttgtgtgaaccccatgtcatctgtcctgtgtgtgtgtgcgcacgtcccctgctcagtaggtacctggggtgggtctgggagtgtacacattggagtatctgcatgaatataaacatgcacatgtgtttgtctgggcattaccgtctcactccacacccctgtgtgttcacacctaccagggaaacctctgccctgtccttcttctcccttgcgagtcaacaggtctttcccaggcaccccccacgcaccaggctccatgcagggtgctggggaggtggagatgcaaccagcttaggcgtaggtgttaggagttctgcagacgcacacacacacacacactcacacacacacgcacacacactgcaaatgagagcgttgataggagactcaggtctagttattgctgtaggagccaa

SEQ ID NO: 134883 - DNA, 1079 bp, Homo sapiens
tcagtagccactgagcctctccgagccttgtgttcttgacagtaaaatctggaatgacagactttgcttggactgtggacttggtgaatgtggtcgcccaagtctgacccatggtaggtgcttcatggatgaaatccatcattaacatccaaatcgggtttccatttttggctgtaaaacatcagtaaagatctaggagggttggagtacaggcagaggacaaggtgtttgggggaaggtcagtggtgagcctggcctgggccttggggacagtccctcacacagaccctgtgcagggccagaagcaccctcctccctcccctagcccgtagcacacacttgctcacttacaggctcccaaaagctatgtcctcacgtgctcagctgacttttgctctgtgtagaccctcgagggaacccaggaaacatggttttgcctcggggaggcaggggagatgccacaggatgtactggaataactgccaccttcactgccatttcaaacccagatggcaggctgtcagcatctcttacaggggtgctccgcagggagaatcaatgagtcacggtgtaaggtctacaaggctcagcctgtccaccttctccatggaaactgaggcctgggaagggcttgtcagaggtcaccacccagctgacagcagttcaggagcctgggttgtttacaccatcacatgccacccctcctcattttgtgagtcagccgaggacctgcagccactctgtagggcattgaaggctcagtgctagtcctgcccctgcctcttgtagactgtatgaccctgggagagcctcagtttccccttttgtgaaatgtgggggatggactttgtaaggcagcgtacagttcaggcataaataggtgcttaaatgttctggtgcagtagctaagagaatgggctctagagagttccccgacccaggtttcaggccctgcacagcctcataccagctttgtggcttgctcaggagtggaacttttctgcctatctgggacaactccctccctcctatagggagagttggggggtaggggagtggctctccaggaccacacagtg

SEQ ID NO: 134884 - DNA, 1229 bp, Homo sapiens
ggctaagtttcttccatgcgtgatctcattgaatcttcacaactacctcgtccccattttacagaagaggacacaggcatagaaggttaagtcatgagcccaaggccccagagccattaagtggtggaatcccctgctcccaccttcttccggaggaaggatgaaaattatttacattttacctggggattcctagagattgaattacccttaggacctaaagaggtgtgtcaaacagtggaatttcagctgtactgatgggcaggagaaatgtttagggcaggaagcttcagctcttgccagggaacagaactccaaaagtcacaggttctgggagctgtaagctgtaaaaacgagctttgagtgtgagagaagcaaacaaattgtccaaagtgaagccctgcgagaaaagcagggggagttatcttggaagccgttaagagctgttttcttgccttggtcctgagatctgggctcctaactctggagcttcctgggccacttgcccttcctgtcctggttgtgaatgtgagcacgtgagggccagcgtgtttagcttgtgtgtctgcacaattctgctggtgcctgatgatagctgagtacatgtgtatatttattggcttatttcagtgtatttgtatgttagcttgtatgtttcatggctgtgtatgtgtgtattcgtgtgtgtgctgatcaatgtgtatgtgtttgtgtgtgtctgtatgtgtggtggcactggggtacttgtatgcttacacatacatttctttgtgggatgcctttcctgtgtgcatttgtatgcatgcctgtccttgaacttgtgtatgtttctggccctgtatatttctctatgagaacatgtttaagtgtgtctttccaggcagtattttaactcaacagtgaccctagagtgtcagggtccagcctcttcctggggcttccctgaaggctctcaaggcctatgaattggttttctttgtttgacttaagtagtctggctaccttctccaggcggaatatgtggcgatctcactggtatgagattgtagaggattctgtgggcatagggtggcctgtgagtaggtggccaccaggaagtcaccaacttaatcccagcttaaggtgcctcccctctttcgcctgtcacagtgtctgacattccattagtgagtcattctccagctgggactctctttgatggtgcatacccttgaggggaggaggccaga

SEQ ID NO: 134885 - DNA, 2655 bp, Homo sapiens
atctcgcttcccatctttgttattgtctgggcggcaggccacccggtttgctgccttcctccctccaccgggcccctgccttcggctgtcttccccaggaacatgcccttctccgcgctttccttggcgggggtcaggaccctctgcacccgcatgcgggggcttgtgtacgtaccccgttttgtgtgcatgtggtggttgtccggggagcaggagagacaacaggcagtccggcttctgagtgtgtctgctctcccgggagcaggcggcatgcatgtcatgtttacctccttacagcgggaagcctgtacctagaagccggcaagtgctggctggccaccctagccagaggtcggggcatggccaagacgacctcgtgcgggtcctgccccacttggcctcaggtcagccttgccacatgctgaaggggcgcagagtgggggttgggagtgaaactacaagcctgtttctggaaacagtaggaaacggtagcggttggagcagaatgtcactggcagcggtgtggaattgtcttattaattttctataaacaaaatatggcttggtggcctctctggcacaggaagggagcctagatttcccatggacaggcagaaagactgggtttgaaatctctctacccagccttggagctgaaataggctttcccaggactggggtctcctgatttgctgctttgcttaggaacagattcgtcggctgctgctgggatggatgggcagaaatttctctggggctgtccctggagtcatcctatttggagttcagtgagtaaaaacaactatggtgaccccgcccgccccccagctcatggccaaacctggatgagtggagcagtgcctctccctgctctgatgtggtgtggttgtgatgttgaaggctgggagggcaggatgggctgtctttggcttggtttagcagcaaggaagggttgtgtcctggctccatgggacccccactggctgccatgcctctggctggggagagggtaagtgccaagacgctagcctcagtgagtgggtgggacacgagtgggaaggacggtgggggcttctagggtgtcgagcgggagtcctggtccccatggccttcccgtgtagatgagcggcacagggcactctggggcggccacttgagttctgactttggatgaatctatctggtttatatggctgctgaagaggctttgttgaatgctgtctgcgtgctccgcaagctgctgtgttggggaggtggtttttttgcgctggaattctctcatctggaggttggaaaccagttggttctgtgctgggatttttttggctccctggaaaaggagtcggtttcaggggtggggatgccgaacctggctggttgggattgagggttgctatctggttgtgaggctggggtcaggccaggcagtgcttggttggcacagctgggctctgggggctgggggctgtaggacaggcttgagccttcggacttattcttctgaaacggcctcaggggaggttgccagctggtctccacagtctctgggtccctcagacactcatttcttcttcagaagctttggcagtaagcaccaaggacaggtgatcatttctcctgggtaacaaacacatgctgcttggagcgctttccaggtgaaaggtgtgccggcaaaagcattttcattttgcacactggaaatgctgctgcttcatttacagggctgttttaatgttggtaaaagtgatatagaggatgtggttctgtcagcccagaggataatttccaagtcattcatttatttattaatgttactgaggagctaggagggtcagttggcaatattatgctttcctcattccttctctctcctgatgctgtttctgggtgactctagccctccacacctgctgggaatatgcttcctttggcatgctacctgtctaaacttaccacagtagttactctaaagtgtctgtacccccatcaagctcttcccagtcatcctggtgcggagcttagctcataaatgcaggcagctctggggcaggtaggcaaggctgctatgtgtggagttagggatcgattcccccttccagagtatgtgtgtgctggctggcgttcccacacctgaaagttactaatggtggaattccaagtgataagggactagggaaggagatacagtacttggatgttggggatggcagcttccagggaccctcacctggacctgggtaggcaggaatcaattctgccccttgtggtgagacagtccctggaggagggagagtgaggaaggttgatgaggaacaggggaaatggaagttagggtctattttcctgctttagttgctgacagtaagtgcaggcaggactgggcacccaagtctggtgtttcttgcccttgttccctcccctactatagacagggagggcctggtcctttttttggggactagtctgtctagtgtggtgatgtcaagatgatagtgcagtttagacaattgccaggagtcatgggatgtatgtgatctttggatttgaagccaagcattcctggggcaagtcacgtaaccttttgcagcctcagtttgctcatctgcagaatgggcatcatgataatcatgttgttgaagacattaacattaatac

SEQ ID NO: 134886 - DNA, 1010 bp, Homo sapiens
taatcagaacgttgtattgcagctgcagattgttagcaggtgaaggatgtgtgagcctcaacaattactgtttctggcttgggaggagattgattaatagattgttcccagccccaccccctctgcttcttactcccgtttgtgctttctttccctctttccaacttcaccacatttcgtcaggaaactaagtggctatgactaaatccctactcttgtactagaaacccagggcagaggaggacctgtatgaggaggaattgcctaggacacctgataaaatgcagattcttggactccaccccagaccttctgaattataccctctgggtggggtggtcttgcttccccaaagtttgctccttttgcagaggggcaggcattgtgccccagctgtgtgctagtgacttgcctaagcacttcctgtgctgtattcttactgatttctcatagcaagagggctttttgtttcccatttcacaggtgtagaaactgaaacccgatgtgtgagtggcccaaagtcacacactggaggaaacccagtaaccaggcaagtccattccctggttgatgtcaagatcccaccagtagcatgtcatgtcctttctcattaaggctgtgatgccttttgaaataaaccctctccctcctcagagaagtagcagtagcccccttctgtgcttgcactaggctcccattgtgaaaagctcctgcacaccagtgccctgggtctcctgagggtgcttggaacagtcagggcattcatgactgatctgcattttgcagctgtggtgggtgacgctcagagaggtgaaggggcagaggcaaggggagctggaacttgtctcctaactccaggtccagtgctcagcccacctgtgccaccaaggcctgctcttctcactgacttcctggttgcaggtggggaaactgaggttcagggaagtgtacccatttacttaggattgagcgagcagcagtaatgcaattcaaggtccgccaagtcaaat

SEQ ID NO: 134887 - DNA, 1515 bp, Homo sapiens
cttccatagcacttcccttcctccaaggtcagaagaacatagaggtgacttccatcactacccaggagggtgaaggcaaacagggtgatgatgatggtggccagggactcccccaccagcctctgctcaggatctgtgggaagatgggtgaagctggcgctgaaatccccagccaccccaggcagtactacagcagactcaccaagggagttgcctattgtgctgcaggccacactgccctggtgtcaccaccttctgtggactggatgtgacgtagggaagtggtagtgccagggccagatgttctgcccggagcccatccagcctgcctgaggtggtcttgctcagttgccctaggatcataaagtccacgaatttgatggttgtttatgaggatagtgaaaacctattccagagagtttcagaattaaggaaaaatggagctggcagagaacttagtcttagagtctgtacaagccaggggtgcacttgaaaggccttgttgtctttcgtacctctgctgcttattgttcagagcacccataggagtgttttcccgaactgggttccatggaacacattcttaaagatgttaatgggcgtttgcgatgagagaattccatagtccaaacaggactggggagcagtctgtccagagtttctcaaactcagtgtcagaggttcttggaggtgagacttgatgttttactccagtggggtgattgtgtgctcaaatacattttacatcctcaaattttgcttcctcattcttgggaaatcatttgtgacccaggagatgaaaggccctgagaggtcctgcaatgaagaagtcagttttgctttgtttaatccagggtttcctgtcccccaaccccaggagcagctgttaacatctgtggagcagttgtattttgcagaacattatttggtaaacattcttttgaggtgttatgtctcctcagaagcatgttttggaggaaactctggaagtgttccctgcccttagtacctgcaggagtaagccttgaatgatggcattgctggctcagcaacaggtagtgggtcatatgtatttgaaaaaagtcatcctaggtcctcaatatcattcctcaaagcagctaccagctctcctgtgtgtgggatggggcctggctctggtcagagagccctctgtggggaggtggtttgtctgggaccagcctaggcctagggtgtaggggtttattcccctttttgcaggctgggtggcgtccatgtacctggcagcttgggctctgggcctccccatccccctctagactccctctgcagaaggcagtggtcaggcagaggctgcccacagatttgcataattgcaccgtctcctgaataattaataaagctctgtccttgctgggagcaaagtctgcaccgttatggatgggtttgccatggataggtttgccggagctcttccaggggagccgatggttcctggactcctctgcttttcctggcatggagcccccagagaga

SEQ ID NO: 134888 - DNA, 2089 bp, Homo sapiens
ggggagctctttccacctggagcggcccctgcccttggaggacagtgccaactcttgtaaacttccccctttgtggagcttccccaggcagcatttatgtggcaccttgtcattccccacatggccctcacaccagctaggaaggtggcagggcagggattattccattttatagataaggtaactgaggcccagagcgggtaattgtctcacccaggggcacatagagttgatatttaaacccacgtctgccagctgggccttcagctctttcctcttggccaccaagaaaccatttgctccctggatagatgtcagtatgttggctggggtggggccttaggacctgttgctctgacagtgcccttcccagcttgcttggagtgtctagagggtggaggcaggagtgagtgaaagccttccttcagggtttccaagctgtggggcctggctttggagccatttgtagacaggggcctaaaaccgccagatgcctgcttatcacaccattcccgactctcacccttttccttctcctgccctcttgttgtagggtgggaatgtttgaggtgccccagaaactgggtatgcactcaactttggccagtagtggtggtgcaggggtgaaggagcagggcagggggttccagctggcttgtctttctccaggccttcctgagagttactggacaagcttggtggatggccaggggagcctggggtgaatttgttcacagcagctgggcttagaggctgcaccggggctgagatgtgacttcaggactcaggccaactgttttatatctcaaaaatcttgggttataccatacaccatgaaaggtactgcattgccacacctgacacttccattctggtcccaaagcaagccacacgggggctctctgatgaacagaatcctgctctgctgacacatggacccagatccagatccgacgccctgacttcctccatgatctgggacaagtcacctaatctctgaacctctgtctcctcatttttaaatgggcaccatgattgtggtgcctacctcccagggttttgaggtctacatgggatcatgttacatggtaatttgatcatattctgtcatcacacacatgtactcacattctcacacaccatgcttttgcttttttgtttgagatcccacaacctgccagcacatccaacccagtcttcccagggtccacctcatcatatatatagcaagagatggcccaagacacatgaagtgatgtttgtgctgacatttctcccacttagaaaatcaatattctgtggtctgcctaattgctctgttgctgctaaatgagtcattatggagggaaaatagcaaatgcattgtgagattaatgggagaaaatggttggcaaatgactttggtttgcttcggaaactctgagaaggtgttactacgtgaaatctgcagagccatgcaaggccgagtcctgagcagcagggagacaggcaggcagctattggcgctgtgagcctcccttttagggcggggcaccgattcaaatattatagaggctggactcaggagttactgagtgatgaagtcaggagccaacaatgggacaggtgctctgacaacctggtctcaaagaagaggatactcttcagttagagccagttacatgccaggcatggtgctaagctgagggatgtaatggtgagcaaaaccagccccagctcctcccctagtggaggacacaggctgaagtgcaattgtcctacaggtgactgtgtaattgcaattaaggcatgtgtcctgaaggcagtgagagcccagatctgaagggtttcatctggtgggggtggtggggagggcctccccgatgacaaaaggagtaagctgagctctcagggaagaaccttctgggcagtgggagaactcgtgcagtcctgttgggtcttataggaggggctgccacgggacttgtatggccttaaccctccagccatcctaagaagtggatatttctcgtttcacaagcgaggaaaccaggactgaaggtggttaagagacttgccagaggtcatagaacccttaaatggcagagtc

SEQ ID NO: 134889 - DNA, 1032 bp, Homo sapiens
tgtatttttagtacagacagggtttcactgtgttagccaggatggtgtcgatctcctgacctcgtgatctgcctgcctcggcctcccaaagtgctgggattacaggcctgagccactgcacccggccatgacttgggtagttttctgatgatcaaaatgccaggtcaactagtgactcctctttcaaaaggctctgtaaataacacacttctctccccatgaaatgggttggtttattccctgcctctaatcccagctggactgtcatcaggtagggcctatcagttgtctgcagaggtgggtggaggtatggtcacctgaaggtgcttctaaggaaggtgcttgtgagttcttgtaaacttcccaaggtttcaggagtggcagcagcagataaggagagtccaggcatttcctgtgggcattatgaaggagcaccagaggcatcccactttgtcttggtgcctggttgtagctgagcatcatagtgccatgagaacctggtaaaaagattctggagccccaccctgggagggtcagggtcacaggtctaaggggggctctggaatctgtattcctgacaagccccaggtgattctgagacccactcaagtgttgagatccccagttagcagctctggattcttccgtctctgagagggtcacaggcctccaagggatggtggtagtggagtatacttttatcttcctgggctggatgtaacactgcctgctgccagctcaggaagccaggccacactgtgcccatagggccacatgtaaggcagagcctggtgctcagctgaaccccaggtgaggcaggaacttggcctgggatgctttgctactgctattgtccggaaactgagtttcatcccaaacttaggtctgactggctgtgccctgtcccttgcgaaatataaactgcagcccttcctggcgagaggctaagtgtttatgtgggctggttgcagagcccagctctttgtcctgctcaggttccatttccaaaataattctgcttagttcttcaca

SEQ ID NO: 134890 - DNA, 1060 bp, Homo sapiens
tttaacagaagtcctggggatcactgtccatgggctggggaggaatccggccaccttttttagaaggcaggaaggtgccaggatcactgctcttactttggttgggctctaggtggcacagcttctgatgtaaagatcaaataacaatagggagatctggatgcagcctgaaggctcaccccagtgtcttgctgcaggtgtgcccagctgtgggaccaggaccccaggaaggaagggcattgttctgtccctgctgtgggagtctctcagggaagcagcatagcactcaggaaatcctgggcaccgtgaagggctgtgtatttattccttattccacaaacaataagcaagtccctgctgtgtgccaggcactgagtgggatcctgggagaaggattgatgtgttgtgggtcctgccatgtcctgcctgttgtgacagtccaccactgtagtggcatctgtgtccatctggagagtacatgttctgctaaggggggcagcagcccctgcaccatggcactgggcatttggtggcaggcctttggatttataagagaagccaaaaatctagaggtttttttgtgacattttaaaatttcacatctttaaatgttggcatttgattcaaaacttaaaaatgtcaacactgtgtgggctaaacaaaacatgaatgttgaccaaatacagctcatactctttagttaaagacctttatcttaaaggttggataaaacccagatgggcagagggcaataggcaaggtcttcctggggagggggcacctggacagaggggtggtggtgggaatctgcctgagcattttcagggcagctgggaactgggaagtgaggggcggaactgatggggccccgcccagtcatggaatccttgcatgccctggacgtgcagatgtgctgcaggcctgacccaggctgccctgagagcctccagctgtgtccatccctccagtcagcagcgtttacccaacaccgtcacataaatgaggctttggccaggcaggagctcaaggaagaagggtcatgagtatttaagagaaacct

SEQ ID NO: 134891 - DNA, 2208 bp, Homo sapiens
gctcccagtcaggtgggagaggtgcctgccacccctgatgaaactgtctctacctcaggttctccctgctgctcagaacaagggacagccaggaaccaggtccagggaggagtgtggtctgggctcaggggagccctggaggaagtggattgtaagctaagattgggaggaactctccccaccctggtttcacctgatgggtcttgcagcacctcctgctcagtaagcaaagaactggatgggaaagaactgacatctgtgcaatgcagacacttggagctgttgtttcatttagagtacagtgttttcccctagaggccctgtgtggatgaagacacagagctggttgaggattgggcccagggggtagggcggagaggagggtgcatggtgaagatttgtctacttaggctggtgagcccactcggggtggagcactggcttaaggcaccttggccctgcccactgctgctgggggaccttgatcaaggtacttcatcatcagtcaaatggggcagagagccctgcccacctcccagggcttctctgagagtctgcctgacagtctttctgccttgggagcagcagagcctgggcccatgttggggatgatgaggatgttgatggtaacgaggatagtgacagggacaacatgggggattgtttactgaggattccctcatgctggcgcttgaggtgacacaccctcactgtgtgctgtgtgccctgccgtcatggctccccactggaccctgcaccgagccctagacttgctcccctttcagtcagttctctgcccaggactcacttgttatgactcaggttccttcctgtggaccctgaatggggagcacctgactacctttccagttgcacttcccccacccctccccgttccctgccccacgagtgctccagcatacatctttgtccttgttccctcttcttctcttcctggaacattctttgttcagatacctgtgtggcttgctgccccacttcattcaagtgtgaatccaaccacccggtcaaacacagccccctcccatcctctagccaggacctggctctgcatttgtctctagctgttgagttcacctgatgttgttacatacttcgtgtacttttcccacactctagactgtacgccacatgcaagtagaacatttatgtcttgtaccctgatgtgtctctggcacctagaatcgggcctgacagaaagttggtgaatgaacaaacaaacatttaattgtaccccataatgtggacacattgctgtctacattttacagatggggaaactagactcaaagaagaggtggattgactagcccaatgtcatacagctgcagcgggacagaaccaggattttagcccagtgtctgtggcctctgagccctgtctcagccagtagacactcccacctccccagaatctaggatggacaggaatgggagggggcccaaaaaggtgggtaggattttaccctggggattgaggggtgaggccaaggagggggtgaaccatgagggtctgagagggccaggggcaggtcggggacttcagtgagggtcaggacagggaacccttgcaagacagtctctgaggagagcacccccggcaccagccactcccaaagaccagccgcctccaggcttcttgtgctggctttggttcctggcacgatttctgtttcccagaggagctcaggcctggcccggcttcccagggtggagaaacacatggtgagtgagtgtgtgtgcgcgcgtgtgtatgtgtgtgtgtgtccagccttgctgtttgcgttgtcgtcacgtcttcttaatcagcctatttctgggagcgatgacttcatctcctgtgattctcgacacagccattgtcaggcgtccatggaaagattgggcctggcagtgtccatattcccctaacgagccaggttgggagagccaattggcgggccctggtctgacctggctcgggggcttatggtcaggtctatctccaagagactccactgcccagggtcacccttagatttggcctctttgaccctggggtacccagtgcagcaaattccagccattgtttcctgtgtgcttcctctgtgtacgctctgctgtgggcagggggtaggggacagtcacgccaatctctgccctcaagggctcctgctgtctgacaatgcagatgagtcaacagacctca

SEQ ID NO: 134892 - DNA, 1068 bp, Homo sapiens
cccattttaccgaagaggaagctgagaccctaggagagaatttggggctgggcaggaggtgagcccaggtccccttaactttatgacaaaaccagccccagcatacccacctgccttcctgcagtaagggatggagggcagcagctcctccatgttctcctctgaagtcttgaaggagtccagccttgaggaggagggtgctccttacctctgctatcaagcggggtaggcctggcctctccatcaaagaaattataagtaaacaggtgggaggactctagcacaccattaattgctttacataggttgtcattaaatcagagatagtatatggatggctggtggccagatgtagcccacaaacaggtctcatttggcccgatggggtggaaagtttttgttttgtttgtttgtttaaaatcattcaccaacactagaacatttaccttaaacattcacctgaaaatctaggtttctggcttctattttaagacagatgtggcttcagtgggcctatattcctatagggcaaataattggtttcttcagttcacctcagactccttttctccctggaaggctcctcccagcaaccttgggaggtgtgtgggtgtgtgtggggttatagtgttcccattctgcagataaggagcctggggcccagaggggaccagctgggccactccacaaagctgttggtaaggtcaggacttgaacctccatcctcatctccacgctttgtggttctcactccacctcgctgcctcccagccatgtccaacccccactggccgccaaggaaagaaagaaacttttcacaggcctaatgactcaaaaataagcaacagtaagcctgaagaactgttcctatctccctcctctccctttccacccttcccgaggccagaagggacatgggaaacctattcatttaaactcaattattttctcgaagacagaacagaactgaattgggtcaacggctatatttgctgtgctcagctgttttcctgcaacagcatcacccgccgggtctgttgctgggccctgcactgccaggctcaccaa

SEQ ID NO: 134893 - DNA, 1041 bp, Homo sapiens
cacctccagggacctaggcttcaggtattagacatttaatgtccaacacctatctgtaggggaggtgcatctgcagcagagtttctgcagatgaggaaactaaggcttagagaaatgaagtgcttgtgggagaagcagaccttagagtcaggcacagctggcactttctagctgtgtgactgggagcaaagaacctgactgccttgctcctctgatcccacctgtaaaggaggcataatttgacatacctcacagggctgggctgtcctgttgtagatgggttgcagtgtacatgccagcagcctgcccagggttaaccctcctggcaatgagaagtgtgcaccatgtgccaggcacagaagttggtgggggcacagaagttgttggggacacagatctctgaagaaggatatgcttggacatcgttctctccagatacctttcctgattccctgctcccaaactggaaatgctcctgcagtctctctaggtcccctgttggtccaggccctgccctggacacttttcaccacatcttctgggcctacagcctgttatatatatttttttgtttggtcctaatatttgtgtaccttcccctctctactaaactgccagtttcctgaggacagaccgggtgtcttgttcacctgtttggctcctggtgtcacttccttcccagctgggtggccttggactggttgtttaacccggtgcacctgttttcacatctgtaaaatgggaacagtgatctctctccctctggcacatgtcacggcaaggaggttaatatcacacatggcagcactgtgccagatggctgacggaatggagtctagagaaacattgggaggaaaccaaagcagaggctgcccctctgccctccttgaagtagggagtatctaaggaggcgaggcatagtggttataaatgctgtcttgttatagaattgctgtctggttacatggggaagtgggaacagagtggtggccagtgggcctttccttgtctcctccagcttcttgctgcagagtgctgggc

SEQ ID NO: 134894 - DNA, 1353 bp, Homo sapiens
cgggttacagtacctggcattagatctcttcttttggggtctgggtgtagagcaggatctccctgcactaccccacgatattattgctgatctcagggttggggagtgtttagggaggcttgagttccctgacctttcaggaagcatgcatgtgaacttaggcctcggacctcgtgtagacatggtgtggtgatggctgggccctactctggtggggtggacgcaggacttggggactaagcagcaagtgacctagccacagacacagaaatggctctggtgggagcccagagtggcactggactctctggggggccagggctgaggggactgcccaggttgatcccggcgtcttgtacaatagaaccagcagtcacaggctcataaactgtaaccgtcctctttccgttgcctcttggtagcattcagcccctggcacactatgctgggtgttgcctagtacttggcactgtgacaaccaagaaagaaaaatgctgaccatgtctcactgcttgttcgagtaaatttactctatattttttagagatgtcgcatgggtgggaatttactcccactaaatgttttgatggaaacattacatttttggagtgaacatgtgtcaacatcactgtggagaaaaggttccaggattctctgccagccaaagtcatcaccataagacactggttgggggcctggcaggcggaggtgatgcgaccaggctggtagtggggcagaggtagccagatgggtaggagtctgcctggctggtctggagggagaaggggatctgagctgggggaactgaataggtggtgaggaggaagggagtagggaggctgtgggctgatgacatacattaaccacccacacagctcaaaactaggtgagtggggagcttgaggggcaggaacagcgagcagaggctctgaagtgttgaacactggcagctcagacccgagggacaggctggggccagattgttgagggtcctagaatcccagctcccaccagtaactagcgatgtgagcttgggcaacttttccaacctttctgtgcttctgcttcatttttagtaaaatgtagcatggatagccacagcttatggctctttggagaattaaaggagataatgtctgtaaaatacctagcgctgggcctggcacatagcaggtgccaggacacatttgctgtttgttggtgatgataaagccacacaagtatagatgtactcacataaattaacagctggtgcactgaaactacttcctgagttggccctcaatctaataccaagtttgttttctcaccttcagctaagtacaactggtctcttcagaagcccttgtggtc

SEQ ID NO: 134895 - DNA, 1150 bp, Homo sapiens
aagatattataacagtggggatgactcaacaaggggatgcttcttgcctgagggaaatctaggaaggcttccaggaggaaggactattcagattgaggagggaaatgagggggctagtaaaaggtgcaaaaacagttgtctaggggtgaggcacactttcagatgtagttgggtcaacttgagcaaatgacttagctattccagacttgatttcatctataaagtggtcacagtatctgccttgcctgtttgttgccatgatcatgaaatcagtgggagcagacctggcttggagcctgcaccctggagggaggtggtgctcagaggatgcactctgctttcgccttccttgttggtttggctgctctggagccaaagggggcttctctggccccaggacctctctgagactctatcttcacctctcccctgctaggaaattttattaagacattggataaacagatgacagctctgagggaaaacttctcagaaggaaggggacaggacactaagtgctcttctggctgggagccttttaggcagtagggggagctgggtagctcttggggctttggtggtgtggactgatgcaaatgtgggcagacggggtggtgttggatcgcctggcctgtgtgcacggcagagctgagcctggagcctagggcccagcaggggatggaatgagtcagggactttccaggttgggggctgctgctggggacacagtaaaacctcttcaccagtcctgcaataaccccagacagtatcctgcctgcctgtacacagtaggtgcctgacacagtctgcagcttagtaggagctcagtagttgtttgctaaaacagtggcgcaggctgcaactgccaaggactgacctggggtctgtgatgccttagggtggaggatgcgaggagctgggcaggacctaggtgggactccagggtgtggctcttgttctcccactggcttctgttcatatttacatcgggaggctgtgcagcctcgggttcctggcctcagctggattagcacctcttgctggtggctgtaagggaaggaggtgtgacggtatgataccctgcatgtggtagagactcagtaagtggataccattgcggtggcttctctggtgggatgggaaaaagggt

SEQ ID NO: 134896 - DNA, 1010 bp, Homo sapiens
agtgcccttctcagcttaggctgtctagacccaagtcggggtggggagtcgggttaggggatcatggtagacaaacccctggccttgtctggacctcagttgtgttcacttgttaaaatgttggaatggaaatgtggggaagggagagcgtttgccttggttgggtctctgggctgcgctggtctaagcccgacgaacccggggtggggccagcgggccaaactggaatgcgccgcgagagccgggccgcgggcaagtgaggggctggcggggccggtggggacccagactcgcacgaaggtggggaaggagttgcaaggcagagacccccgaacccctgctccagggcctgcgcgtcccgcccgcccggcgtgccgaagcgcagcggcgggtcgctagcgggaagtggctgcagctggaggcagctggccgcggaatgtcacccgctgccgggcctgggaagggctgggcctactgctgtggggtggggggcgggtgggagggcccggagggctggggctggggcgggccgcttccgggctggagagggtttggggcgtggcgcagcccgacgttagtccggaatgctctgggagcagcgctcgggggaggttaccttggcgcgcccccaaatcttttggttcccccgctcctgccttccactgctctggctgacctggctcagaccagcttgaaaaatgcattcattcattcagtacatctgtcgagtgtctactctgtgccaggctctggttcgaggtgtgctgggcttaccggggcgtgcaggtccctgttctcgtggaccggacattttcatgataggtaaaagacagaaacaaacaagatgacttcagggtagttctgtggagaaaatgaagcagggtgataacttgggaggtgggagttgcccctttagctagagagatcagggaaggcctcttcctgggacgggactttgggtctgagaccggaatgaggaggaaccagccttgcccacggaatggcaaata

SEQ ID NO: 134897 - DNA, 1066 bp, Homo sapiens
tggaggtggggaggtgggctggggggaagctttagggcacagctcagagaaggccaagcaggcaaggttgtggggcacctggaaggtgggtgtccagcggcctggctgctgacctaggctcagggaaccagcatttggtgggtgagctgtgaggaacgggccttgaccctaggctgcagggctaatgagggcctttagccagaggctcccagcacaggtgagggggaaactgccggtgcccctgtgccctcgcgctctcccagccctgcctctctgagacagatttaataatccatgtctgtctctctctctctcagttagtattgcaggagggaagctttacttctaaaacttttattgatccagacactaataaaagtaaagggtttttttttcttctttcctgctagagcaaagaacatcagacatcagagccctaaaacacaaatgtgttttcctcctccctagatctgggagggagttgtgggttggccttgttcagatctagcctcttcaagaagcctccctaacttctcaggcctgcagtcatccacctgttccagagcagttaaacgaaactgccacatgtgcctctgtctgaccccagaaggctgggctgtcacagaagctttccttcccacctgaggtccccagggttagggagagacgccatgggaggcattcaagacctggctcttgatttcttgtgtctctcagggtttggggtttggttctttggctgctctggtctttgtttttgcatcttgatttcatcaggacttactgagctcttatactgtgtcagaccctctcttaagacacagaaatacaacacgtagagcttggccacacacagcttaccttgtgatgggagaggcagataagaaataagcagagaaacaaagtgattctgctttgggaaacatagtgaagttcccctactgaaatgtgagtcagggaatttctgtctgctttgttcagcacctgtgttcccagtgcctaaatagtgcttggcacatagtttgcacttaaatatttgctagctgcatgagcaagatgctatgaa

SEQ ID NO: 134898 - DNA, 1091 bp, Homo sapiens
tctcatctggaagatgaaggaaaagatagacccgaccccacagggttctgaggctcaaactgaaagcctggtggtggggcacctgtgacaggtgagactcctcatcttgcccccttctttcttcatcatgaagaagagacactggaggatgtggagcagttggggcctgtggtccaggtgggatggagcagtcagggcctcgtggagggagcaggtgggaggaatactctggctgggatggacctcacggggtgtggcccagctttgcagctgacttgcatgaagtcctggcgagctggggagcccttgcaccctcagcttcctcatctgaaagatggggcaatggtaatgcctgtctgtggagtggtgaggaacaaatgagactgggccacaaagtacccagtgctgtgcccagcacatagtgcccaaagagggctgctatctcatctcttattcctgagatttagcttccttgttttgtttttgagctctttgggaccttcgtggactttgaatttttactattgttcattgtgtctaaaatcttcctcagaagccgagggcctctaacctgatcatgaattttggagtttcgttttttgttttttttttctttcctgtttcctgtataggaaaaagggacctgtacctttaagaccccagcaggcccaagtaggacactggccctttaaaagcacattacagagagttggaacatagcctttgttgaactagccatgattagtcccagcggacagggctggagtggcatgtctgggatcagggcggggctaggctggccggggccagccaggagcagcggacagcaggaaggctcgcccggccactcggcttcccgagcctggtggctatgctgagggatggtgagtggcctgagcggagcttagaataagagaggctgggaaagccaggagggaggcagccccagagcccagggagacctgaatgagctgggcggcagcagacaccctcagtgagtgactgtcacaggagctggtcccaggagggactccggagcaccctgcccctctacgcagacatccactgccggcccagaatgtagaaacggt

SEQ ID NO: 134899 - DNA, 1072 bp, Homo sapiens
cgggcttaggtagcgtagtgtgagctgtctgtctggagagaccagggaccactttgtggtggtgacattgggctggcccttgaaaactgaggaaggactttgtttggcaaagaagtggagggagaggcagaatggacaggctcaggagactgcttggacatggacccctggaggataagagtttgcagctttgtcaggaagtagctggggaggagagtccaggtcacttgtgcgaggggcctttcaggagggctcggacaccagcttgaggcatctgggacttgattatcttacaggccatgaggcgagagaggagggacaggagtgaggccatgccaggcggagtggcttgttcagtggagggtgctgctttggtctagacaggagaaggccagtggaactcccattcccctctgccctcccatgccctggccaagctcctctgtagcagcggagtccagggcaggtcaccctagccatggccttggctgtcccgtgtgtgacctggatgtcatggtgccacctccttcctgggagcagtaaggattccatgccatggaggacaggtaaagggtctctagtccctggagcgctgtcatggggctagtgatctgccatgtttagaagggtctcggctggggccgtggggagcagtgtgcagccacagagggtaggatgagcctcctaaccttgagagggatgggggaagcggcccatacttggacagagcaagggcaggggcatttcccggagactctggaatgaacattggaatgctgctcttgggacttggccttgaacaggcagctgccctgacgacccaccctcaggccttcttcgtccctcctccaagggaacaaccacgtcaccagggtttgcaggctgagggagggctatccctatccccactgacctcccgttccctctgagcttagctgaccttggctgctggtgtgttggggttttggtccaggaactctaaggctctggaccttggagccagccagacccaactttacccacaaggagccccctgcctgacaaggagccagttctgtgacagaccttccca

SEQ ID NO: 134900 - DNA, 1094 bp, Homo sapiens
cctgaatacaggggcatcagcccccagataccacaccacatagggtagctgtgggcatggctcctggactgacctggttcccatcccagcagggggccttgggcggctcaagtaactgctcctccctgagcctgtcatacctttctgtaaaatgggtagatgaatactcctggcagggctgtgtgctgttgaaatatgaaaaaagggatgtgcaagtgaccagctgggcgctcaccttgtgctgactagaggtgggtgcctacaggcatcccttcctgggagtggaatgggagtgaggtagagaccagtgcctgcttccctcctttcacctgagcgtcccgggtagggaagctgagcctatccctgcccctttggagcctgggcagtctttggtacccatcttctgccctgcctctaatgcgctgcttccctaggctggcaaggcagaggctggaggtgaaaaaggaagtggcccaacaatgccagcatgggatgaagccagggtaggggagaagcctgccttgggtgactgatggagcaagcagtccctgctgtgaagtggccagggactgctgcaagcacaggacagggctggcttcccagagaggtggttcttgggccttgaattggtcctgctgggttcaggaagtgaccaaatgaccatttttccttccttagccccctcatcttatcagctaccaccatgggcacaccctggcagggtcacagcagaccagctccctctgggcccagatgagggagggaccgaggacactgtgtttcagggcctgtagactccaggctggtcaggaaggaaacgcataggaacgtgagtgagagagtacgggtccactggccctgcctccaccacccacccgcttgctgtactatccaggaaggagtagcctgggagagcttgcgggaaccacttggggcctccctgggcctgccctgcccctattcctcttcctcccagagagcttgggctgcagggatggatgcagcctctgctttacatcccaccccgtggagaagctcccagggaagcggggagggtcatggctgcccaggtaggccgggccagtccaaggtgt

SEQ ID NO: 134901 - DNA, 1043 bp, Homo sapiens
gggaccatttctggttcaggactcctggccaagccaggcttgatctgggttctgacttccttgccagggatagggtgaagatggccctgtctgctggttcacagcagggggttctgtggagggtgcaggccctcgaatgccgtgtgaggagtgtgcttcccctgcagagacccgggtctgctgctggggacagtggaaacacacagcaggaattgcccggactggctcccttacctggcaggagatgtctaagctggaccagaggttgagtgagagtcagacagagagggaaggagaagggtcagggactggggaccctagggcctggcacatccagacagtccgagtctcatttctccagtctggcataaaaaatatcaggcttatattaccattgttgtcactgctgcttgacggaagagaaccctcagagttgtcagctgaggactgaggggattctggtacctacctttagttgtctccttggttcttgtggttccgcctttagggaaagtacgctcgggttaagcattgccctctgacctgggcaaggtcttcgttcattccctcttcccatctcagggagagggaggttagagttaggaagatgctttcctattggacagagggcactgagggacgagtgaggagcctgctcgtgcaggatggggccactctccggctgctgacttgccctgggacagtggctctcaagtgtaccacctgcaaaacatgaagtagaggcgtcatatgagccttgtcctggctccttcctgaagctgtgatgcagacctgatggccagagtcccctgagcctccaaggtcttcttccatcactgcctgcccttgctgtggtcccttccctcataacactgtcttgcctgctccccacaggtgacgacgtcatcaggaagcaagtgcttttcctgccggtctgcagctgagcgggataagtggatggagaacctccggcgagcggtgcatcccaacaaggtaagcctgcgcccctctcaccaaagcatgggggattgaaggtaggctca

SEQ ID NO: 134902 - DNA, 1023 bp, Homo sapiens
acttgagggcttgaccaagtcctggtcaccatagccatctcttaagttacagtacagaccagcatattaaggaagagttaataatggcatagcctgtgacgtgtcaggcgttgtgctggcctctctcagtctcgccctctatgagatgggggttttaccttagtgccgtttcatagacaagcaacccaaggctccagttaagttgcttgcccaaggtgagtgagcttctgtgaggtcgaccagagatccagcccttgtccatcatgccctgcctcatcctgacttagggcctaggcgcccgctgccgcctccaccttcagagctcctcctgggtctgaggactctctcaggctctgggctggttgggggttgcacgtggcacccccagctgaccaccctggacccccgtgcacatacaggacaacagccggcgtgtggagcacatcctgaagctgtgggtgatcgaggccaaggacctgccagccaagaagaagtacctgtgcgagctgtgcctggacgatgtgctctatgcccgcaccacgggcaagctcaagacggacaatgttttctggggcgagcacttcgagttccacaacttgccgcctctgcgcacggtcactgtccacctgtaccgggagaccgacaagaagaagaagaaggagcgcaacagttacctgggcctggtgagcctacctgctgcctcggtggccgggcggcagttcgtggagaagtggtacccggtggtgacgcccaaccccaagggcggcaagggccctggacccatgatccgcatcaaggcgcgctaccaaaccatcaccatcctgcccatggagatgtacaaagagttcgctgagcacatcaccaaccactacctggggctgtgtgcagccctcgagcccatcctcagtgccaagaccaaggaggagatggcatctgccctggtgcacatcctgcagagcacgggcaaggtgaaggtgcgtgcaggcccctcggctcctgacacaggctgggcggcagcactgg

SEQ ID NO: 134903 - DNA, 1054 bp, Homo sapiens
ctgcacagaaggcatctgtgtctggtgtgggagcccccaccagagtcataggtggatactgatggccattcttaccatgagacagggcagcctcatttgtcctctttggcactgatggtgcggggagaggcgagtcctgctgtggtcaccaggccaggcctgatcagggctgtacatggaaatgagtccattctctgtggtggtgggggcttgtggctccacgtggcatgctctcattcaggctgcctccatccatagacccggctctactgtcaccagttctaggctcctaccctggctgggggcccctgccctgcccacactccccagcagcccccaaaggtgggcacactgttcctctccgggacccccgcagcttggtgatggaacagcctcaaaatgccaggacttctctggctaggtctggaatcctagggccctccatgccaggccagctcaggtcctgctctctccacctcctgcctccccaggacttcctgacagacctgatgatgtcagaggtggaccgctgcggggacaacgagcacctcatcttccgggagaacacactggccaccaaggccattgaggagtacctcaagctagtgggccagaagtacctgcaggacgccctaggtagggagtgggccagcagcagggcagagggtggggcagggcccgccaggtcctcactccccactccctgcccacttgtccataggtgagttcatcaaagcgctgtatgagtcagatgagaactgcgaagtggatcccagcaagtgctcggccgctgacctcccagagcaccagggcaacctcaagatgtgctgcgagctggccttctgcaagatcatcaactcctactggtcagtgcggtgcccaggtctccccaccctgtcgccttccccatcctgtccttcagtgtctggcacccgcagtgtgcctgatgctgcctggcccctgagttgtactgacttgccagtcccctggcctagtcccttttgagctctcaggtggggcagcgttcagcatgttgctgtggttttgtgatgga

SEQ ID NO: 134904 - DNA, 1700 bp, Homo sapiens
gaggtggggagggcccagaccagaagctggagaggtggttcagcactggcccttggcagttaattccggttaggacggagagccagctcctcatgcctcctcccatcccacctgcccggcccttcactgagaacccactgcccgatgggagcctgggtctccctgctcctcctcctgcctgggcacttgctccagccaccctgtattgactgctctccccagatggctgtgtcctcagagctcagacagcggggctgacctcacgcagctggcggggtagagccaaggttggaatgcaggttcctgctctgtgcactcctgtcctgggcccctgcctgacagccaagcccacctttgtctgtccctacacagtgtcttcccacgggagttgaaagaggtgtttgcctcgtggaggcaggagtgcagcagtcgcggccgcccggacatcagtgagcggctcatcagcgcctccctcttcctgcgcttcctctgcccagccatcatgtcgccctcactcttcaacctgctgcaggagtaccctgatgaccgcactgcccgcaccctcaccctcatcgccaaggtcacccagaacctggccaactttgccaagtgagtgcctcctccctcaccaggcagagttgggcagggctggtgtccacagggcaggccctgggggtgtttctgcccccaagctgagcagagaccataaacaggccctggttttgtccctgtcatcctcagtccttctccttcccgctttttaaaaaataaaatctccacaccctgtccttctactcaaggtatatgtcattttggtatgtttcttaatttttaaaggtgacgacatgagacatttttttccttctgcttttttgaattaatgtattattataaggattctcacatatcccttaacattcattaagccctgttttgaaataaatgactaatattcctccaagggggactggcccatatttccttaatccattccctgtgcttgggcacttgggttgggcaccaccatcctggtgtcaggctatcaggatgtctttgctgataaagcactattggtgtttttggctgcatccttagagcaagtgggcagaagtagaagggctgggtcgtctcactgttgttcattctcaaaacatagattgagccccatcctggggccatctgtgtgctgggctctgacggcaccaagatgaatcagtcctggtggcgctcagcacttcagccagggagacgtgtggaatgagcaggagagcagtgatagacacacacgagcctcttaggagggctctcagcttgttgggagaggagacaggaaagcctccagggtgacatgatcccccaactgcatgtcagggtgaggcgttcattgtctcaagaggagcagaggctgggcatcccagggagggccatgcactgtgccaggtcaggagaagcgggcgatgagacctaagaggacagcagggacctgaaggccagacagggctgtgggagccaccagagggttttaaacaagggagaggatggccttcctctgttctggatcctgaaaagctcaccctgacagcagtgggcagatgggttggagggagcaggatggtagccaggagacgtgaaaggagagcatagctgtggttccagcaacaatagcagaaaattcgcagggaggggagcgggtacaggag

SEQ ID NO: 134905 - DNA, 1008 bp, Homo sapiens
ttcgaggaggcccctggtcggggagcctcctcaaaggataagctgaatgtggagagaggagggaagagagtgtctgggcagtgggagcagcgtgagcacaggcctggaggcaggaggtggcctggagggtgggcagcccatgcagaatacaaagctggggatgaggctggaccaatgacagctggctcccgacgggcctgagcctctacaaggagccataccatcttagtaagcactctcaggggcgctgagaagctggattggggggtgccaggaaagacagggaggaccccaatacagggtaagaaaagtgggaatgagtctcagttacgtatagtagatgaaggtggaagacacagcgtagcccccagattcctaccaagagtgtctgggtgtgggcgtatcagggtaccagttactgagctgggaactgttaagaggagtggtttgagtggggagggagagggggatggtgccagtctgatatcctgagttttaaggggcctgggttatctgggaaagggcttcagaggaacagcgggttttaatgctgactctcatctttttgaaggcttatgtcaggccccatgttggtgcctccatctctgtctctggctctgcctatgggtagggcatccctaccttggtgtcaggcagggagtacaatcaaccccagggtcccagtcgtggagtttacttccttctcagtaataccaggcacgggaggagagacagtgtgtcttgtttgaattggcctggtctaagaccccatcagctggacagaccaagcaggtgtgcaagagccaggaaggcctctgctccatgttttgtctatgacataagcccttcccagattcctcctatttagaccacctgtttctctgttcctgactgttgtttgctccatttacttgtagtttggttcattatgaaatagttaacatgagtgaaaccagggtggctagaaacctgctgttcacttgttctccagctctgctcttggctcac

SEQ ID NO: 134906 - DNA, 1028 bp, Homo sapiens
actcgtgcctcctgccttgtgaactccttgagggaaaggactagagttcattcatcttggcacctcgcgtacaactttgtgaagatggcgggggcagggtggaaaaagttctagagcctttcagggccttcgtctttccaccacctgcctagctctaggggtttgaagatctaatgcccatttccacccatcttggctcctggaagaacatcgggaaaggggcagcccgggggcctctggggctttaggagcagcgagtgtgggatgtggaggtgaggaaggaggcccagcagtgtcagttgctgggagtcggctggagggcctctgccccaggcaagtatgggaggcaagtctctgacccaaggaggggctctcctagtgtgtccctgctgtgtgcgggggtgatgggcttgttctcacaccctccccacctctgctgcctccagggccagtctgactgtctctgtctctggctataggttgatgtccgtggaggaagaactgaagaaggaccacgcagagatgcaagcggctgtggactccaaacagaagatcattgatgcccaggtgggggctccggccctttggtcagccacaagagttaaagggcctgggattaggaggggtgactagcctctccatcctcagtcatacctcactgcagacactgaggggaataagaaaccagaatctgccctgagaagtcagacctgtggtcttagtgggccacaagctcactaggacaggctgtgaaaggagagaggcagctcctcccctgccagggctcttggcgggcattgtctttcaccaggactgctgaccaaagagtggaagccaccaggagggcagtgggggtaggagtgaaggcaggctggtcagagggagcagtggggctctcgttcacaactatggcatccgggctgcattgaggggagacgtgaaaggctctgtggccccagcctcctttactcagggctgcaccgctttcctttcactcacccaggagtaggctgggccttgctcaggct

SEQ ID NO: 134907 - DNA, 1273 bp, Homo sapiens
agcaattgttaacctgcctgaggagggaggaagctacccaaggagagggggactatggtggccaagggcagggtctcggcctggggaggcacccacggttgcagccccagcgcgggtgtcaggaggccgagcctcccctccctgccgctgtccaggaggcggccgcagagggagccaccagagactgaagcagcgtgaggcgaggtcaccagccgctccctgtggggtgcgggcagaagagactgcacgctggggagtggggacagcctgatggggcagggggcctgccaaaaatatgtctgttggttcctgaatgtggtgtgtccttgtcctcctggatctggccgagtgcatgtgtccccccacacctgtgccagggagggggcttcctggaggggggattcaagggctaggggcctacacctgtggcttcccctcgcctccttggggggcccgggactccctggcagccaggccctgtcatgtgggacctggcacttggcagatcagttggcaggcaggaagataggaggacacagagcaggaggtcagtgtcccctgcctgtctccatccgaagcacctgccactgcatgcagcctgttgggaccttcctggctgtgaggaactgaggattcctacccacccaccccctctgaacctgtccccagagcaccacctgctaccttcttccctgccttagttgtattgccagatagacccagtgagggccatggctttttcttgtgagctcttgtccctgtggggaggacccacagcttcccacacctcccacacaggcccaggctgatgctctagggctcccagaagccagagatctgggcggatctggccagatggctctgagcactgtatctgccttctcctggggcccagcacacccagggcacagtggtcctgtagggagtgccacctggtgctcaccctgaaagaaaaggtgatccttcctctgagtgatggtttaaaaaaagattctaacgcctgcaggccctgagaaggtggataactgtgattttttttcctttcacagtatgcattagaaacaaaagcccgcttgctcgcttgctggaacacaggggccttttaagttgagcgtgcgcactgcatgggaaatagcggccctggaggatgttagacttgctccctctccaagacagcagcagcctgcacctgccccgtgtgtgtggccggcctcctcctcacccttcccggcccccggccaaggacccaggcgctgcatacaggggaggggcg

SEQ ID NO: 134908 - DNA, 1019 bp, Homo sapiens
taacctacaattcagttaggctagagacagatgctggtggaggaagggctgggccaccagggatcacagaccacaggaagatgggaggtggaagcagaggccctgcccccaccccttcctgtctcactcttctgtcttgtccccacccatgcgccttcgtgcctgagaccagggtggccacacaggcagggcctggctccagtctcatcctcccattgcccagtgagccctgctcttctctccccagccccctcccaccgctgcctcgtagagtgacctcggacagagcccccctagcaatacagggaggctcccggggcctggacaggcgggctcggaggctacccgctgtggccggtgccagctgcccttgcagggtgggtgagctctcaggccgagagccttatttacctagtgcaaaaactgtaaaagtgtacagactcttcacagatttttatcttaattgcaagtctgccgattttgtaaatgttcttggtgtttgactgtaatgtaactatctcacctaatggttgtacatatcctttggtcctggtgctgccgagggctggccgggactgctgctctcccaagggttttattttatttctgaatctagagaacagtattgggcaggaggaaaaggcttggtgtctgcggggggtgtcttccctgcctgtggcatttgtgtgttggctttgcagctgctgtctgagtagtggccactggggtgccttcactgggccagtcaacggggggctcctgcccaggccacagagaacctgagttcccgggagctgggccctgcctgcagccagggctggggttgccagaggccctggagggaaggacagtccctgctggggaagaacagccccggggccccctggtcaccgagactcagcctctgctggagaaagccacgccctccctgctagcacagaggcctgactgacttttttgcttaacttccatgttctgggtgatggaaactgccaaacctcctgtcagtgaggactctt

SEQ ID NO: 134909 - DNA, 1024 bp, Homo sapiens
ttcacaccattctcctgcctcagcctcccaagtagctgggactacaggcgcccaccaccacacccggctaattttttgtatttttagtagagacggggttttaccatgttagcgaggatggtctcgatctcctgacctcatgatttgcccacctcggcctcccaaagtgatgggattacaggcgtgagccaccacgcccagccagaaatatttctatttttaaaaattcctttctggattgtgtataatcactgcctaattaatatgtttggtaaatctggtaagttcttacatcatatctgtatttacagagaccctttgctgaccacctcctgcctttatcccacccctgaatcagaaagtgagacctccagcagaagcctttttacctttgacagttctcccaggtcaggccgcacccagcccagtttgtccagcacacactcgtcaaactttgcctgctgtttgcgacagtgacgaaataactgctggccagtataatcaatgcaagtccaatattctgtaaaaggctctgcacagtgacgttttatctgcctggaaaagaaagctgggttaggggcatctctttgcaaaacaatgaaaaacagaaaagtgagaaaaaaataggtacagatctcaaatacatagccttgctttttgaaaggtatgtgagtacatattcttatctcacttacaagacaacttcaggatcctcaagttgagaacaagttagtaaacaaaaaagatttctgaggtagaaaacctaatttctttatatagtaagaagaaaagagtgtagcctaatgcacgcctattttactcagagaggaactccttacttggggcctatttattcttttctttagatccaattcctctaagggtatcagcttagcaaatttagaagaggaggaggcataattaaataatggacatgctgatagaagtcaaacgtgacagacaatggcaaaggaagagacagaattataaaaagcaaatacacaaactaacaagcagaagatcc

SEQ ID NO: 134910 - DNA, 1048 bp, Homo sapiens
tgattacctttgcgtatagatcattttcatcagttaataattccttggcataaatttcctaacagtgagtttactctataaagggctttgaacatcattatggctcttgaactgtattgctttttttttttttttttttttttttttgtgatggggtgtcactctgtcgcccaggctggagtgcagtagcacgatcttggcttactgcaagctccgcctcccgggttcgcgccattctcctgcctcagcctcccgagtagctaggactatagggcacccagtaccacgcccagctaattttttgtatttttagtagagacggggtttcaccatggtctcaatctcctgatctcgtgatccacctgccttggcctcccaaagtgctgggattacaagcgtgagccaccgtgcccagcaaatgcttttgttttttaaatgttggatcaatttatgctgtcctcagcgctggattctggtatgcatagtatttaaatatttgggaggtgcaaatatttttggatgtttcaatttgcattgatttgattgccagcgagattgagtctgtgtgtgtgtttatttaaacaatttttcttttttttttgagacagagtctcactctgtcacccaggctgtagtgctgtggcgtgatctttgttcgctgcaacctctgcctcctgggttcaagcgattctcgtgcctcagccacctgagtagctgggattacgggtgtgtgccacctgcctggctaatttttgtatgtttagtagagatggggtttcgccatgttggccaggctggtcttgaactcctggcctcaagtgatccgcctaccttggcctcccaaggtgctgggattacaggcatgagccacagcatccagcctaaacaatttttattttctaagagaacttttgcaaagcattttttccatggtccagtggtagtacattttaagcggggaatgtttggatttcacaaattcccaaggtgaatccatagaggaatttctcactgctgaagttgctggttgtaggcattagtagataat

SEQ ID NO: 134911 - DNA, 1065 bp, Homo sapiens
atgtttaaaactggcagatagcacacacacacagtcaatgcacacacacatataagtatatatggaatgaatgcatcttagctttgctgcttattagatatggtccttgaaaaaattactcgggcaagtttgtgaaagtgcctggcacaaggtgtttcgcagaagcaaaaagccgtctttttccagtcacagctattcaaggtatagtaagtgaatcaaatgagccccttacctcccatctacatattccccgatatatttgctccctgtgtactccatggcgcctgtttttagcttccagctgttaggatccggagtctcagtggatacggcatcactatgacaacctggaggggtgggcggagccgaatcgaagccccaccccgctggaggctgaaaagttcttggtattgcgcacgctccctcgctcgtggttgggcagggcaatacgcctgcgtgttgccggatgcgcatgcgcaggcgccgtgtggcactcggcggtcgaaaggggagttcaaggagacgggggcgacgcggctgagggcttctcgtcggggtcggggctgcagccgtcatgccggggatagtggagctgcccactctagaggagctgaaagtagatgaggtgaggctatccggaggacaggcaagggagacatggggctgcggcttctcgggcctgggcctagccccccttgggctccgcggatcctgggacccgggcccccctccccagtcctccaacgcatatacaggtcgacccccggaggtcccctccgcagctttgggagtcgcctcccctctctaccccaccctgtcgcatcttgcagtggctctagaatcctccccctttcgccctccacagcgacctatttctccttccgtgaataatagtgatacattttattaagcaccaaccagtcattttacttagcttatgtcgcttaatcctcaaacttgcatgcgaggtgagtatacaaccctaggggctcacagtcgagggagacggtcatctaccttaaagtggtatcaccggtgcagagtgcatagagtggggtgacgaag

SEQ ID NO: 134912 - DNA, 1109 bp, Homo sapiens
tgagcctcagtttcctctggggaggctgcctgggagtccctgctgcggctgggaaatccaggggtggggaaagcagcgatgatgtgtcagcacacaaggagttaagcgctggtggagcccacttttgccacactgtgagcagcctggttgataattacagttctgaagtctccaggctattcgaatcagtgcagctgcaacctcttcagcagtaacccctgaaaccagacaaactgggtgtattgtgctgaaccagtcctcaggcccctccctgatcgttaaaaattgacagcaatggacttaacagccctcttcactacccctttcactctctacctggctgtacagccaccaatttgaatcacagatgcctcccctcccagcagctgctcaccaacccctccctccgcctcccctgcgcctctctgcggctcccctggccctgccacgccagggtgaggttgccgaagcacatttcatcaatatttaaaatggaattaaacctgcagctttgattaatgcctcccagatcctgggagttgtgattactattttgcaaattgcgattgttggaatatgttaatatgattgtctgagaatatcttcaccttctcagataatttctccccttttttggtaggagggggagagggaaaggagggagaaaaaagatgggggaaaaacaccccacaaactctttaatcaattgtaaattattacccttggcacaactgccagtggtgcagagagaaggaagatttctggtttggtgcatttatcttaaaaatttttggtccctgttggcccggtaattccactctgggacactattcttaaagggataatctatttgtctcggaactatttagaatcaggaaaaaggaaaatgtacatttctaaaaatgagggaatgattattttgttgtatatgcattcatttaacaaataattatgtgccaggcattgtgctagattcggggaggtggatactataagacacttgaggggatatttagcagctactgaaaataattgttaggaagtttgtatagcaacatgggggaaatgtttttgatgtgataataagcaaaagaaaaaaggcaagaaga

SEQ ID NO: 134913 - DNA, 1179 bp, Homo sapiens
tctagaacagcatggaaatctcgaagatgatggttgtgaattactgtagcagcaaaagcaaattggtctccacacctaaaatcgtctgcctgtgtactttgtagatgtgaatggtactattcaacggagcacaatcacatgttagcatttggtaacataatgtttttggatgttcttatggatgtttcttccctaaactatgtatggaattgagcatcatccagaataaatagcgttgtatcccaaattgtgatttgaaccctgggatgctctaattggctggttggtttggatttgtaactccagaaacattctatagtgtgccagagcaaaaggcaaatacacaaaatattatttaaatcaggaaactaaaaatattaacatctattaaaaaattgagcatttttctacgctcgtgtgtcttttacaacataaagaaaaagtaaaaggcagggagggaagtgagagacagattttaaatcatgttcagaactgttgttccagaatttactacggcaatccctccaactggactgaaaaagagaaagttcttggcaaaaaggagctgattctttgaacaaatgttgtagtaatctgtttaagaattatgcttattgtttcaaaatcccaactaggaaaacatggtgtatatcttaaaattgtttgtgttgacaaaactagaatcaaatttaacattttataccacaacacaagttctatttggaaattgaacttttattctatagcaaccatttttttcaaatctaaataaccatgccttctataataacaaatgttgctattatcatgggacttttaaaattacatttattgcatgggattgtttttatagcatgagaatgttctgtttggaattatatcatggtcagtctaaatagaaaaagcaaaatttctttgaaaacctaaacattgctatattggtcactatcaaacatacaattttctaataattgtgtagcggtctaagtggaagagattgcattatcttgtgcaggacgaggagaggacatgcagtgggcacagaaagtcaatggaacagatgccactgtggcaccaagactgtaatgactctgtgtggtaggtagttttaaaggactgcatgccttggaaatgattcttcacttggagaacatacttgcctctagatatgtttgtcac

SEQ ID NO: 134914 - DNA, 1079 bp, Homo sapiens
tgcgtttatgactgtctagcactctaatattactcgtcttgtttgtttatgttcactctgtggttgtaatattgaccattggctgggcgcggtggggttcaacgcctgtaatcccagcactttgggaggcagaggcgggcggatcacgaggtcaggagatcgagaccatcccggctaacacagtgaaaccctgtctcaactaaaaaagaaatacaaaaaattagctgggcatggtggtgggtgcctgtagtcccagctactcaggaggctgaggcaggagaatggcgtgaacccgggaggcggatggtgcctgtagtcccagctactcgggaggctgaggcaggagaatggcatgaacctgggaggcggagcttgcagtgagccgagatcgcgccgctgcactccagcctgggcgacagagcaagacgctgtctcaacaacagcaaaaaaatactgaccattttagggctatgttagatgccagaaatatttatatgactaaatacatcttggagattaggatttgagggagtgatgatgcattcttgtttatggaattagcagattccaaacttatgttctttccactatattctgattcctgtcaactatattatatgtaataatttcttacctatagaataagaatgttcagctaaatgatctgagcattacttctagctctagactgcatgagtctgtcttacataaccccttaaaactttgtgagggaagtggaacagatattattttccctattatataggaaatgaagagtgaagtgagttggcttagtatactgaagtaatgataatttccaccacctaatttagtgtttttttgcacaaatattctaatttttgaacagtcacaaccaaaagtatcctattttaaatcttaaaatgtaaggttttctttttcttggttgtgagacccaatctaactgtaagcataaacaatacctctgaatatcattataagtgccatccacaaagaagctgaaaaacttaatgacctcagacattatctattttctacactgtggttttctttctaaaagggataataccgactttctt

SEQ ID NO: 134915 - DNA, 1063 bp, Homo sapiens
tctccggtcaagcctaaaattctttgaaaatgtcagaggctttgttttcatgagttccacattgtcatgccaatgaaaggatctctaggattgcatacaaggtatagttataatgttgcttgagtgtgaggtgaggcactttgggaaatgggtgtgccagtgtgccagctggcacattagtgagcaaactgtcagagaaacccctgaaggatgttgggcaggttagcagtacatcagctacatgaagacatcaactccaccttgtttgagagttttatgcattcttacctttatataataaatgtatataatatgttcatataactgcccttgcctgagtattactatgtcccaggcacagagcaagatgcatcgctcatgttatttcactacctctctgaggtttagggaccacatggtctcagatgatgaaatataggttcagagaggtcaagcatatgcccagggtcacatggttaccagagctgggatgtgaactgagatctttctgactccaaagcccatgctttaagctagtataccacactacctttgcgggagcatataccagcagagattcattgctcattccaaaatatgagtgagtttggtgtgagtgcagatgcgaatgagttaaatttatttactcattccaaatcggcactggtatattttgagtgtaaaatgtcaactggatttttttacgtatgaaatctttcatctgtctttacaccaatctttgcagagaccagcccccctcccttgaggatttattgtggttttgatctgtgttgcctcaaaccattgaaatcttttcaaagaggcagagctgttttctttttattttttcttctttctttttttcctcctgcagtacagtggtaccaggagtggacatagtttgctattcagcttgatcaaagcactctacaccaatgtaacttcctgatcttactggtaacagaactaaatgtttccatgttctgccaagatgggttgccagttatcgacagagggcttgcatctggtaataattatttactaattctgtttaccttttgat

SEQ ID NO: 134916 - DNA, 1049 bp, Homo sapiens
attaattaattggaaagaagtcaggaagtgatagtaaaagttatagtaacaagaaatagcaaataaccagtttaaaatgtgcatgcatattaatttgatagatgaggaaactgaaagtcaaagtggggaaatgacctacacatttttaacccactaatttcacccagaacccatgttatcaaattgttaccctaagtattaccctaagtactctccctcctcccagtccccatccctgtccccaaactaccctcaaagccatttttccagaggaggcttttagccatcattcctggctgtcccaggctgccagcctgcaggtgttggagtactgctgggcaccatgccacaccccatgcaaggcagccacagggggcaaaagcatctcaaggctttgtggctagctgagtgaggagggaccaagctgtcattctgagtccagccactcttgcagtgtgtctggcagcccccaggtgttttgcttttctagctgaaaaaatgcacagctgttgctatggtgagagcctggccacctccctgcctgggaccaattgcactaaatcctttttagtttctaccctttttagtgcatttagttctcaattcctagccaaggcctgtggtctgcaaataaagatgtccaacagccgctatgctgctgagcatgcagatccttggcaccatgctgcagcccttaaagcctcctgcctaaggcttcctgctttcagtctcttttcgacataggaaggagactgtggcagctactaaactgtattgtgttttttcattcttggagtacatgtttatggcagaaaatttggaaaatatagaaaagcacaaaaaactttaataattattcacttagtgtgtttttcctgagaacttgatatgtgttaggtcctaggctggatgtgacagagatggacataaacaatacattgcctgtcttcccatcagtaaaatataaccactattaatattttgacaagtttccttccagtttttaaaaatacacaattttttgtttacatattttagagatcatttct

SEQ ID NO: 134917 - DNA, 1085 bp, Homo sapiens
cacagccggggaatcttctcctgccgccgtttggtggcaatagggagggagggggcgcttcccctgggggcctgatgtgggctaggctggagttccagagcagggcctggaaatgtcaggatgggtggtttatgttcacagaggtgggaacaggggtccccttgggggaaccctgaagccctggcacccagtgattcaggacggagctgcgacttaagtccatgcctctggcccctcattcccccatcaggggctagatgggggtcaggaggccaccctagcatggtctctgacctccatttctcacccacagtgaatccctgttgttactatccatgccagcaccagggcatctgtgtccgcttcggccttgaccgctaccagtgtgactgcacccgcacgggctattccggccccaactgcaccatccgtgagctgggccttcagccctcactccttccgtcttgagcccttctgctccccgggccctttctcctagaccctaacttcctaccctcctctctgaccatggccctgttctccttccttgcctggttctgcccctctccctgacctggcttcagcatgagctctcgctcttggtccaccctcactccctgcttctgagttccatggtgagtcttcaccacatgccctggcccctgtcctcacgcccggttctgtctctgtcatgtgtcattgctcccaaggttccatccttacccacttccccataggtgctactctgttccaccctggcccttgtcctcagtgccccatcttccaccctggctacttctggttctggtaggagggaccaactgagtgactgccattgcccctgcagctggcctgtggacctggctccggaattcactgcggcccagcccctctttcacccacttcctgctcactcacgggcgctggttctgggagtttgtcaatgccaccttcatccgagagatgctcatgcgcctggtactcacaggtgggtgtggggcagggccccctgacctgggggagcaagcaagcctgctagtccttttggattcttggcatctgataagggtagtgggtggggagag

SEQ ID NO: 134918 - DNA, 1500 bp, Homo sapiens
gccagttcctgtaacaggtgtggggacacagcagtgagtaatcaatacagacaaggttctgcccttatggagctcacactccagtggcagacaaacagaccataaataaggaaacgatgaaataagatatatacaaggtgagtgtgacttcccttctaaccccctctgctctgtcctcccctattgcgctctcaagaccagagacccaacagcagtgatctcagggcagacagccctccactccagctctgagacccttttctcaggacctctgtaggcagcagagagagaggacagaggggtaagatgaggggttgagggaaggttcttcatgatccacactttgggcttagtatttctcaggaagagctatggcccagaaacaacaggggaaactagagttcggtctgacagtccttggggttaagtctcctgtcttatggtccagaaactcctgtttctccttagttggctggaaactgctcccatcattccttctggcctctgctgaatgcagggaatgcaatccttccctgctcttgcagttgctctgacgtagaaagatccttcgggtgctggaagtctccatgaagagcttgtgtcctgtcctttcttgcagattctatttcccctcttctgctaatacctcttactttgcttgagaatcctctcctttcttattaatttcagtcttggtggttctatcaggggtgcattctggccaaggggtgggcctgtgaatcaatcctgggcaatcagacaccctctccttaaaaactggcccgtggagactgagatcactgactctgactcatccccacagctggctctgacaagatggtccatttgttcctgcttccgagatccccagggcagcctggatccctgcccttctcaagactttagcttttccttccatccggtggcctattccaggaattcctcttttgcttaaatcagttggagtttgtgtctgttgcttgtaatcaagcctttatggctgctgggctgagtgacacaagcactttaatggcctggagggacttttaatcagtgaagatgcaatcagacaagtgttttggaaagagcaccctcgagaagggtggatgacagggcagagcaggaaggacaggaagctggcagaacggaggaggctgcagccgtggtccaaccaggagctgatggcagctggggctaggggaagggctttgagggtggaaggatgggatgggttccagaggtattcctctcttaaatgcaagtgcctagattaggtagactttgcttagtattgacaactgcacatgaaagttttgcaaagggaaacaggctaaatgcaccaagaaagcttcttcagagtgaagaatcttaatgcttgtaatttaaacatttgttcctggagttttgatttggtggatgtgatggttggttttatttgtcagtttggttgggctatagcacacagttatttaatcaaacagtaatctaggtgtggctgtg

SEQ ID NO: 134919 - DNA, 1019 bp, Homo sapiens
ctgttctatagtatggtcagctaataatatatcagacctttttttatattattaaatattctacaactttttaaaaatgtctattaatattccatcgtatagatgtgatataatttgcttgatggttgtctcttaaaaagaaagatagcaaatactttttttaaattacaaaagtgatagatgttcattgtagaaaatgtaataaacactgttaagacttaaaagccatataattccaccaaccaaaattaatcccttttgtcatatttctagtcatttttatagcctttttttctatgtatttataataattatcatttgcgtttttttcctttttttaactttaaaaatgtatattctagggtcaggggaaatgtaatctggaattaaatattagccttaaaattcacaattttgattttcctggcttttcaggaattgactaactgtaaaagagtcttgaaagtatttagtcaacaaacagagtgcattttttttttttttgactaagaaagctcgttgtagtagaaagggtggaatgtattgaaaattattagaagcagggaagtattgttagtctagcttatttcctttcagtcttttttcaatatttttataaacattgagtacttactgaatttagttctgtgctcttccttatttagtgttgtatcataaatactttgatgtttcaaacattctaaataaataattttcagtggcttcataatatttcatcatttggatatataataatttatttaaccagtctctttatttttatttatttattttgtttgttttctttgagatggagtctcgctctgtcacccaggctggagtacaatagcgtgatctcggctcactgcaacctccacctcctgggttcaagcagttctcctgcctcagcctcctgagtagctgggactacaggcacatgccatcacgcctggctaatttttgtatttttactagagacggggtttcaccatgttggccagactggtctcaagctcctg

SEQ ID NO: 134920 - DNA, 1122 bp, Homo sapiens
tcaccaggaatgcccttcctgccctgctgatctataaggggggtgaattgatcggcaattttgttcgtgttactgaccagctgggggatgatttctttgctgtggaccttgaagcttttctccaggaatttggattactcccagaaaaggaagtcttggtgctgacatctgtgcgtaactctgccacgtgtcacagtgaggatagcgacctggaaatagattgaactgatagtctagttgcatagatttctcattgtttgggttggaatacacgtcattgtttatttttgttcctttgtcttctggcttttcagctgttctttgtagtcccttttattatgcataaaataaagaaattcttagattaaatcagaatgctgaataaccttgtagctagcaataaggtgacttacagttgtataaacaggaagccaggcttttgaactgtttacttaagattctgtggtgtgacatctctgttattgtttccagtcaatatttacaaagcatcctaaagacagggtcttggaaattgtcttcagatgatcttagaggtctctgccaagtctgagagtataattctgtaggtattgtgttatttgcaacgtaaatagtgcattttcttaatcaaatgattgtaaattatatttacttgtaatcagttccatagctttagacggtggttagattttttttttccccaccagggtcttgtttaaaggggtgagccaccgcacccagtcctgaggggtggcctctgctgctggatttcatgtcttcctccagcatgactaagtctggaacagcaggaagggttgatgcttactgacctggtgatgttagaagacaagtagtttatggatttaaacattagagctggagtggggctggaaatctttgtaaaggaagttctttcagtaagatgcccctgcttgtctttgtctcttttttgtttaacaaggtaactttttgtttaacaaggtaactttttgtttaacctagattttttttaaaactttttttttttttcatattggaaaagtaattcatattcagtagaggaaaactgaccaaaacagaagcaaaaataagaaaattaaaataatctctaatcctactacc

SEQ ID NO: 134921 - DNA, 5832 bp, Homo sapiens
atgccactgcactccagcctgggcgacggagggagactctgtctcaaaaataggaaaacaggacttttctagttacttctgatacttctagtgataaagacatgtctttgctagagactcctaaagtttgctgtagctttcattaaatatgtatagtcacccttaacagtttgcacttaaagctaatttgtttttaatgtcatttcttttttctcagggaggagcaaaaaacaattctgccggtaacttcttgctttagccagccactcccagtgtctattagcaatgcaagttgcctccccatcaccacatctgtcagtgctggcaacctcattctgaaaactcatgttatgtctgaagataaaaacgactttttaaaacctgttgcaaatgggaagatggttaacagctgaaaggaggttcatctttcaaatttgtgaccacaccatggaagcatttacactagctttttatatatataatatatattatataatgtatattttttttaaaaaaaagatattactgggggcatccatttcctgtggactctttgatacttcaagccctcttgcattagcattatgaaaaaaaaaaagaaaatttactttactagggtaacatgttcactttccagaaatgattggaatttggacaacatttaacttaagcttcaagcagctttttatgagtttgtagcaatccggtgcagtaactgagccatttcctattttaaatggcttctatagaaaattaacaactcagttattaaactagcaggatcctacaatgatacatctagtgaaagtagacttagttaacttatttatttctattttatgtttcactgagagaagtttccatctcattccagctgctttatttatctttttcatggaactttgcatggatttctttttctttttttaattttgaagagtggagttagatgttcttaccatagaattttacagggttatatactagcattctttactgcattatatgtaggagtgtggtgcagtgcttttatctgtagcatataatttttttttaattttccatttttcaagagtagtttctgctttgttaatatttatacacaggctacttgttgaagtaattaattaaaaatataaccaagtgcctaagtctttcagctgatgtactagatattaaattctcctaagttatgcagaatcgtttttacaattttgataaattatgcactaatgtaatggcagttttttaaaatgcagatttaagcctgtacattattgaatctgatgacttggcaaaagaatcaggtgctttcagctttcttgagaaaaccctgtatgtagcgtttgcactgactaacaagatggtattgctgggtttttaatttaaactaattaatttggttgttcattgcattatcttggttaaatattgtttattgttacttcatgttggggtttagtttttcttgttttttgactgttaggttgataagactatgaactgtgtaatagtagaacagtggctaacatttattcatacttaagaacatgaataatttctgccttgctaaaatgtgactgaaatggttttgacttggcatctgaaagtatacaatgtgttcaacaagtcatgcatcagatttgtgggaggtattgtactgaaacctaaatttcagtcaacatttgaaaagaagagctgggcattccttcctggtgatctttacctatagtttatctatctgtttttcttctgtttctttaagattagtttgacttttattattatttttttaattaacttctgtgaagttgtttactctgaaaattgtactggaatattttaagccaagctgatctttcaccaggtgtactgtatgtaagggcttttcctgctagcaagatgcttaaacaggatcatgttattggtcgtctgagctatttagttgttttacaaaaccacagcattgtatcagataagattttgataaaaagttttgtgcacatttccaggggcgggagggttgacatttccctgaaatttcttgattagaatgagtaaatactggtgtttgatacctgtcttaatgaacatgctcataaggtgactgataagttgtaaatatacctgagaaacaaaggggtagttttgatattctggtgtcagtatggaagatcttacacatttatttaatactcaaatgtatgaagatgtttgtttgtagcataacaacagcacagtagccttgacttagtttcctttggttagtactgtaccttttttgccatggccagtgctccccatccctatgaagacattttatttatttcactctgtaacctgaaatgaataggaacaagggttttaaaccatgttacattaacttttctgacattataaattagcctagaatattacaggaacatgattgttatataatttatatcagaacctttctataaatatgtgcttattacatttgaaatgcttccaatgtactttatttgctgtttgtaattccaaaaaggatatgcaaaccagtctgtctatttcatggatatttaatagtgagatcttccatgttgaaggtaatgtatttttttttaagattttaaaattgctattttgttacaaaatagagacctattaacagtttgagagctccttatgtgccctcagggaaagaaccctctgtgcaacagaactacacaaaacatcttcagcacgttctgagggtgaatatatactacataaattgatcttgtgtatttaaccttatctttttaattttaaaattgaaattttgaaacttggttgtgctctgctggagggggttgggataaactgcttagatgtttgcctacttgtccagtgaaattacatttgcatcagtatatgtatatacctgccaaccttattggtatgtctcagaacatttatattaaaataatgcttgtcttgcagcaggtgatcccataaaacaataactccctgttcttaaaaacttactctctttttcactaacaacataggaattgtttctgtgttgagattattctgtgttgcatccattctctatgtagtggtcaccttctgtctgtcatggtgggcttaatgtgaagtaaagccattggttctctgccactttcgaagaaagggcagttcatctgatccttcttcagaatggtacctactgatatcatcgaggaaaatgttacaaatcagacctaggatatgactttttaaaattgaggcatttcccgtcatttggcctttttaccaacaagatgtgatgtacaaatttggaatcaaaggatacaaagcaacaagagaggaaatgtgtaatgtgggtaaccaaactgcatatgttacctattgtctaatcagaaaaaatagtctgaggtctggaaagcaggaaagtggtggttattttctttcattttttgtgtttttgttttttaatttctaagttccattctgaaatccatgtgccgcattcagttactgtggttgtagcatcagtttttttgtggtttcatttcattttatgaattcagaggaagttacatatatattttttctagttggtacctgaacaaagcagattcccttgcctttgctgccacgtcttattttcaatgccatgtgataaaccagtgtcatacatgaaagttgtgcattgtaattttcaaaaaaaagggagttcattaggccagtggcactgatttttccttcccatcatagctatttattctagtaagaggataataaaagaaatttcctatacaagaactgaaattttccatttgtatggatctagtcactttcagatttcaatttgaggttaagtatataaagcacatcccaattttatatgctgccttgagaaaattacaggatgcacggcaatttgtaggaatttcaaatgggatcatttaaacatttgaaaaattattttaaaaaccatctagtttgcttttggattttagacattaaagcctatgttgtcttgttaacaggggtggaatgtataaccatcagattcagcatgtgatttcacctttgaatctgagtatttcttccctatcttctttgagtcatttttggagcagactgtcaccagtattgataactaagcattaaagggaaaagttgcattgcaactatgcattggtttcctggaagaacttttcttttgttttagtgaatgaagaggcttgatgggatcacttactgtaactccttctacataaggaccccttctgcaagcagaacacaaaagaacatgctcaaggagtatcccattttctggataaattgaagaagtttgctagtaatgtctttatactagcgtcttccttgtatccctttgctggcaagggaatacaaggcgtcaagaccacagatcaaaacaccccacatttgagtggagtcttatttttactccaagagcagttattcccttctagtctaaaattggcagttttttcttttttttaataaaatttttaaaatattcccaaaccagtggaacacagacactggctgcacttagtactgccaaaagccaaggtcatttgcacatattccatcaacctgtcgagaattaggcctcactttataacccaaggcatggaagtgcatgcattctcttagctgggcaaacaattatactgtagttgtgatacaacacatgtggcttttatttgtactgcacatatccactgtacagccacttgggagtatcgtggttagcttgcagcaactgctgtctgcatttatactgtttattgcatattcttttccctggaagtgaaagagaaatgtttttcttgttgcattgattacattttataaatttgcttagctggaaagtttgggaaaagaggcctgtttgtcaattgtacaaccgattgtgaagctctagtgtgaatatttttacgtctgtattagacattttctttgcaaatctattgttcgattgaaatgtaaatgaaattaaagatggtgtacacccatcatgtaaaaagcaggcaccatctctaagatggatttaatgctcatttttaaggcatatactcagcttctatttaaaactataatttaaaataattctgtacaatgaaatggggaatatatatgggaataaattctattccatttatttcaatttgaatttccaaattgtaatgtttccctttgtgctataggaataggattaaatgggggaagactaggatttataaggcctgtatatggggggagggcagagatggaacaatgagggttgtgatgatagtgaatagcaaagagtgaattctgtgtgtttttgctgtagcactgaagtgaagagatattagctttggctgttcacaaaatagagcatcatgattttcagtgtttgagagaaaattgatggaaaaagtttgcagtacttgacatgtatttgcatgcacaaaataaaattatttgtccaccttaaaagttgtttgtttaatgtcaatattaagtttatggtatgttttagttatctagattttcttggcatagtttttggcttaacagagctaccaggtcactccttgagatttaaatgattgcatgcctcatctatatatcataaggaaggatttgaaagaaatgaatagacccaaggaggttgagatataccttaattctgtcaagtcacttccttcattcaacacagcactttctgggtgggagatgaggatgtagatagtactgagtttactgtctagtggagaaagtaggacagatgcataactaatacaaagcaatgtatcatagaagtttgaagacaattctgtggac

SEQ ID NO: 134922 - DNA, 1004 bp, Homo sapiens
agcacactatgttgaaaggtaacgttcttcttaattctatatgattctccattctcagacttgtatgtatcttaagggtacacattctacccccagttcatgaaatgtgctttgcttgttgtctgagctatataacaaatttctgaaaaatatttgcatttaaatttggaacgatgagtgaagttttcagggttgatctgtcacataaaacatatggttattactgcttttgttgcttcattcacttcacttttattacaataaacatatttctctttaaagggacagattcattgttactgatttatctggtcatagaaagcattccagtactggggaccttttgagccttgaacttcagcaggtaggctctgtaactcagctataaatttttgagaaatagaatgacagttgaaagctatagttggaagctaacttttctttttttccctcctcatataggccaagagcaactcattacttcttcagagagaggccaatgctttggccatgcaacagaagtggaattccctggatgaaggccgtcaccttaccttaaaccttttaagcaaggaaattgaactaagaaatggagaggtaaagaaactgaacctttcggcttcatgcttaatgtatttgttttctgctgctgcatcttggttataccattactgagtgcattttggtgtgcctatctctgatggatgattgattgcttttaaaacttataacagaaataaaattgtaatcccagatttcttaaataattctttaactagatcatcgggatttttgtttttttgagatggaatcttgctctatcgcctggagtgcaatggcacgatcttggctcactgcagcctctggctctcaggttcaagcgattctcctgcctcagcttcccgagtagctgggattacaggcacccaccaccatgcccagctaatttttgtgtttttagtagagacagggtttcaccatgttggctaagctggtcttgaact

SEQ ID NO: 134923 - DNA, 1073 bp, Homo sapiens
tttatttttttttaaccagttctcagagagtgtgagtggtacaaaatttgaagaagatcatctttcccattattctccctggtcttgtggcaccataggctcctgtataaatgccattgattcagagcccaaagatgtcattgctaattcaaatgctgtgttaatggtatgattttgctggggttgcaggggttggaggtgagagatgatgcatgttcactcatgttgtagaatgaatgttttctattcattcattcatattgttgccttataactcagtagcagcagggttatatttaggtaagtctgaaataaattatatttaatatttaagttatttgaacattggtggtttactggtagtttgttggattatcgttgagtctagagctagttttaaattaaccaaaaaacctaattacatgtcttttgatagcatatatttactagctgaagtaattgccaacagtccttttattgattttctttggtttacataggacctggacagtggtgatgttaagagaagagtacatttatttgaaacccagagaaggacaaaagaagaagatccaataattccctttagtgatggacccatcatctcaaaatggggtgcgatttccagatcttcccgtacaggttaccataccacagatcctgtccaggccactgcttcccaaggaagtgcgactaagcccatcagtgtatcaggtaatccatttagataatacctagcctgatatgttctaagcactatgccttttttttttttttttttaattgagacagagtctcactctgttgcccagactggaatgcagtggtgtgatcttggctcactgcaacctccatcctgggttcaagcgattctcctgcctcagcctcccaagtagctgggattatagacatgcaccaccatgcctggctaatttttgtatttttagtagagagtattttgtattttagtttcgccatgttggccaggctggtctggaactcctggcctcatgtgatccacccgcctcagcctcgcaaagtgctgggattacatatgtgagccactgtgcctg

SEQ ID NO: 134924 - DNA, 2564 bp, Homo sapiens
aagctttataaagcagggtaaggtaaggttcaaagcttattatattttcctacattaagggctgccttagatttaagccattataaaatgttggattgtactaagattacattaaatattcctctttccaattttcaaggatactatccaccacctccaacggtaccagctggtgtggctccctgtgttcctcgctttgtgaggtccaataacgttccagagtcctccctcccacctgcttccatgccatatgccgatcattacagtacattttcccctcgagatcgaatgaattcttctccttaccagcctcctcctccgcagccgtatggaccagttcctccagtaccttctggaatgtatgctcctgtgtacgacagcaggcgcatctggcgcccacctatgtaccaacgagatgacattattagaagcaattctttacctccaatggatgtgatgcactcatctgtctatcagacatctttgcgggaaagatataactcattagatggatattattcggtggcttgtcagccaccaagtgagccaaggacaactgtgcctttaccaagggtaagtgaagatgctactataatgtagtcattaacagcccagtgtctggagtcaaaccacccaggtatatatcctggctcctccacttactaattgtgtgacttaaggaagttacttgacctccctatgcctcagttctttcattcctttgatggaaataatagtagtacctacctcataaggctgttgtgagaattaaatcagaaaatcaaacctcttagaactgggcctcatacatgttaatgctcaataaatgttatatttggataggaaattgttgggaaagtagaaagaaatcttaaaaatacaaggttaggaccttttttcagtatcaccacatacatacaaatgacttccctaagcaagaaaagtgagtgctcagattctgcgtttaacatcagttgaataaatattaacctttttattttaagtgtatggagaatagactagggtgactttccctgctgtatttttttatcccaacaatatcataaactgtttacatcattttcacacagttaaatttattcaccactccctagatgattaagattgtttcttttatcccccattaggaaccttgtggtcatttgaagaccagttgcgaggagcagataagaagaaagccagatcagtgggcacagtaccacactcagaaagcacctcttgtctcttcaactcttcctgtggcaacacagtcaccaacaccaccttctcctctgttcagtgtagactttcgtgcggatgtaagaaaggttttaattacttaatgttgcagggataggtcaaacagctgacttcaaattactcattcaaaccaggaatagctatgttggatatttgcagtggtttggtgtgcaattgagtttagttcaataaacactgaatataaatgcactacggctaggtgttatgagactctgaagaccgttaaggcatagtcctttactaagaattcaaaatctttcctatagtataattattttatggttgttttattaatagtgtgatttatatctatcatttattgagcacctactcatgccagcactgtattagtacatttgcataaagctattttatttaattctcacaaaaaccttagggggcaggtattttccatattttacagggtaggaatcttacagaagttaagtaatttgcccaagatctttcagctgtaaatagctgggatatgaatcctgggctgtctgaggtatttcttccctacttaacaagaagtgcagaaatacctacagtattatttatgctctttacatcactgctaattattgttcttggcattaccaaacaagtttgtgtaccaggatgattttaatttaatctggtgttttcagtactgttatatttggagaaaaccattaatttcttttttaagtttcttctggtttattccccatccccagaagttctgatattaaaatttttaaaatcttttcattataaaaaatttcaaacatatacaagtatagagagaataatatgataaactccatgtacccaacacccaggttccacggttatcaactcagtcagtactgtcttatttataccccctcttccccctggattgttttgaagtaatcctaggcattatattttttaacccataaatatttcaataaagcattgaatttttaaactagatccaaataggtcttgtcaaacttagacttcttcaaagcaggtaaatatcttgacaacagagtgacagagctgccacttgcttgctagatgccacttgcttgctagatgccacttgtattttcttttttgatatacaattatgcttcaggaaatgagtatttccctgagactccgatctgctgagttcgacttgagaaaagttttttaacttttttgcccttgagtttttttatctgaataattagtaaactagatttaatgattcttataactttagtattctggtcctataagtattccttattcacagtccctttaaaatt

SEQ ID NO: 134925 - DNA, 1685 bp, Homo sapiens
ccttttacagtttggtaacaacagaaaatggcttcagctcttgcataccttttctctttactctgtgttctcaaccaaatttgttgccagttcctgtcatttttacataacatcccttatattctagttatacaaaattttcaaatggtctctttccactccctcaaaaggtttttttgaatacattcttggacaaagtggcatgaggggaaaaaaaaatacatataaactcggcttgctatattaattacatgtatattatatgtgaatggcatatatattttcatgtggcatctgttgcagtagaatttgatatagactgtatttgattatttagctgaagaaactttttgtcaaaactgtttcctcctttttcaatctattcccattgcccattgccattttttgtcttgagtaagatttagtgaaatattcaccaatctgttgattgtttttgaaacaggtatcgattaaggaacaaaaagatcaatgccactgtaagaacgtttcctcttctaaataaagttggtgtaaacaacactgtcacaaccacagccggaaatgtcatttctgtcataggaagtactgaaacaacagggaaaattgttccaagtacaaacggaatttcaaatgcagaaaacagtgtttcccagctaatctcacgtagtactgacagtaccttaagagctctggagaccgtgaagaaagtgggaaaggttggcgctaatggtcagaatgctgctgggccctctgcagattctgtaactgaaaagtaggtattaggtaaaaatgattactggaaattctttttcctttttagaaatgcctgagtgtttttatttctgctgatgaataccggttaatcagaatttttatgcagaatattttgtgatgtagaagaaacactaaatactaaaaaatttgagttctagtttggttctgcaactgaatagccctgtgaacttggaaagtgggaaagtgactttaactctgagttttgttttcctcaactctcccaaagagactggaccagaattgtttttttttcacaccttattttcttgaactgtagtgttgattccatagaggtgccagaaaagaactaaatagaaacctaagcaggtaaaatgctgagcctctagctctgtttcagtcagagcgctttcactttatactctgtaatgaggtgtagcacttggccgggtgcagtggttcacacctgtaatcccagcacttttggaggctgaggcatgcagatcatgaggtctggagatcgagaccatcctggctgacatggtgaaaccccatctctactaaaaatacaaaaaaaaaattagccgggcatggtggcgggcatatgtagtcccagctactcaggaggctgaggtaggagaatggcatgaacccaggaggcggagcttgcagtgaacccagatcgtgctactgcaatccagcctgggcaacagagtgagacactgtctcaaaaaaaaaaaaaggaggggactctttggagccacactctctgggctttcaagttctggctcatggtttcccagctgtttgatcttaggccagttacttaatctgtctaccttagtttactccttcataaaactagaattataatggtgtcaacttcatatgttggttgcgaggattaagtgaattaatactccagtatgcct

SEQ ID NO: 134926 - DNA, 1776 bp, Homo sapiens
tgttttcatcctaggctcataagaataagaatgtcttagattttgatgcaaattgtagaagtaatagtgaaattttaatattctgcctcattgtatgaactcaaatagtttaagcctgagagttgcaccctcaagctgacaagtgaattggtaatttttcacttctaggtggaattgtattctaccttttctgagaaagtttaagtagacaaagcttttggtttttttttaatgctttttaaaattgtttgattttggtagcagaattttaagacagcaataaattgatgaaaaaatattttctttttctgggcattctgttaactaatgaataaatggacataacatttgaaccagtttcgaataatcttcagaaggaatatctgaagtgccaattcagggttatgtcacataactcacaacaggaaacaatggaatattagttgtttcagcacaagaattacttgtctaatgtgaaaaagaattaaaggtgtaattataaagttctgaacttcctagagtgaataacaaatggaatcttcaccttgccactcattgaatgtgttcccatttttgtagcctcagccaaacagcaaatacaagactagcatgtgccgagatttgcgacagcaagggggttgtccacgaggaacaaattgtacatttgcccattctcaggaagagcttgaaaagtaagtgttgagaattctgtttcatatgggtttaatttttgatttttatgggaatgttatatacagtcctgaagtttgtgatgactttcaaaaatgcaagttaagggctgggcaccatagctcatgcctgtagtcccagcagtttgcggggctgaggcaggaggattgcttgtgctcaggagtttgagaccagcctgggcaagataaggagacccccgtctctacaaaaaatttaaaaattagctgtgtggcccacagttgtggtcccagctgctcaaaagactgaagtggaaggattgcttgaaccccataggtcaaggctgcagtgagtgtgttcacaccactgcactccagcctgagggacacagcaagactctgcctcacaacaaaacatataagatctgggtacaagatttacataagtgatttagaactttactcagtggtcatattttgagaccattttatagctggaatccatatttatactgagcacctgtgcagaatgaaaatacttgcagtcttatttgctcagattcagttaaacctagcagcaaagtctcaggcaaaatggtaaagcagatatatatcctttttacggcttttggtctttttaacattctttttccctgtgtattctttctcttctcctatggttaacccctttttctatgtccctttacccgagacctaaaagttaatgtatgtaaggtttaatactattatccaatttttgttgttttgttttttaactaagactttcatttttgagacctcaccaaaaaattgatcccagcttttctactttctgctggccagtgtatcaactttttttttttttttgaggtggagtcttgctctgtcgcccagggtggagtgcagtggcatgatcttggctcactgcaacctctgcctcccctgttcaaacgatactcctgcctcagcctcccgagtagctggaaccacaggcgcccaccaccatgcctggccaatttttgtatttttagtagagacagggtttcaccatgttcaccaggcgggtctcaaactcctgacctcaagcgatctgcctgccttggcctcc

SEQ ID NO: 134927 - DNA, 1064 bp, Homo sapiens
aaagagatgaagactcttccctaatgcagctgaaggaggaatttcggagttatgaagcattacgcagagaacatgatgcccaaattgttcatattgccatggaagcaggactccgtatttcacctgaacagtggtcctctcttttgtatggtgatttggctcataaatcacacatgcagtctatcattgataaggtttgtgaaattagagatgctgatgttctatcattgctgttacattgaagagtattagaatattctaaagagtctatacacaaacagttggagattcctatgtttttaaatgtcagactcttataaattatccttattttctttttatttttctacttgcaaaataaagggatgcaacagggaaacaaatacatgatactagcataaaagcagtgaggcttacaaagtctcaaatttatctatattctgacctcagagagttaatacagcttataagttttctaagtgtctaatgatgaatttcatagggcagattctgaggtgaaaatttaattcatcactgatactcctactgtggaatctgaagacacttgaaaacgtattaaatatgttgataaattgaaagtatttgagtataaatgtgtcataagaaccaaagtaaaaagcattctcatttctgtttgttagctacagtctccagagtcatttgcaaagagtgtccaggaattgacaattgttttgcaacgaacaggtgacccagctaacttaaatagactgaggcctcatttagagcttcttgcaaacatagaccctaatccaggtatgtgggaatatgctcagttgcttatatttttttctacttttgaggtgaataacacaagagaattactgctaacattcttcccccccaacccccatgcccttggtggcttattttagacgctgtttcaccaacttgggagcagctggaaaatgcaatggtagctgttaaaacagtagttcatggccttgtggacttcatacaaaattatagtagaaaaggccatgagacccctcaggtaagtacatttattacatttctgactgctg

SEQ ID NO: 134928 - DNA, 1071 bp, Homo sapiens
tgaagatgtcagtaacggaaagaacataaggaaatcatttggtaaacttgactcttatcaagtaaaagtggactgcagaagcctcatttctttacatttagtgtcttgaaatcagactatattggaaacttcataaggagtatgtaaactttgtaacccattattatgtttgttatctcattctctgtagtgattagattaacacctttaatctgaaaatggcctacatgttatctcagatacaaccaggaaatggaaagttgaggagattggcccactctgcttttagatgttgttttttgtttagtggaaagggtagagaagaaccccaagatattttaaaatgtagtttcattgtctaatagtctagcgggtagtgacagatactgaaagcaagctgaatccttaaagtgtttttatgatccaagagtgtaggttgctggctgggtcttgagaaaggctcatgtacttggaaatagaaaggcctattggcttctatgaaagtaaaacatttaaatttgaaaccaaagcttatttaggttattttgttggttttatagcccccaagagtgaaaatagtacagacagaaaaatgtttctttggcagaacacttagtttgagataacaggtagttgataatagaaatgtgttgaagtgaattcatttaactccactaatgaggcttggacactagctgcctcatagtcatagtgtttagtttcatgctcttagggcaacaattgaaattaatctctggttccacacacaacctcactaggccctgtaaaactctgtatcttttgaatgtgtagttttttttactacttaagtagaaattaaagctatgtaaataccctgatgataatttctctggtagcagaacatttcttcttttcattttttttttaaagcaacagacttttgctctgttgcttaggctggagtgcagtggtgccatcatagttcactgcagccttgaactcctgggcgtaggccatcctcctgcctcagcctccctagaaaatttcttaattatcatgtggtagtggtaatatatgcctacctattag

SEQ ID NO: 134929 - DNA, 1111 bp, Homo sapiens
aatatttgtattttagatggatgaaataacagcatacttgttcttattctgtaatgatggaaatgttcaagtaaagagggaaaatttgataatgtgggagaggggagaattgctggagcaatattcttacataggtacataggagtagaatctaagagcttaccattaagcagtattctaaatgtcttatatacaattaaaaaatagagtcatttttacttttaggttaaactgctaaagtagctaaaaattaggcttcttattactatagaataataacaaacagagacagaatactgttagaaaaatgaaagcacattacaagggactcattaggaattgtggcttaatcgttaaatgcagataatgaaaattgacttttattttttattgaaaaaactttagctccctttgtttcccttttcctaaaggtgtagctagcttgaaccagagtgcactgagccgtccaatgcaaaggaaactggtgacacttgtaaactgtcaactggtggaggaagaaggtcgtgtaagagccatgcgagcagctcgttcccttggagaaagaactgtaacagaactgatattacagcaccagaaccctcagcagttgtctgccaatctatgggccgctgtcagggctcgaggatgccagtttttagggccaggtaagataggttactatcttaccttttttattagctattggggcttgaggatgccaatttctggagctcggtgaatcctgagactcaacccgtctttatatgtacaaatcttgatataattaaagataaatttgtttttgttgttgttgttattgctgttttgttttgtttgagacagggtctcactctgtcacccaggctggagtgcagtggcgcagtcttggctcactgcagcctcgacatccatgctcaagcaattctcctgactcagccccctaagtagctgggactacaggcacacgccatcatacccggctaatttttctattttttgtacagacagggttccaccatgttggccagactggtctggaactcctgacctcaggtgatctgcctgccccagcctcccaaagttctaggattacaggcgtgagccactgcac

SEQ ID NO: 134930 - DNA, 1843 bp, Homo sapiens
agtcttgctctgtcgcccaggctggagtgcagtggcgcgatctcggctcactgcaagctctgcctcccaggttcacggcattctcctgcctcagcctctggagtaactgggactacaggtgcccgccaccacgcccggctaattttttgtatttttagtagatacagggtttcaccgtgttagccaggatggtctcgatctcctgacctcgtgatccgcctgcctcggcctcccaaagtgcgggattccaagtgtgagccaccgcacctggcctgtattgaacttttatagcggcactacaaaatacagattttcatcttcattttgcagatatggaaattatgacttggagcagttaagtaatttactcaaggtcattcatagaagtagcagagctgcaatttttacccaagttttgacctttgaatgagaacactctgtcttaataatgcttatcttaagtaaataatatagtaaaaaggtgataagtgctttggggaaaaaaaaacaactgtgtctttttttctccactctttaattttgaaattctttcagacttacaaaaaagttgcaaaaaatactattcagagaacttgtataactttccacagcttaacctaatgttaacatccaacaccaagaaattagcatcgatacaatactgttaactttctgcttcttttcttccttcattaatccacacagctcctgctgttaagtatgttattttttgctgttgctgttattgttgttattttgagatggagtctcactctgtcacccagactggagtgcactggtgcgatctcagctcactgcaacctcagcctcccgggttcaagagattctcctgcctcagcctcctgagtagctagaatcacaggcatccaccaccacacctggctaatttttgtagtttttagtagagatggagtttcaccatgttggccaggctggtctcaaactcctaacttaagttaatctgctggcttggcctcccaaagtgctgggattacgggcatgagccaccatgcccggccttatttttggtttgtggaaagcagtttggctaggtgtttgactttaattttacttaaatggctttcatgtattatctatgcatgataattttatactcaccaagattattatcaagtacataaataatagttgcatgagctggatgaatgtatttctgcaatattcctttttttttttttttaaggtaccagatcatcagtcaattaagttaagtaatctaggtgagaataaacactatgaggttgcaaagaaatgcgttgaggatttggcactctacttaaaaccactaagtggaggtaaaggtaagttcataaaatgcatttttactgataagtaggacttggtagtacatttactttgaatgacttgatgtggataccctattaagttatggaaaaggagtttgcttgagaaatgccttgaaaaatgtatagactgagaaaattatgttgtcctattttctgaaaataaccaatattgttattaagaattcaagctagagccgggcgcggtggctcacccctgtaatcccagcactttgggaggccagcgcgggcggatcacaagatcagaagatcgagactatcctggctaacacggtgaaaccccgtctctactaaaaatacaaaaaattagccgggcgtcttggcaggcacctgtagttccagctattccggaggctgaggcaggagaatggcgtgaacccgggaggcagagcttgcagtgagccgagatggtgccactgcactccagcctggggcgacagagcaagactgtctcaaaaaaaaaagaattcaagctg

SEQ ID NO: 134931 - DNA, 1047 bp, Homo sapiens
taaagttttttttttttttttttaactcatcagctattgttagtgttagtgtatcttatgtgtggcccaagacaattcttccagtatggcccacggaagccaaaagacacctctgagctatgtgatgctttagttgaacattaggggggaaaaaaaaaagaacatgtgctatagaattcatgtttgtaattattttattgaatcaaagcaagactctagatttgaaataacatatttaatgagggtctactttgcattaggtttgacagaaagtattcagcatttattattactaattcttaccataggttttcaggtagttattatccccattttacaagttaggaagagatgaaattctgtacatcatgtgctacatattaaagccagaaaggaattatttttctgatttaatagaaaatccaataaaccaaaatacttcattcattcctttagtatcttgatatttgaagtcctccttgtaaagcacaaaatctcttttcagtgtttataatcaagttacacactatgaaatcaaggtgcatctacaattgatagtgtatcttaatttaattgccagtatatttttgttaatggagtataaaatgttgcctcttgcaaacaacattttagatttgataaaatatcatagactttttgtaagaatactagctaccaccagacacagtggcttacacctgtaatctcagcactttgggaggctgaagtgggcaggctgcttgaggccaggagttcgagactagcctggacaacatggcgaaaccccatctctacaaaaaataaaaaaattagtcaggcatggtggtgtgtgactgtagtcccacctacttgggaggctgagatggtgagatgggaggttcacttgagcccaggaggtcgaggctgcagagagccaagatcgtgccactgcactccagcctgggtgatgggagtgagaccctgtctcaaaaaaaaaaaaaaaacctagctaccatttatttagcatctgctataggtcaacaggtattgtgttaatatcatttgtaa

SEQ ID NO: 134932 - DNA, 1038 bp, Homo sapiens
tatccaagggaaacacttttttaaacaacaaaacaaaaaaaccgcccagcagtccaaagtaatttgtgttcctaaaaatggaatatggaaagttaatttgcttgtttgatgtggtcgttgagaaaaatacataaaagctttgatgtttattatgtgagcaaccaatataaatacagtttagttgaaaggaacactattaaggtattgtttccaggcagaatttcagaaatgtaattaattcagcaaataggttttttaaaaaagacatccaaaggttataaaattatttagaagtattttaggtctgaagctgtaatagttgacttaagcaattaactcttcaaaggtgaatgatgaatatgtggttaattcatacttttgtccatttctagcttacaaaacactacacagcaaaataatgatctgctagactgctaacccgagcatccagcttccacaatgcctgtgcaggcagctcaatggacagaatttctgtcctgtccaatctgctataatgaatttgatgagaatgtgcacaaacccatcagtttaggttgttcacacactgtttgcaagacctgcttgaataaacttcatcgaaaagcttgtccttttgaccagactgccatcaacacagatattgatgtacttcctgtcaacttcgcacttctccagttagttggagcccaggtaagcattcaagattttactataggttggtgcaaaaataatcactatttttgccattattttaacggcttgtccagcctgcaggctacatgtggcccaggacatctttgaatgcggcccaacacaaattcataaacttccttaaaacattgtgagattttttttgtgatttatgtttatgtttttagctcatcagctatcgttagtgttagtgtatcttatgtggccttttttttttttttttttttttttttagacagagtctcactctgtcacccaggctggtgtgcagtggcgtgatctgggctcactgcaacctccacctcctgggttcaagcgattctcctg

SEQ ID NO: 134933 - DNA, 1059 bp, Homo sapiens
tattgtaacataaaactatactaaggactattgtaacataaaactattaagtgtgctctggtatagtttgaaacagtttaaaactgtgtagtaggtgacaatatgaaagatagcatttttctgtatggttgaaactcccccaccccaagccccacacttatgtgctttaatataaagcatttcagaaaggctttggaaaactaaggaaaaggtatttgctcttattttgtactaccaggtggcctgtgataccctaacccacagaattaacatttccaaacaggtggccattatgaaaaactacacgcagtgtcctgttttcataaatatttaatcagttcaagttattaactatattagggctttcagtagatttaagatgaaattcattcttcctcaaaggccttttcttgtataactctgcaaaccagaaaactggatgttaaaaatgttcagtagttttagggagtgatatattcatctgctcagtgcttatctctaaagttggaaggaaactaattggtttttagattgatggcattaatagatgtggtaatttgaggatgaaagttgtaaaattataacttggaagatttggttactttaaagataacgatattagataatttgcattagagctgtttgagaaagtttgtataggggtgctttttacatagcaagccctgtaattcatttttaccaagattttttttaatctctgtttttgtgaatataaaagcgcagggccgggcgcggtggctcacgcctgcaatcccagcactttgggaggctgaggtgggcagatcacctgaggtcaggagttcaagaccagcctggccaacatggagaaaccctgtctctacaaaaattagccaggcatgatggtgggtgccgtcccagttacttgggaggccaaggcgggagaatcacttgaacctgggaggcagaggttgcagtgagccaagatcacaccattgcactccagtctgggcgacagagggagactctgtctctgaaaaaaaaaaaaaaaaaaaaaaaaaaaacacaataaaggctaat

SEQ ID NO: 134934 - DNA, 1191 bp, Homo sapiens
gtcttttaaattgcaattcaattcctttttctccagtactgagtttctagcttacaggttgtttccattgctgttttggtttttacttgtcttttagctagagatccaaattgtgcttatgctttaaatatcattttttaagaacaaaactaattatttttaagttttctaaacggggaagtactgtgacagtccatttcagtagcttatattcctcacataggttaacaagaatgaaaacaatggttttaattagaagaactaagccctaaggtttacatttttattaagagaattgtaaaatgatgtatacatatatgacagttaaagaagcataaactttattctggcattttaaaatcagatgccgtagacctgaactggctgcataatatggtggactaataagagaaaatgaaagtatttagctggctcttaataaagcagtttgtaatttgaatcatataagagatgcctattgtgcttcctgttttatgtgtcagcactcatagcaaggaacttacagtctggaaaattatttgagcgaaaaattgtttatggtcccacctttaatttagcatttctcactcctatgctttatcttattatcctttttcaatttttgtaactggtaactaaaattagttaatacaaataattagaatgtttttcttaaggaatcactttaggtatcttgagttgtaggccttttagtccattttatctcagtttgaaatgttttgattatttgagaagaatacttcagtagtaactataaatattcatagcaatttagacttacatagactcaaataagttgcataaaatgtattagtataggtctagaagttttgcaaattaatatgtagtcttagtgctccatggttcatttatatgctctttaaattataaaaactataggatatttaccatttttggtagttacaaaaatattttctaggtaaatgtttacaaagtgcctgttttgaaggaatgaagtttcttctatgttttaggtaaaattttatattgatttatcttaattaaggaatctaggatttactgataatattactgaagaaaaacatatttggaaaatcaaagcgtttcttacatctgatcgtataagggaagtttagttgataatttactgtcagaaagctagactctgacacagagaagaaaatttgg

SEQ ID NO: 134935 - DNA, 1145 bp, Homo sapiens
tcaatttttgaagaaatagaggtcgttacatcctgttaaagactgcttttcaatattgacattttcgttgatttggagattaatgttttcaaaattttagagtttggaaaattgctaggaggacagaatgtgaaacatattctagttacgtttagaaaaagcagatgttataattcaaacaggcacttgttctatgaggatttaattacactcgtgttcattagtggatcctttgagttacccctgatctgttatttctgttgtggtaacctgacatgtaagaagacttacgtcctttgttcatatatttttgttaaatcatactctgcttttgtaatttgctgtcttccactttgaaaaaaccaaaaatttgcattttggcaaagcattcttctttacactcaggattttatattcaaaagttgaacttctacattgtttgcaatagctaagaacgctaaaaaaaacttcataacaaggttttagtaactacttactgtttagtttgtaccgtgttgaagtttcactttttagtgatggaaaaaggaagcatgggtaaaataaagctagctgaaaattaaaaataagttcatgttttgcatccagtctcatgaatgttatgatcagcgtctctaattttactaaagctttaagtgtaagtgtgagttttacctcaatttcctgataaaagttctaagtattactttataatttaaatattctagagttgcactgtccagtactagccagtggccacatgtgacagttgaagatttgaaatgtggcttctgtgaattgagatgtgctttaggtgtaaaataccagatttcaaagacttagtaccaagattttttttaatatctcagtaattttaatattgacaacatgttgaaatgatattttgtataaactgggataaataaaatatattactaaaaataattttagctattttaacttttttttttttttttttgagacagtctctctctatcacccatgctggagtgcagtggcaccattcgggttcactgcaacctctgcttccaggttcaagcaattctcatgcctcagactcctgagtagttgggattacaggaaggcaccactacaccaggctaatttttgtatttttagtagagatg

SEQ ID NO: 134936 - DNA, 2506 bp, Homo sapiens
ggtgtaatttttaacagcctttgaaacctgttatagtggcttcccctttcaaggaagatttcatttggatacatacaaaacagatatgacaacacagatttgtttttggaaggtagatccagctttcttaattgtctgagtttccttaaattcaacctttttacatttctgttctttaggtctgccaaaatgtctgaaagatcagatctccttcacttcaagtttgaaaattatggagattcaatgttacaaaaaatgaacaaattaagagaagagaataaattttgtgatgttacagttctcatagatgatattgaggtacagggacataaaattgtgtttgctgcaggttcccccttcttaagagaccaatttttactgaatgattccagagaggtgaaaatctccatattacagagttccgaagtggggagacaattgctcttatcctgttatagtggtgtgctggaattccctgagatggaactggtaaattacttgactgctgcaagttttcttcagatgagccacattgtagaacggtgcacacaggccctgtggaagtttataaagccaaaacaaccaatggatagtaaagagggatgtgaaccacagagtgcttctccccagtcaaaagaacagcagggagatgccagaggctccccaaagcaggactcaccttgtattcatccatctgaagacagtatggatatggaggacagtgatattcagattgttaaggtagaatctattggggatgtatcagaggttagaagtaaaaaagatcagaaccagtttatttcttctgaacccactgctttacattcatcagagccccagcactccctgataaattcaactgtggaaaacagagtaagtgaaatagaacaaaaccatctccacaattatgccctttcttatacaggcagtgataacatcatcatggcctcaaaagatgtctttggccctaatattcgaggtgtagacaaaggcctacagtggcatcaccagtgcccaaagtgtaccagggtgtttcgtcacctggagaactacgccaaccatttaaaaatgcacaaactctttatgtgtctactctgcggcaagactttcactcagaaaggcaaccttcatcgacacatgcgtgtgcatgccggaattaaacctttccagtgtaaaatctgtgggaaaaccttttctcagaagtgttccttacaggatcatcttaaccttcacagtggagataagccccataaatgtaactattgtgatatggtttttgcacataaaccagttttgaggaaacaccttaaacagctgcatggcaaaaacagctttgataatgccaatgagagaaatgtacaagacctcacagtggattttgattcttttgcatgtacaacagtcacagactctaaagggtgtcagccacaacccgatgcaacacaggtcctggatgcaggtaaactggcccaagctgtcctgaacttaagaaatgatagtacttgtgtgaattgagtaggggcttcatgctcacaactcgaactgactgacaatgtggcaatagtcttagtctttttaggagtgattttgctagtttgacttctccaaagcctctgtgtaggtggtagggagtgagtcaaagcactaatagaccaggcaacttaccacttggagtggatttgccttacttttgccctctcccattttctgttttgagttatttatcttgtaaagtctgttttcctttcccaaggaataattccttttgtctacctaacattgacttatgtcttagactgacactgttttaggcttttcactaggcacattccgaaggtaccaacaagttaataacgtcacctactctccactaatagatgctatgctaagagaagtgaataatctttctttggtagaaaataggctgagatataaggtgatattgctattgacctgaaaatgtgatagaacttctggttgcctattgattattcctccatgtctgataaatgaatctgcttcctaccatttgtacttgtcttggagctggctataaagaagtatgctggtttgttatgtactcttttcaacagtatcatagcccaacttcatctcattgaattgttcacatataccagagtactctctcttgaggaacacctgcaggcagatagttagggatgaccatgaggagcataatcaacagggatagaagtacacttatacaacagcacttacatgggcggtttctctggtagcatgtcccataagaggccatatgcttataattaatgtgtaacttgttgatgcttttgagatcaggactgctccaggcacgctaaaaatgtgctaaagtatagtgggctctctaaaaagaggctatttgggagtctctgaattttgtttcagagtttagccatcagaaaggtgagtttggccatcagagttttgtcctgtgcaccataaaagtctctgaattttcgtttcctcatgtaccttaatttct

SEQ ID NO: 134937 - DNA, 1047 bp, Homo sapiens
agttttcgggattaagtttgggagccagatctgaacaaataagtactcctatgtgtatatatatgtatgtatgtatcagtcacatatgtgttaattgctcaaggggccgttgctgagaaggctttagaaagaaagtgatgtctgaattgtacttggagagagtaaagtgttgaagagtttttcagggaagacagttgcaatactgtggagaaatgactgagcataacttgtgtgggaagaggaggaaatggggggactcctatgcacagaatggatatgagactgggaaagtcgaccgaggtccagatggtgaatggtgtaatcctaaaggagatgggtagttttttgaagagttcggaacagaatattgatatggtcagatttgcactgcaggaaatcattttgttctgtagaaagcccatagagaagggactttctattaactgcatttagacatttagctaaaagttaggaacgcttatcggagattcttttgaaggggtaatgggatcagcctagtgagaggcaaaaaattcctgaaataagttataatggtgtcattggtaaggagacaaatatactggagatgattatgtcaagactccataattaactgaatgctgaagaagtgtgagggaccaaatctaattcttaggttttagacctctgagctgaaggatggtaatgccattatcagaaataaagccataagcttagtgtagattatgaattcattttttggacatgttgaattaaaggtctaatgagacagacacatagagctgtccagcatggagttggaaatgcaaatctttagctcagcctaaacattgtagctagaggtaaaagtttgagttatcagcatagaagtggaaaccatggcaatagctggcatcaggaagagaattttgaaaaataaggaaatttggggggggagggtaatgcttgcatttatgaagcagaaagaggaattggagctagtagtagtcagcagtaggcaataaagtgtaggagtgcagggttacagcaagcaagaagacccagaaa

SEQ ID NO: 134938 - DNA, 2152 bp, Homo sapiens
ttctcactgttttttctctggttgatcgggatgcattatccaccagaaaacactgtagacgactcactcaccaggaaaagagcatatgccagttggaataaataaaggggaagagtaaggaagaggctgtagaattattttataaattatcaagtcttatgagccaggtgcagtggtgcatgcctatgtacagtcccagctactcaggaggctgaggtggtaggatagcttgagcccaggagttcgagggtggagtgtgatatgatcgtctgtgaatagccacagcactgcatcctggacaagatagggtctctttaaaaataagacttaactagcactttaataatcattgtttttgttcccaactgcattgtacattcattgaggacagggactttaaacttcattatattgctgttgctgtgtttcacctttgaatgatttttaaataaaaatctcatctttgagtcacaatctgatgtaaccttgtccatttctgtcctcttgtgtgccttaaatgcctttaggcagctgtgttgtaccagtggttttaggacttggcagtcggaagttttgacttctagactggattctgtaactaaagctaaattactttataaaaggagaaaaatggtaccattctgacgggtttgtggtgaagctgaaatgagatagccacataaagaaccatcacaatccctgacacaccgtgcgccctcagtaaatgccaggtgaattttattacactgtgaagtactgattttcaaacaggacttgcacatgaaaggtgagcagggggattccttgctcaagcaccagtactctggggttgtaccctttgttaggctcaacaggtactacccagtccgcttccatcgtccccagtcccggctgcagtcacgtagttggctgtccaactccaaatacacaagacagcccaggtccagctcacagccagtgcacttcgcgcaggcgcacagtcctgaggcgggctgaaagcccaggtggggctcggagaagaggaagctccgcctcgcttcccggtattgggccaatagggtcgctcgtcatggtcgcagacctatgagacggggcagggggcggggcggagggcggaagaagtcgctctcacgtgagtaaaggggtgggggggcggggacagggcggtttgggaggcccaggcggcggagcctccgggacggcgagcggcgggcggcggaggaggagacggcaggtcgggtagggccgtgtttcccctcctcctcctcccaccctcctacctaccaaccccaggggtattttccgacggcccctgcggggagccaagctgtcttctcatcccgcggggtcgggccagtggagctgctctcagctccctcgacgggccgagttctgaggggagccgtgattggggggagggggaactgcgacggaggggagagggcgcatgcgcaggctgggccgctctgggagcccctgcccaaaccggttccccctgtctgtgtgggtgccggtcttctgagtcttgcgtttttggccctccctctggtcccccagcaaagccggtttgtgtcttgactttaatgttttatgcttggtcctatttgggaatccagccgctcccccccgcctcagtttctccccattgctcactaggcctgtatctgtgacttaagctagcctgggcctcaggctgtcctgggctgcgcctaaatttcaaagacttgctagttttcactgtcgctttgccatctcaggttggtctttcagtctcatttccccgtctgcaattaaagcgttcttggcatcccagtcttctcatctccttgaagcagctaccccagtacctcatcgctgtgtcttttgattatccgcacccttagggttttacgtgttgagccaaaggataacctcaagacttccaggagttcgctgtccattgcctggtagtactttggtctctgctcttctgcatccagactgtttatcatctgctcctgcgtttcacgcatctgcatacctttggttactcgagaattcttttttggaaacaaatgtcctaggagaccgtgttaagtgatcatgctgctagtgttcccgctactagtgctccgttagttttaaatcatgttccaacttgaatttgaggtct

SEQ ID NO: 134939 - DNA, 1026 bp, Homo sapiens
ccattggcaagatttttttcaggtgtcagcattatcacactcataattaacagagttaaatgaactctgttttatgcacatttcatccctacttgttacctcttgtacctttcattagaagtatgaagtatcaagatatagtggggagagtatgaactttggggtgagaaagacatggatatcccaagtctctgagaaggagtgattaagtagcttatcctcagaaactccatttttaaacatggagctacttacatctacctcatggaactgtaatggaaaacacctgatatcccccctaaagaccctataaagttataattattttgaaacttacttttattgaaggataaatgtggcatacatacattgaaatattattcagccttagggaaattgtgacacatgctacaatatgaataaaccttgaagacttatactaaatgaaataaaccagttatgaaatgataaatattgtgtaattccactgcttatatgatacacctagagtagtcaatttcttagagatggaaagtagaatagtggtttttggaggaggaagagaatagggaattagtgttaatgggcacagagttaagaaaggaaatgttccaaggatagatgatggtgatggttgcatgacaatgtaaatgtatttaatgacacaaaattgtacacttccgtggctaagatggtaatgtttgtgttattacttaatcacaatgcaaaaagattacaacttataaaaaagatgttttaaagttttattttgttttacaatttcctgtatttgtttaattccgatatcttttttagttaatgtagaattgaactaaaagtgatttaatagtttaaagaagtaaattgtcacagttacggtaggctcaaatttgcctaagcgtgagttttagataagctagtttttcttgcctttaagtgcaggtaggcccaagatgattgttttgattcttttggttttggttttggttttttaacgtaacctgaaattaatcagaaagcttaaat

SEQ ID NO: 134940 - DNA, 1019 bp, Homo sapiens
gagggatagtgaagaaggaatatatttgggatatgttttagaactaaaatccattattccaagggagggtgagaaaaggaggagtcaagatttgttttggtttggtgtcttttttttctttttctttttctttcttttttttttttttttttttttgatgttgttttgaatctgtggctgttaaccaggatagagaatctagaaagaagaatctgctgacgcgtggggattaaatggtttagttttgcaaggaattggttttgagatgaccataggacgcatatagtagagccctgctgtgtattctcataacaccctttacacacctctgttataacaagcactatattataattacctgtttactggtctgttttctctaccactgtaagcctgtcaaaggtaaggagtgtcttttattcctcaccataattctatacctggtgtctggcacatatcagactctttgatactgaatagaagaaaaagaaaatataacacaaatacccatgtggaattcaagagaaaagacagtgctagtgttatcagcatacaatagaaagctgtaaccatgttagctaatgagatagccagtgaaaagaaggacgatgatgtgattttaaaaatagaagaaaaggaacctaaatcagaactaagaaaagatagtggtaggaaatggatgcaaaaggataagagtttcagaataagaaaatggccagcattttcatttacttcagcaggtggaagtaagaaataattctttgggttgtgaaattttgtagtattgatggtttttaaggggttcagtgaaagtgagaagtaacggggtggtatttttgagagggactgtttagaacagtggggagttccattgaagtggtagaggtggaggcattaatactactctttcaagaagaaaatctcaagaaaaccaaagaaataaaggttaaccaagctttggatgaggcactagcacattttgtctcaagcatgtcaggttcaattattagtatcaccca

SEQ ID NO: 134941 - DNA, 1249 bp, Homo sapiens
tcttttgtttatcatagcttactctttgtacattatctactcaataagtattcaatgaatggattaagtgaatcatttttctttgaatttttcaaaagtacaatttgaaatgtttttgaatgccatactatgtatttagatttggtcttatgaaatgcagatgtgtaatagctgttaagcaggggaattagtttaaataaaaggcagcagagagtccaggcttctagccttagctgtgccattaactggttaaatgaccttacttctcttggggttgccatttctttatctaacagtattgatttgtaagttttttttttcctactttttactctgccatcaacttgattttagatttctaagttttcttccaactataatactcagggattgtgtagtttctcctgccagatgtttatatgtgggccttttaggggaaaattgtgtttgacacatggtgtatgctccataaatatatagtcaatgattaaaaatccaaagcataaatcaggacttctcagtcagagaaattaaacagatttttagaaccttacatctttgaggtactagatgaacatggagccatagctacttttgttaatgagtataacgttatatcgttttgttgatgttgtgacaaccaaatgaaacattgccacaaagtttgcagaactaggttttaaaatgatggtgagtttaagtttcattccaagactcaataaataattgaatgaattttcataagtgacacatatttatactttttgctgggaatttttggtatgaaacccttatttgggtaatgttcatattgagctgagttctaagaaactgtggtgtgggaagatgcagtttttaatgaacttctcctttcttgctttgtaaggtatttcccagctctagagtttatgctaaagtttaactgccttgaatttttcctgttgggtgttaatgtgaaatttggcctgttaaaaccatgttaatattttaaatttaagtatcaataatgctaggaaaaccttattgtgccctcacaataactaagtgctttccatttcatttacatgtacaactttaaaaattagacggtaggccgagaccggcggatcacgaggtcaggagatcaagaccatcctggctaacacggtgaaaccccgtctctacgaaaaatacaaaaaattagccgggcgtggtggcaggcacctgtagtcctagctactcaggaggctgaggcaggagaatggcgtga

SEQ ID NO: 134942 - DNA, 1053 bp, Homo sapiens
aacagaaggctaatacttatatatttttggaggctaagacttgaattgcaacttagcccaaagaaatcactgtaagtagttagggttatcctgaagggaatatgttttatttatttttttgaagtctgaaatatcttggccttgaatagcatgaaattcccttattatctggaataaaaaaaaaccctaagctataagtagtgaaagtcttaggaaaatatttttgaagcatttaaaaaaaaattctgaatatgttgtgtaagaagtacagtgtaattgaatatctggcagacattctatatgagtatctttatggtttttgtttttcaggcattaaaaaatatttaatcattcatgtgttgagactcattcttgagttatggatgacaaggcttctgttggaaaaatcagtgtctcttcagactcagtatctactcttaatagtgaagattttgtcttggtttccaggcaaggagatgagacaccatctacaaataatggaagtgatgatgagaaaacaggactcaaggtaaaactccctaacctaagattgttttgcttagcttttctaagcccattgcaaaacttggccttaacagaaaacagatatgggaggaaagtgagaacatggaagtaatatacttctttttctttaaagaattttatttgcacttagtgagaagtttgtatttgattaaagattttcactctgattagcttttcctaaatttttcaatacccctaagtgtcaaaactagtggttatagtataaacatttgtcattttagtattgttttcacttttccattgaattacaagtacttgttttgtttggtcctggtttacataatgtaagggcactggcaggtcaaagatgctatttatgaaaatgtgttttaggattattgaaacaactttaaatacctggccatttttttttttataatttctcagccactattacttattttccaatgccctattattgttctactctttattgatataaataaaaacagattatctgttaaagttgtcatttaaaatataagt

SEQ ID NO: 134943 - DNA, 1044 bp, Homo sapiens
tcgtaagcatatacatataacttcaggacagttgcataaataattgtcacattttttaccataaatgtaatcattcacatacacttatcctcttccatattcttatatttttgcagcttctggtttttaaaggcagcaagatgggggttaactgttgttcactcactgtggcattcgggtttatttttactctttttttctaggaatctatgggcaaaagttcagatggaaagtcgtatgttattacggggagctggaatccaaaatccccacattttcaagttgtaaatgaagaaactcctaaaggtgatacagattgttgacatcatgaacagaaattttagtctcaagaagagatgcaaaactaaggaccccttctttgaccaatatccagtgtttacctaattttgatgaaaccgaagaatttgaatagttcttcactttattattaaatttgacctataagcaaagtatcactttttcccacttttccatcctttttttcattttttccttcccctctttcttttctttctttctatttatatgcttatttacttacagacttataagttttatttttgtacagaggtaatccatgcacataaatggttaaaaatttcaaaggatttatagggggaagtgagtctaccacagtccccagggctctgtcccaaaggaatcactgttagcagtttcttgtgtagctcttcaaatactctatgcataaagtatctggaagatatttcatatgctctttgaatggcatttaatagctgcatattatcccattctgaaaatgtaatttgcttaataaatgcctcttattgagcatttttccccccttcagttttttgttattaatagcactatagataaatagttaaaggatgtaaacagaccattcaaataccattgttaaccaaatttaaaaattgagaagtttcagtgttgatgagggtgacataaagaagtcatatgccacttgtgcagaacaatctgacagtacagtggtgtttttgttttattttttttattttattt

SEQ ID NO: 134944 - DNA, 1044 bp, Homo sapiens
tttgaagcagaactagagtactgcttagtaaatgcccaattttcctaagaattttaagatctaaacatatgcttttctgttttaaaaagttacttctaatgtagatactcaaaaaaacatcatttattttcacatcctgtatgaaatcagaagtgattgcagtgagccgagatcactgcaattaaaaacattaaaaacactgcaattaattaaaaacataaagaactttactgcttaataaataatattttttcatcttcaagataaagcaaagggagagaaagaataatactgacactttatatgaagttgtatgcttggaaagtgaatcagaaagagagaggaggaaaactacagccagtccttcagttcgcctgccacagtctggatcgcaaagttcagtgataccttctcctccagaagatgatgaagaggaaggtaaactgtagggatagcttaatttatttttgggggtggaagaccatgcaaactattaaaatcgtatcaggggattgataatgtgatacggcatttataattcatttaatgaattccttatgagagtttactatatgtaagtagctgtgggagatttaaaaatgattaacattgagttttctttaagatacttgtaacccagttggaaaaatgagatttataattagctccttttaaacaatcagtgtagtgctagcttggtatattagcacatttttttttagaacaagtttgacacagcttacacctaaagaaatgttcctatctcaacacattcattttgcaggaacaaattcactgtgccaaaatgtggcttgcacacatgaccctttttaccaaatatatttataaatatatacgtttatatattactatgttttacactgataaacgttaagaatccactggttctttgtttcttttttttttttctggctaaatctattgaattaatctgtcattctctattaaaagatataattaccttttaatgaggcatgaaggaagggagccacaggaaacatgaatgagagtcgttttctaatt

SEQ ID NO: 134945 - DNA, 1118 bp, Homo sapiens
aaataaaacaaaacaaacacaaaaattgagaaagacactattatgaaaccagagaatgctcaaatcttcataccatagattttgaggaatatctgctggttacaaagaaatctgggcccgactaaaggttcctcaggactggcatcaagttttaatttatagcagacataccttttttaaaaataaaattttagggggttcagaaggcctctactgatagttcttaactagggagagataaggactaatggcagtgtgtaccccttgggggaaatcatggaacactagaacataagctctgtgaaggaaaagagtgtctgcttttgcctcatgttgttccctagcgtataccacaacatctgatatgtagttggtgctcagtaaatattggcagtatgggtaaccccctagaattcatttttatagtgaagagttaataacaggagaactgggactaaagaaaactgtgtagccatgctatcttttaattctccctaacgcagtgtacaaaccagagaaaccattcctgctgtgattgtttgcttccagggaagaaatgattacatttctctcgagaggcttcttacccataagacatttggcagaaacccagaaattataaaggggacatgtttagaagcatcattctgaaactgagatgcttgtcctaccccaccttaggcagatgggttcttaacacagattttaaactactactacccagatttattgaaagtatccaaaatgtgaaagagaattttgtaagaaaagtttttctaatatttttgaagaaattaccatcccttctaaattttagtacatttttcatagccacctttccccaaagagttgtatttggtatattggtgttttaataaatagaaaattacttgagagattagaaagtagggccagtcttgcaaggtagtgaagctggggacatttaccttagtgcccttgagcctttctttttttttttgagatggagtctcgctgtgtcacccagacaggagtacaatggcacaatttcggctcactgcaccctccgcctcctgggttcaagtgattctcctgcctcagcctcctgagtagctgggattacaggtgcccacaccaca

SEQ ID NO: 134946 - DNA, 4646 bp, Homo sapiens
tggagttctgtggtgcgatcttggctcactgcaaaatttataaagaaaagaggcttaattaattcacagttctgcagggctggggagacctcaggaaacttagaatcatggcagaaggggaagcaaacatgtccttcttcacatggcagcaggaaagagaagaatgagtgccagcaggggaaatgccagatgcttataaaaccatcagatctcatgagaactcactgtcatgagaacagcatgggggaaaccgcccccatgattcagttacctcccttcgggtccttcccatgacacgtgggattatgggaactacaattcaagatgagatttgggtggggacacagagccaaaccatatcattattatataaacataaatgtcaacatgcaattgcattatatacatatattataatttcttcaaccattctctactcctattgttggacagttaggtagtttgaaattttttaagtgttttaaataagacatatattttcatgcataaagctgtttgctttggaaaatgagagaaaataccatattttgaatcctatagttttataattaaatagctcctttttttttttttttttttgcaattgacataattatggacctatgtggaaaacaaaagagaattaaagaggttacagcattttacctagaactatttttattttctttgtacctatccataaatactaaaagagagaaattatgactttatgctcccagtaaagtctttcaaatttgactcttaacattccagtgttcttctggctagcatagccatctctgttaccgtttttgtgtgttttgtttattatagataatgatgaacctctcctgagtggatctggtgatgtatccaaagaatgtgcagaaaaaattcttgaaacatggggagaactgttgtcaaaatggtaagttatgatagaatagttttttttatctgcaattttcattttatgggtagagaatcttacctaactataatcaattttggaaccagtagtagaaacctaagcgcaatgtttgcattctgtgatctattttagggatttatatgagtaaaagtagagaattgaaatcaattttcagaatatcaggaacctaataaattctcattgctggagaaaatatttatccaaatgtggaattcatgtacagaataaataagaaaagtatcttttatgttgaagaggttaggaaccactgagtggttcagataatacacaacagtcagtttagagggtgttcacacaatgcatagagccatggtagagaccccaggtaggatttttcccttatctgtgataagtatctagaatgacagagcaaagtgtcataagcatggtatatattacctgctctatcgattactatctcttataaaattcctactaacacttacaaattttaggaatttctcatcagctcaagagatggtttgacagcagtgttaagaagcactatcctataggctatctaaaaagaatacattgccttcaggatgggtgtagtggttcatgcctgtaatctcagcattttgggaggtcaaggcaggaggattgcttgagcccaggaattcaagaccagcctggacaacttggtgaaaccccatctctacaaaaattgaaaaagttaactgggcgtggtgacgcacacctgtggttccagctactctggaggctgaggcaggaggatcgcttgagcataggagtttgaggctgcagtgagccttgattgcaccactgcactccagcctgggtgacagagttgagaccctttctccaaaaaacaaaaaagaaaaaataccaaacaaaaagaatacattgcctttaggtatttaacatgaccacagatattctggtaagtcaggttggtgagacatttatgcagtttccttttctccttgaataggatgccagtatatgctgaaaaaagctgagcttggaagtgatctgaacacttctctatttctgacattctggttactagggttgtcaaataaactccctattggcctgttactttggggtttgatttttctcagacattttaactgttgaagtatttcactgcattgttagaataaagctgtgtctcagaattttaaagcattgtgtcatgcccttaagggataggactacaaatgggcattatctgcttttatattactctcacaatgctttacacttttgacaaaacactctccacactggaaaatgtcaaatgtgtacaggagaaaaaagcaaaccaaagcacgatttgtctttacacaagttgttttaataaatgaactctgcaaaaaaaccagagtaatagttttcttatatttttggtatttctttacatcaggagacaaaacttctggtgctcttgtcacaataatattttcagttcattgagtttggagtgtttgggatgctgctggcaggaattttatctgtataaaaaggtttctgctctaaaacagaaacataattgagttttgacatggttacataatatatttaaaatcatgtagatatagcattaagactctagttagattttattacacgaacccatcagcatcttatacaacttggaattcgttttgttatcaagctttgttattcatttaattaacatgtcttcctattccctcaaatgtatttattgagtttccatctgtgtctgccatctttcagggtatttaaactatttttgcttgctttagtcatgtcttcagatataatagtgtctcttctttagttcattacatcattattttttctcattattatttgtgttctatggatatgtgttctatgggtaagaagcattgtaataatggaattttaaagcctggtagacctggtttcaaattctacctctcctacttttaagctgtgtggtcttagacaagtcacttaactcttttgagtctgtttcttcatttagaaaatagaagtctataaaattaccatttgtaattattatagattaaaaataatggatgccatggttgtagttatagtaacatagaactaatgaatttaccatattttaggcactgtgctgttatgtgctctgtgtcaactctaacaaccttataaagtatttgttttttacagatgagactggtgcataggttaaggcattctagttagtaaatgtcacaaccagaatttttaacacagtcacggctgatcccaaggctggtttatttaactctatattagattttagtggtagtattaatagtatctttgagctctaattctccaagttcattttttttgtttgttttttgagacggagtctcgctgtcgcccaggctggagtgcagtggcgcgatctcggctcactgcaggctctgccccccggggttcatgccattctcctgcctcagcctcctgagtagctgggactacaggtgcccgccacctcgtccggctaattttttgtatttttagtagagacagggtttcaccgtgttagccaggatggtcctgatctcctgacctcgtgacaagttcattttaatatgactgttaatggataagagaactaatgtcagtataaaataggttgctaagttggataaagttaatattatcaatgagatgaaattattctgaaagtaattttatcaatgtaaattaagctagtaaggttagcaggctttgtctgtaaagagccaaataataaatattttaggttttgcaggctaatagtctgtcacagctactcagttctactattgtaatgcagaagctatcatacacaatacttagacaaataagcatgactgtgtttcagtaaaagtttatttatgagaacaggtgatagttaggcccagtgtggcccacaggctatagcataccagggattgggttagcagcagaactatgtctgttctttctgctcataacttttcaacttttacataatgtttttatctaaacaaggagaaaactattgaactgtccatagcacttgcattagggcaccagtgtcacagaataaatcacttttaaatgtgctgtgcagaattcttataggattctgtgaacattttgagaaaaatcacaggcctttttataatttgatagtggttattttgtatcagtaacttctgcttacgtctgatagccacagcatcttcttaatgtcaggatcctgttttattgactcagtaatggtggctctcaagtcacaaaccagctgctctataacagagcattcattagtcttaagaatttgaggactacctcagtcatttaattgacttccctgaaattttttctgcatctgtaaaactagaggtactaccatctacctcagatggttgttctgaaggtcaaataagatactgtatgcagaagcacattgtacatttataccaacatttcaaggctagtttaattttccccattttataggtgacataaatgaagtccaaagatttcgataacttgtagtgatatagtagttcagtggaaatgttattagccaccataaacattcagaaaagttatttgaaggaaagcatcataaaaactgttggaaacatacttgagatattttattttaacttagaacatataaatatacaatattcttgtcaattttttttttctagacaaagtc

SEQ ID NO: 134947 - DNA, 1039 bp, Homo sapiens
tgcagtggcatgatctaggctcaccgcaacctctgcctcccggctttaagcaattgttgtgcctccatctcccaagaagctgggattacaggtgcgcaccaccatgcctaatttttgtaattttagtagagagtagggtttctccattttggccagactggtcttgaattcctggcctcaagcaatccaactgtcttggcctcccaaagtgctggaattacaggtgtgagctgcctcacctggcctggaaaaacagcattcaaacatgagataggaccttcaccagaaaatgacttttatgtcttcagaatattaatgttctttcccatcatcctatatccagacagattttttttgtttcaataagtattctgattccttccattaagttgatataattgtttagctagtatttatcgttgagtaactgttacaaccacagtgttggagctgggaggttaaacacaaaagcaagtagctgtcttatgatagaatgtgtctgaaaaagcacagtgggagccatcaaaagaagttaacagttctatctgggagaacagaggagtctttatcaggaatataacatttgagatgaattccaggtatagaaagatgggtacagcattgtactcatagtatgaacagagccactgaagaataaggttatataacatgtatatctagcagagatacacctagtttttattttcttttgttggcaaatcatattttggatttgtaacactacttattttttttgaagtcctttgaaatgtttggtcaaaaatgattcttaagagcttattgctttaaacgaaatattttggtaagactattcataagacatgaagtgtctgtaactgaatggattctgtttttctggttccttgaaagtggtgacgtctgttgatagaaaaggaacctggtagttatatgatatgtaaaagaaagactattaacaaaatatgaaacatttgattgatttgtatatactggtgatgtgtactttatatttcacattaaacttacaattttgtttttc

SEQ ID NO: 134948 - DNA, 1001 bp, Homo sapiens
tgtcatcatttatgacattaccaggaaaaccacaatataatatgatacagtttgcattgttttaaataggcagaagcaagattgtatattctaagatacaaaggcttatttgtaccatgaaacttcctgtaatatccatgcctgagtagaagaaggtacatttacttttctatcttctgtttgtattcttgtttactgctcagcaaattagaagcaagaaatgcatctcaaaattatagcgtagtgtcaaatatgggaacagtgtaatttatctgtgctatttgtgtagtattcagaatgggagatactttatttttctcttgaaaaagtgatcttaaagtttcttggccaatattcagtgaatcatgagagacaaaattaatggtgaatagccttctagctagaacttcttgtgcagctgaattatgattctcagttgccatacgccatacacttaaaggaagttaacatacttcctttctttaatattgctctttgttctttgggaaaatgccgtgagaaaatagaaattacccctctggtagtgtgtttcagtctaattcctgacaccctgttctgttactaccccttctccttgctagcaccctgaattctgcttatctactaaaagggggattccagacagacgaggaaacagccttcaaatggtgcactgcaggcatagcaagccattcccacactgtgcagtctggaaatcggggcacctctctgacgatgaattccaattagttgctaaagatgccagagtgtgtgcacgtacaggctttttctttcccctccccctttcttccttttcccaagccccctcttctccctgtttcccctcctactcctttatctcctccctccgtgtcttagttctgcagtacgcgggttgaagcacattcctgctttgcaaggctttctgctaaggatgtattgtggcttttgtttggattgcagcatgcagaattacaggtaacattctgaaattgaactaa

SEQ ID NO: 134949 - DNA, 2162 bp, Homo sapiens
tcagttgtgtggggtgctattgagggtagccgtgaatagtggtgccagtaggggtggagcgggagggatgatgccagcctgagctagccaggttctttgattagggcattggatgtgaaatgtaaaatgctctctccttttcttctatcagctgttcagaggagactcattacaactcctgctgaagctcctaatcttcttcccttctcttctaccctttccccctaccctcacttggcctgaagacgttctccccagagtttaccttgctcccctggtgctatgtgtatggtgaacctggcactatggccgcgtctgggactggccagacaactgctgctggctctccttattccaggaaggatttaaaggggaattgcactgcaggcaatgcaccagagcagcagcatcaggagcttggggagtaaggctcctctggcattattacacacatgcaaagctgaccgcaatgacagcagctgcttctttgaactgttggcagcagccaagcggcagcatgaagtgacagatcactcctgagctcaagatgaactccaccttggatggtaatcagagcagccaccctttttgcctcttggcatttggctatttggaaactgtcaatttttgccttttggaagtattgattattgtctttctaactgtattgattatttctggcaacatcattgtgatttttgtatttcactgtgcacctttgttgaaccatcacactacaagttattttatccagactatggcatatgctgacctttttgttggggtgagctgcgtggtcccttctttatcactcctccatcacccccttccagtagaggagtccttgacttgccagatatttggttttgtagtatcagttctgaagagcgtctccatggcttctctggcctgtatcagcattgatagatacattgccattactaaacctttaacctataatactctggttacaccctggagactacgcctgtgtattttcctgatttggctatactcgaccctggtcttcctgccttcctttttccactggggcaaacctggatatcatggagatgtgtttcagtggtgtgcggagtcctggcacaccgactcctacttcaccctgttcatcgtgatgatgttatatgccccagcagcccttattgtctgcttcacctatttcaacatcttccgcatctgccaacagcacacaaaggatatcagcgaaaggcaagcccgcttcagcagccagagtggggagactggggaagtgcaggcctgtcctgataagcgctatgccatggtcctgtttcgaatcactagtgtattttacatcctctggttgccatatatcatctacttcttgttggaaagctccactggccacagcaaccgcttcgcatccttcttgaccacctggcttgctattagtaacagtttctgcaactgtgtaatttatagtctctccaacagtgtattccaaagaggactaaagcgcctctcaggggctatgtgtacttcttgtgcaagtcagactacagccaacgacccttacacagttagaagcaaaggccctcttaatggatgtcatatctgaagtggctcagttacggggttcccgtgtgtgtgtgtgtgtgtgtgtgtgtgtgtgtgtgtgtgtgtgtattttatctctaagtattcctaattcactaggaaatctgggacagaatactttgactctaaacaatagcatacaaattattcgtatggataccttctaagtttgtagaaatggttttcaaaagtgcttgtgaattagaagactcaagatcatgaagacaaattgctcttgctctcaatttttgaaatgtcttggaaatgactacagttctcagatttaaaatgaataaagccatatctaacacctctttccagctggcatgactgaacctgagtgtgaaaagcgtcagcattttaaaaagtcatcactttcttgtcactttctgggctctttccagctatttgggcttcatatgcaattgatttcttctaacggaatagtaaaatataaatgaaaaggttttagaaattactttttatgtatgccaaagcataactacactgcaagtttcaacactgtcatttagaaagccaaatgttctgtgttttattctcttgag

SEQ ID NO: 134950 - DNA, 1078 bp, Homo sapiens
tgtttttttaaaatacaaggtagttgagacattttctttgtggttaaatggaatcaactagttatttttgaaaagtattctttcagttagtgctaaggaatccacatttgaagaggagaagggaaaacacttaagtctcttattgctattttctctctggaaaaaaaatcctttggcatacagttcttaatggtcttttttttttttcctgccaaagtactagaaaaacctataggattttataattcttctatagaattattattgagagttatgtgtgtttgtatgtagtagtgatgtttgttcttaaaagtgattatctttagagcaagaggtttatttttctaaaaggagagaaggaattccggcagctccaggcacgagagtatttcctctacttttctgctgttctggaaatgttctggaagtcttcaagggacttacttgatctctgcctttggctagaggttgtaatctgaatgcgacagtggtgttcagtgagatggaagatggaagaaacccaggggacatgggttaaagtggatttctgaatccaagaaaggacatggatatttataaagcaggcagataagctttggttttccatcatgatgccagtgttcttatgattttaggctttagacatcaacttgattttaacctcagttgtgttctatttaaacttttttattttaagtgactaagcattacataaacattcaaacttcagattctgggtttttcccaaaaccttgcttgctctttatgtttagtgttagcaaattttattctaagctgcttcaaaatttagaactcatactgaaattgcaagttatgttagaaatggcttggttaaattgccatttcaaatgggaaaccttttctgttagattctgaaaaatggttgtattgtatacattttccctttaagtggtacagatctaaaaaaccaaaatttaccttttttcatacatgttagagaatgtaacctgttcacatttgcagtttgcttatgaatttttagtttagaaaatatggcaattttaaacacttaatttttgttgaaaaattgatatta

SEQ ID NO: 134951 - DNA, 1032 bp, Homo sapiens
ttttgaggagaagtgatttccaacccacaattttatgcccaaactgtcattcaagtgtgagggtaaactaaactcattttgaggtctgcaaaatcacaaaatattcacctgccttaacgtactttctcgggaagttactgaaggatatgcttctccagaatgagggaggaaataaataaagagatacagaatccaggaaacagggtctctgacacaggaggatggtgaaaacaattcccacaggaaggaaagctctacgaaagcaactatgcaggagacctagagagcagccagtctaaataggagcaggaacaaagaaggcactaggaggtatgtctctaggaaaatatagttgggattttcaccatggtgagaagaatttagttttgtgagatttttaggggaagaattggtgatagatacatagaaaaccaaggaaaagaaaaagataggcaattaataacttcagaaaaaaatagaaaattgaagaaaggaaataagatcatgacatactctgattcagttatgtgttgctgtgtatagtttggtgtttagccaaaaatgatagcaacactgttgacagggtgaggggaagggaagtgtttggggggtgaggggaaggagggtgggtgtaacagagctacagtagcatcttccatagtgtaaactctgaaactgatgtctaaagtggaaaaacccagaaaatagcaacttaagcattttattcagaagtatgaattaaaaacaaacagctttaaaaaaaggagaggtgaaaatggttgcctctaaggaatagggtatgaagagtgaagggaatttcattgtaagctttgtactgtttgaccttttcacttacgtaggtgtattattttcttttttttttttttttttgagacggagtctcactcagtcacccaggctggagtgcaatggcgcgatctcggctcactgcaagctccgcctcccgggttcaggccattctcctgcctcagcctcccgagtagctgggactacaggcgcccaccaccatgc

SEQ ID NO: 134952 - DNA, 1191 bp, Homo sapiens
ttcctgtgggaaacttgagccctaaaaggaaatgaacatagctaaaaggctgcatatcacatgggacttagatttatttttagaatggcactataatgccatatttggattgaaacaatgtgatagcagtaaaatatttcattaaataaagagccatcttttctgaggaagtcatctgcttttctatttcaacgtgtggtatagattgaacataatacttatataatcattcagctaatataattctaaagtatatgttaaaggagcttatttggcaaacatttctagagccagcttattgagtctggtgtagtaaaggttctgtgacagttcaatgattacagcatatggtgttttttgttgttgttgttgttgttgttttgtgtgtttggagtaagttgtttggaggggaaaagagtaaagggagtagagtcatttggaatgtttatattatttttcttgaaatggatgaactccttactaaattagacaacgataatagagaaacctagatggatttttgcttctgagaaatgattttggaagaaaaaagataatcagcaaaggtatttaatattgagctctacagtgttttcattagtatggttcataggctaaaaaacaaaatactcttattgtatcacttatgtttcaagtatcagtttttctgccacctgatttctttataatttcatttggtttaaatgtgatgttcataacattcaggagatttctgaactgtatactgtctaattgcagatccccgacagggcactaagtcccaaacaggaaaacttgccaaatacagattttgtcccttggcttctctcccaaggtgggaaatatgccagcatcataaatctcaagtctgttgagaaagagctaccgctgatataccaggccttaagccaccagctttccatgcagtatttcatttgcttctcataaactgtgaggcagggaccattgcatagattttatagataggtttgttaaggttcagattagttaaatgacttgcccaaggtcacacaaattagtaagtgggagaggcagtacccagagacagaacagcctggccctagactttgtgttctgttggttgcattgtgatctaagtagagcacctaaagtccatcgtctgcattctttgtcaaaagtccaactccagtctccacacaattatgacca

SEQ ID NO: 134953 - DNA, 1091 bp, Homo sapiens
aatttggcgacatccttgaaggtataaatagtttactgtttaagaaggagcataggctttaaagttagttcagatcccacaactataaaatattcatggccttcggaacatgattacccaaaaggctagagaaattattggacaagagaagaacatcacttgcatttttcatcttaaaacagaggtatcatgttctttggtagtatactgattatgatgtattcttaccaaggggaatcaactctattgtcttagctatgaagacactgcattgttaaagtagaaggtcatatttctgtgttccagttctttactgtgtcagcaaatgaaatttaacaaggggagaatattagaaataactgggtgcttggtgtattttacaaaggtttgttgacattattgacatttgttccgttttagttaactcattatagaagaggaaacagtttttgtccattggaaaaagcaaaggatattttcccatagcctgtttgaatcccttggcatttggtggtcttgttcatactgagtagattgctttgtgcattcttatgccatttgcctctaggacaaatcccaattaagtaactactcttttccatttgaaaactggcatatgggcttcattccaaagcatcaattaaagcagcagtttttctactgggagcactttacctcctccttttgcgattagtttgagtattttcctataggaaatccattcttaatagcacattttccatcttacaatagaagggtcaccagctgcagttctttgcagtaaggatggagtataatatggaagtgtatagagtgaaatgggttgcttttcttccatcttttttccccctttacatttgcttttgcttgagtggttggtccctgaagaggcagtaactatgggcatacatatgtgtatgtatgtccctgcaacatttaaagtgtgtaaatgagaagaccttgcctaaacctgaataagagtttacatgattaacctaactaaaccctctctttccttatgtttccacaggagtctccccaggacagtgctatcacccgggatattaaccgaacattcccagcccatgact

SEQ ID NO: 134954 - DNA, 1142 bp, Homo sapiens
ggtctaaatttccagcagacaattagtctccatgtaaaagtctgtcaattgtatcaaacagaatgggtttaaaaatacagttcattttaaaacatggtttattatgaaaaatttcaaacgtaaacattaattagtataatgattagtctaactgataagtatagttaatatcccccacactaattatttatcaatgtattgtcacagttgcttcatcttttttttccttttttctaaagtactttaaaacaaatcttagacatcatgatcctaattttttaatactacatctctaaaaaataagtttatccatctttaccaattaattagtagctactccacattcaaatatccttaatacggctagttagaatcaagagccaataagacccacattacattaagttgttgtctctttttaaattaaacatagtcctccttttctcccataccattgtcctgctgcagacagtcatttctgttggttttcagtcctgtctttgtctaggttgagttagatatgactgatgtctctcttagcttcattctctctcttcactgccctggtacaggccagtatcttacattgctggcagttttacaaaagctgctctgcctttgggttctggcctgttgattctttgctccttgcctaacgcagaattagatcatttcagtggcctccacagaaacctttataactgctactttataacccatggaattaaatgaaaagtcctagttcatttccctggattccttagcttagtgttgaagatattttgtattatatcctgacttagcccttattgctgcttctccaaatattgtatgcattaactacattgaacttctcactgtgctctggttgattcacttgtctaacttccccactgaaccgtgatgtcttcaagggcagggatcatttcttagatatggtagcatctgtagcacttggcacagtgcttggtctatagtaggtgttcattaagtgttgatgaattagtgaaatgtcttttcttcccccagatttcgttacagccaacatgaaacttatactccaaacattttccaaatgtatcatataatttcacacgtatatgattcctttatcgtccatcagcctgaaaaatatgctcccc

SEQ ID NO: 134955 - DNA, 4216 bp, Homo sapiens
ggcttggtggctcacgcctgtaatcctagcagtttgtgaggctgaggcagtaggatcacttgagcttaggagtttgagaccagcctgggcaacatagtgagaccctgtctctattaaaaaaaaaaaaaatgcagtgtgggccaggcacactggctcacacctgtaatcccagtactttgggagtccaaggtaggaggatagtctgagcctaggggttagagaccagcctgggcaacgtagttgagatcccatctctataaaaaatttttaaaaattaggcaggcatggtggtgcaagcctgtggtccaggctactcaggaggctgatggagcaggatcccttgagcccaggaggttgacgctgcagtgagccatgattgtaccactgcactccagcctgagcaacagagcaagaccctgtctctaaaaataaaataaaatgcaatgtggtaataatataataataaccatgcatgtatagcaggtgccatagaggcagagaagagaggaattcattctgggggaattgaaataagtttggtgcctgaaggaagagtgcatgtttgaggcagagagggaaaggacatcccaaggagagggaacatcatgaacaacaacaaggaaatacgaagttttttttagcgcagaagtggtttttccttaatcttccctactccttcgccacaggaaatgcagtggtgatagctgtattcattgtaaagaaaaagttaagattggagagaagtattggcaccacttactgtctgtcaaaatgctgtcccagtgtgggtagcatcctccagggttctgtattcaaggtcctatagtgccaccatggcccacaagtggctacattcatttacatttcctctgtgtgttttattttccaggcttattctgtgtatgatgaagagattggttattgccagggccagtcatttcttgctgctgtgctccttctccatgtgagtaattaggtctctgttatgacttaacacatggcctccctcagcttatactaaccttaggcttgagcatggttttatattgggtttggacagactcttaaggcatgaattttaacacctatagctggaaactttttccttaaattaacttaatgtcattgtggaggagatatatgatgagaataaacggcaatgttgaaaactggtacaggggtagacttcctttttattaataggatgattggagagactttaatgttggttgaactcttggggacgttttatcttctctaaagtagccgctgtcattaatacttgttttgagatttaggtattggggtaggaggaaggcggaaaagttggttttcttttagtaccattttattcattcattggcttagcaaacacctttgccctccaccttttttattttctttcaaatccacagaaaactctaaacagtgttaaggtgaacagtctttatctagtttaccaattaatattttccacactgctttttctgtttgtctccctctgcatctctttttttctcttttctgcataaacacacattttcttttttacttaaattgttttttgaaattattcttgaaagtaaataacaaacatcaagacttctaaatacttgatcatatatatgccttctgggagcacagaattctgtatcataatcataataccatgatcacatccaagaaattccacattgattcagtaatgtctgatacacaatacacattcaattttctcccaattgtctactccatagaatctagctttttttctaatcaagatctaatgaagattcaaatattgaattgtcatttctctttattcttttaatctaaattactcctttgcctttttttgtgtttcatgccattgatagttttgaaaaattcagacaaattgtcatataaaatgtcccacagtcttgatttgtctcattttctcatgattcagtttaaaatgcttggcaagaataccacacaggtgatgtcagcaaagagttttgagtacctgttatgatctgtactgtgctgaagatcagaggtaaataagagacatggtctcaatcctcctggatacagagcttgtgaatccaactagctttaagcacataatcacacaagtatatcatttattactttcagtggtgctattaaggtataataaaaagtttggtgtaagattgtaacaagggagtcttacttagattaaaggcttctcaggggaagtgacctgtaaggagcagcctggaaaatgataagggatatcattttcttttgctcttttctgtgttaacttttcaaaatgttgttatgaaaataatagatctatttgaaaagggagtagagaatagagtgttaatgggaaagtgaatggtacagtatacagaagtcctaaactggggaaacacttggtgtatgggaggaactgaaaggaggacagtgtgactggagtatcctgagtgactgggagttgaggagagagctagggagagctttgaagcccagataaggagtctgaatcttgcttttctaagcaacaggtattcaagggtattaagccattttgtgtagattgcaatacaagtttgagtatcccttatttgaaatgcttgggaccggaagtgttgtggattttggattttggattttggaatatttgcattataccggttgagcatcccaaatccaaaaatccaaagtgttccaatgagcatttccttttagcatcatgtcagtgtttaaaaagtttcagattttggagcattttgtattttcagatatgggttgctcaacctgtacaagtaaaacaaaaaccactttggtttttcttaactgaacccagcttgttgctattggtagtcatgtaaaaatatgataaagctatgacatgaataaagaggttgactttttattttgttttgttgttttaatgagactttatatctcaaagtcccacaagcctgggtgatttatcttcgttctcaccttcagttcaaggacatttatccccttgaaaatgggttttccaatcagaccctccatgtcttgttttgaactcttgctgcttgccagagtgttataagtgcttgtttagagtgaggggagatgggctacttagcatcagaatcaccactgtgggttaggccacatctccttgcatgtggcaaagtgaagttgccttccatgacaaagacttcaaagatctgggcttttgccccagatactcttaacttaccagtaatgatctgctatgcttttctcacttattacttaatctgatttgctctttagttctgctttcttctcagtgatttctgtgctcagcccgcctccatcatcttgttccatagaagcctgcccaccttcttgacttttttgaaggcttgctacattcacaccaatccttaaataacatttccagtgcttcttttttctcttttgaaaatatcttgccaagttctcagggaaataattatccataaaactatggaaaatgtaggtattattataaatgtaaatagaagtgaaggaggcttttgtagtacttcaagcattactgcaagccttagaatatgtaaggttcttctaaaacaagctatatttttaacagtgaggaagaaaaacaattttgctagaatgaaatagcagctaagggaggaaaaatggttaaacagaggtcccaggatttgggaaagatgacacctacactgtatatcagcctatttctgctcagctcaaattctgtcctttctacaaagtctgtttctgactgccttaggcagatacaggccttcctgttcttgtattatcactgatgtctaattcctattacagttattttaatactggctgtgtgagagactccttgaggacaggaaccatactgacaaagagtagtcattgttaactattccttgtttgagtgaataaatgttttaaacacaaccttaggcctgagtttctgcatagcactaaattttctggtaaggcaataatataaagctggatttaatatcctgagaaaacttctgtatgttttgtgattccccaccgccatcctccctacccaacaacttgcctatctgttacagatgcctgaagaacaggcattcagtgttctggtcaagatcatgtttgactatgggctcagggaacttttcaagcaaaacttcgaagatttgcattgcaaattttaccagttggagcgcctcatgca

SEQ ID NO: 134956 - DNA, 1072 bp, Homo sapiens
cctgggacctctgtttaaccatttttcctcccttagctgctatttcattctagcaaaattgtttttcttcctcactgttaaaaatatagcttgttttagaagaaccttacatattctaaggcttgcagtaatgcttgaagtactacaaaagcctccttcacttctatttacatttataataatacctacattttccatagttttatggataattatttccctgagaacttggcaagatattttcaaaagagaaaaaagaagcactggaaatgttatttaaggattggtgtgaatgtagcaagccttcaaaaaagtcaagaaggtgggcaggcttctatggaacaagatgatggaggcgggctgagcacagaaatcactgagaagaaagcagaactaaagagcaaatcagattaagtaataagtgagaaaagcatagcagatcattactggtaagttaagagtatctggggcaaaagcccagatctttgaagtctttgtcatggaaggcaacttcactttgccacatgcaaggagatgtggcctaacccacagtggtgattctgatgctaagtagcccatctcccctcactctaaacaagcacttataacactctggcaagcagcaagagttcaaaacaagacatggagggtctgattggaaaacccattttcaaggggataaatgtccttgaactgaaggtgagaacgaagataaatcacccaggcttgtgggactttgagatataaagtctcattaaaacaacaaaacaaaataaaaagtcaacctctttattcatgtcatagctttatcatatttttacatgactaccaatagcaacaagctgggttcagttaagaaaaaccaaagtggtttttgttttacttgtacaggttgagcaacccatatctgaaaatacaaaatgctccaaaatctgaaactttttaaacactgacatgatgctaaaaggaaatgctcattggaacactttggatttttggatttgggatgctcaaccggtataatgcaaatattccaaaatccaaaatccaaaatccacaacacttccggtcc

SEQ ID NO: 134957 - DNA, 1030 bp, Homo sapiens
tggatatgattttgggcctttaggaggcagctgaaaaagtgaggcctttgcataaagttaagacctctgaatggctcccctatctgttaaaggaggaatacaaaaactacctattagcctgagaaacagtagaaatcataatataaaatgaatagtggattagaaaaaaaaaaggaaatagaacttctggtaattaaaataatcatcagagtttacattctatttaaaatgttacatacttcataggtattacggctaacagttaatgatagtttaccatgtgcttggtactatggttaagtgcttttatatgtggggattagcgacgatatcgtatgtacagtgtttaacatagtgcctggtagttagtaagggtccaagaaatgatggctacgactataattatttcctccctgatcgttaagtagataacaaacattttacagtaatattttcaaagaaaataggtttgcacaaagcatagatagaaccaagtgagttctgagattctttgagtcactcttcccacctcagcctggttcagcacacaagaggatgctgcctcttttttgttcatgatttctttgcctccaaaatcccctttctcagtgtccccatctcaattaggggtacctggttgctcaggccaaaaaccttgctgtcctcttgactcctctctttctcacactccacatctatgctcgtcgtcagaatatatcctgactctgatcaccgccaccttcattattaacatcctaatctaaccatcatcatcctttcctgtttccacagtggctccctccctggctcttctctatcgcatgtctcctttgctgaaaactcacgtttccaccatccagaggcatcctgcattcaattttgctccttttctttccaaatgttttttatgcattcttaaataattgagttcatacagtcagtatcatttttcttcctgtttcatgcaattatacggattttcctcactgagatattgtgtgtaaataatcagttgtaaatggttatataa

SEQ ID NO: 134958 - DNA, 1195 bp, Homo sapiens
actctgattctttctcctactacgtttcccccttctccttccaattcagacacgctggcctccttgctgttctcagacctttgcactggtcagtctctctgcttgtaatgttctcctgaatgtctgcatggcttcactgtcccctcatccagtcttcggctcatatatccacagcttctcaaattgcagtatctaaagtagcagctcccccaacctttatgccattacgtccttatcctatcttatttttccctactggaatggaggctgtgcagcagaagagacaatctctttggcttactgctgaatccacagtaccaggaacaggatctcgcttataaatatcgattgaataagtgaatgaataaatacactgttgagtgtctaccatgtgttttacaaagaagagttaacatggatttgggcaaagcttaatagtttccagccagaagttttaccttttggattcccattagcttgaaacactttaataatatatggatcctttatttccatatatggaaaggtggggaaagtccagataggaggtatctaatgtctttttttttcttgcctatgccttcaatgagttaagtctgacaaggctgccttcagtgtgtctgcacagcacatatattttgtgcttagatatataattccttctagacctggagaactttgcatgtttggggtacactttggatgtttccccctatttgcacatgatttcaggtgagatagtagtttttcttgaaatcggctcatagcctgaaaagagtacagattcaccagaacataagagaatgggatttttctgccagaaggtgagctatggtatgtacagtttagttagtgatgatttgttgtcttctggcagctatacttaataccaaaaaattttaagagagatacacacaatagttgaacctgttatgggcaaagtgataattcagtggtaacttgccagttcaaaattaggaagtcattggcaagtgcatcctgagccctgcattctgtggcttgcgtgaggtatgagtacacatgaggatctgtggtttgagtccattagacctcgaaagggcggttcatgatatgtggttccaaaagcttgtttggaaacaagcttttgaactttttcatgtggaatttacaaaggtaacttttgctctgcaactcactgaaatctctttccatt

SEQ ID NO: 134959 - DNA, 1355 bp, Homo sapiens
cctctttctccttaaagtgaacttattatggaactgaaatgttttacttatttcttgaggagtttagatcccctgctcctaaactaaaatttaacagtgtaccttagaactcatttagctatccattgaacttctcccgctttatgggtcagtgacctgagatagaaaaattgttccacttctgatagaggatctaaaaggaattccattctaaatagattattctagaagatcatttatggacctgggagccccacagccctttcatacaactgcaccttgcatagtctttagaggggaatattgaaaggtcttttagatttttgattcaagaaatatgcaagggaagctctttcttcatgtctgtataggcatttttgagaacaagtgagacatatgaggctagtttagaagacccaagaatcatgctctaagagatggcccagtgagtttcctagatcagacctgaggacttggccattttgccatagaatcctgcttaaggtgaaatggaattgctgaaccattgcttcattagaacgtgtcattttaaacacaacgtgatgtgccagacttcaaactacttgtaagaaaagatactagtacaaaaaccaaatagcagtgtctccaaattaatataattcttaaccatttgctatttggagaaacagaaaactcttcagcattttcccttgggggatatttttattccagagcttaaaaacaacactagtttgaacttcattctctgttcaaattgtttgtgtagttagtatgtattagatttaagctctctgagggcagcgacttcatccgtcttgtttgttgatggattcgcagaatcatacacagtgctctcatacagtgaaataatcctcacagtgaccatatgagggccttttagggatgtgcatactgagacatagagaattgatgtaaactctcaaaggatataaagttagtaactaatggagttgggattagatcccaagagtttcagactctgaagtcaattcttatgggcattctgctttactgtaaatgatggattgaatgaatgggacaggagccatttgtgtgttatccctttttagtgatgttagtaatgtaatctcaatctctgtgtcagagttgaaacttattctctatacactacacaaagttcagctttctttataactagaccagactgtagttttatttctttgcttgttcctaccttttagaatcagattttatgaggaaacttctgaatggatgctctctctgtaatgaaccctaaattttgccagttgttgcaagggtagcagtgggcactgccttcttttaataagctggtctcccttagtccttat

SEQ ID NO: 134960 - DNA, 1731 bp, Homo sapiens
gccttctgataggaatcagtgaacagcgggtatgattcagagctctgagtctaaatccatagcttcccttgcttcccgaattcaattaaaagttaaaagtaagagaaaaaaatgagtcttggacttctaagtctctgttcattaagtgttttcattcttattgtgtgaaacgcgttaggaatttcacaatgaataggacttcctgccctcatggagtttgtacgttggcacctatatatatctttgtattgctaatgccactgcacatagtagtgcttaactattggttaaataaatgtccctgctgcatctttattaaggtaaaaaggaagcctttggctttgatttgtttaacatcctatttttatgagtcccaactactttccaagcattgagcactggagatacaatagtaagcataacagatatggcctgtctcctggtgggaagacagacaattaagtagaaacctaagtaatcgtgagcttggattggtgccatggatgaattgacttgatgctatgagaatagttacataactgaaagaactggcctgacaggacgagagtatgagggaagggtttgctaaagaaggggtgttggaactgcaatcccagaggtgaataggagtgagccaggtatgaggttgtccaggcagaaggagcatgcttgcattgcatgtccactttggttgccatttccattcagaagaaaagtcaatgcaaggaaaagagagtcctttctcagtaattcagcaagcatttctgggtactcgctatacatgaacaggggacaacaatgagtgagagacagttctggcctggagaagacattcataatgtcataggcaggctgggaggtgctggcctctcccagatatggcctcaaaaggaggcttaaaatgcccctgctgctgctggcaccttctggttccccattcgggtttcaggcatcagcctttatcttggaattggtgcctcagaggcagcctaaactagttgggtttggtatgcagccacccatgctgcaaaagtcagcatcagccgtgaacccatgagaagctatggtgtttttattgattttgtgtttgtggtgagtgtttaagggagaaagggagggtgggagggagaaagagagagactgagaagaggtgagggtgaagactgggaaaagactgagctggtgaagaagtcaggactctggaccagcaaagtctgtgaagacagcagagctttgtgtacacccgttcctgagaggtgacccctgaggactgattcggaagtaaatgaagaccatcagctagagaaacaagcagagctcttagagaaaccctgtataattatgaaaatgatacttaaacagcattctgtttttcctaattataaaaataattcatactcaatgcagaatacttggaagacatgggaaaaatgaaaagaaacacccatatcctatcatgagaatgtaagaagcaaatgagatgttggtccgtgtaaaagttctattatttaccaggtacttatcacacaccaactcttgttatatatgatactgagggagaatcaaccctattactatgagggtgaggcagctataataagggttaatgaaatatagaagacattgttttgtaattagcctattacaacatatatctatggggaaaaatgttaattcttccttaccccagcaaaagaatgaaaagttgaagaaacttgaagatttgtgaaa

SEQ ID NO: 134961 - DNA, 1042 bp, Homo sapiens
ggcagaaggatcacttgaggccaggagtttgaaaccagcctgggcaacacagcaagactctctctacaaaaaaatataaaaattggccaggtatggtggcatgtgcctgtagtcccagctactctggaggctgaggtgggaggatcccttgagccaaggaggttgagaatggagtgagccaagccaagactgcaccactgtgtcccaatctgggtgacaagagagagaccccatctaaataattaaaaaaaaaaaaagaatatgaaactaatggtaatcccttcctgaaacttcagtaatcagcactaaagtgctgacgtggaaatctgcctgttagtccccaggtccaggtaactaggactctcagatctactccactctaactttcttattttacagatgaagaaataagacctagaaagggaacaggataggcccacatttgctgcgtgttggtgtcagtgtctccagacgctctcagtgggagagtgtgttcctctcccattgactgtggacacctcccctagtcaggctgtttgcaggtctgcctcaatcagagctctattcctggagtctggctgctgcccaaggttagacagccaggaagacagcattctgctccagctgacctctacagaaagatgctcactcaacacctggggtgaggccacaaactggagcaggacatctttaagctgagatcttctgcagtttaggcccaatgctagggtaaacttttattgtgtacctaagtgactcacaaagaaagcacctaagtaaaatgtctatgcaatcagtaagtgtatagacaatcctaacagatcaatagtagtggaacagaaaataaatgcggctgcgaacagcaaacacttcatcccagtgcttttgcattctgaataaatgagaggaagggcagtggttatgaggctcccatggcactttattaaaaaaaaacaaattgacaccaaatcctgtaaaacattttcacaaatcttcaagtttcttcaacttttcattcttttgctggggtaaggaagaatta

SEQ ID NO: 134962 - DNA, 1056 bp, Homo sapiens
agatgatatgattgtatatgtggaaaatctgaaaaaatatatttaaaaagctgccagactaacaaatgagtttttacaaggtcacaggatacaaggtcacaacacaaagaccaactgcatctctagagactagcaatacacaactggaagatgaaatttaaaaaacaataccactttacaaaaatagattaaaacatgcacgtcttgtaaattgaacactaaaaaacattgctactgagagaaactgaaaaagatcttaataaaggaaaattttaacatgttctggattgaatgcttcaactgttgttcagatgtcagttctccccaaattgatctacagattccatgaacctcactcaaaagccagaggcttttatttctagatattcataagctgattctaacactgatacagaaatgcaaagaacaacaaagtcagagaactcacatgaactgattttaagatttattataaagctacagtaagcaagacagtgtggtattggcttaaggatagacacagaaacagacggagcagacagaatcaagaagtgaacccgccaatttagggtcaattgatttttaataaaggggccaagctaactcaatggggcaagttcagcaatctgcaaaatgtcacagaactaataaggagctgaggcagagtttacatcctgctggacagcagttgggctcaccagcaagtttccttcactctcatgtctgtctcaacacagaggagtgaccctgctagaggggactcggacatggtcctatcagctctgcagggaccttccatagcttcccctcatccttttaacaccagtgtcaggtctagtcattactcccatttcatacagaaagcttgattggggtcaccgaggaattaagtggctggcatggaatttctccacagctgttgtgtgaagaacagcaaaagtgacaggtgatgaataacaaaagtgatgtataatcaaccgaaaatacaagagggccctggaaattttaaagcctcacaccagagcttttctctgagatgcaggaaggaaagagctc

SEQ ID NO: 134963 - DNA, 1065 bp, Homo sapiens
tgtgacattttgcagattgctgaacttgccccattgagttagcttggcccctttattaaaaatcaattgaccctaaattggcgggttcacttcttgattctgtctgctccgtctgtttctgtgtctatccttaagccaataccacactgtcttgcttactgtagctttataataaatcttaaaatcagttcatgtgagttctctgactttgttgttctttgcatttctgtatcagtgttagaatcagcttatgaatatctagaaataaaagcctctggcttttgagtgaggttcatggaatctgtagatcaatttggggagaactgacatctgaacaacagttgaagcattcaatccagaacatgttaaaattttcctttattaagatctttttcagtttctctcagtagcaatgttttttagtgttcaatttacaagacgtgcatgttttaatctatttttgtaaagtggtattgttttttaaatttcatcttccagttgtgtattgctagtctctagagatgcagttggtctttgtgttgtgaccttgtatcctgtgaccttgtaaaaactcatttgttagtctggcagctttttaaatatattttttcagattttccacatatacaatcatatcatctctgaatacagtttttcttcctttcatatttatctgcctctctttttcttgtctcactgcactgactagcatcttcagaatgatgctgaatggttagagtggacatcattgcctggttctggacattagctgtaggtttttcgtagagtaggttgaggaaataaattctcctctgttcctgtttgctgagagtttttgtcatgaatgggtgttgaattttgtcaaatgcttttcctgtgtctgttgagataatcatttggtatttctccttaattttgttaatatagtgaaataaattcacttttcaatgtaaaccaaccttgcattcctaggataaactccagttggggtttctattttttattaaagattttaattcttattaaatatttatatgttcataaggaatatttgtctggagtttt

SEQ ID NO: 134964 - DNA, 1153 bp, Homo sapiens
agcttttagttaagatctaatttcttgcctggtctatttattaaaacagtcttctacttgctatgtctccctcttctgtccacctaatgcacaccaggcagacaggtaatgctctatttctggtgacatcatttcattttggcaaaaatctttaaactccctagcatggcatttgaaatgcttcgcaatctggatccacacactctcttccagccttagcaccacctccatcccctactgcaaggaaagaactcctgagggtccttcctgggcagccactctcctccttgtgctgctgaacatgccactccctctgcctggaattgccactgttctctctctcctgtagctacaagccctgtgcattctttgatcacagcacagctactgctgccttggtgatgcctttcctgattattccgggtagtcacactaccaggccttagctttgcagtcccagacctataacagggcctgccaaagagcagatgcccagtgaatgtgtgccatgagggagaatcagccctaaagcttttatcctgaacttgttccctccataaacagtgcttagggtttagtggtgctggtggacctagcaatgtgtattaagatgaccaaaacaagccctaacttctttatcaggaaaggaggctcagataggtagtatattaacagtcacaaagctagttaagtggtgggaactggaagaacaaaagcttgcatttataaagcccccgacattctgccaagccatttgtgcacactatcttacttagtcctcaaaccaacctatcagatagggactctcatcatttccatttgtagataaggaacctgagatgtagggaggttactaacccaaggtcaaacagttcagtggtagagctgtgtttctaaagcactgtcttctcatcccatcaaaagattccaagcttttgtgtattattctcaatatgacagcggaaatcctcaagacaggccaaatactgatgagacatccactggccagtaacaagtcctatatttcttctcatgacaactgtgaccaaagtttaaaaggtgtggaaaaaccccaaaccataaagataatttctggggtctctagtgcacatcaggaaacccagcccgcaggcacatgtctgagctctgctgc

SEQ ID NO: 134965 - DNA, 1100 bp, Homo sapiens
gttactggccagtggatgtctcatcagtatttggcctgtcttgaggatttccgctgtcatattgagaataatacacaaaagcttggaatcttttgatgggatgagaagacagtgctttagaaacacagctctaccactgaactgtttgaccttgggttagtaacctccctacatctcaggttccttatctacaaatggaaatgatgagagtccctatctgataggttggtttgaggactaagtaagatagtgtgcacaaatggcttggcagaatgtcgggggctttataaatgcaagcttttgttcttccagttcccaccacttaactagctttgtgactgttaatatactacctatctgagcctcctttcctgataaagaagttagggcttgttttggtcatcttaatacacattgctaggtccaccagcaccactaaaccctaagcactgtttatggagggaacaagttcaggataaaagctttagggctgattctccctcatggcacacattcactgggcatctgctctttggcaggccctgttataggtctgggactgcaaagctaaggcctggtagtgtgactacccggaataatcaggaaaggcatcaccaaggcagcagtagctgtgctgtgatcaaagaatgcacagggcttgtagctacaggagagagagaacagtggcaattccaggcagagggagtggcatgttcagcagcacaaggaggagagtggctgcccaggaaggaccctcaggagttctttccttgcagtaggggatggaggtggtgctaaggctggaagagagtgtgtggatccagattgcgaagcatttcaaatgccatgctagggagtttaaagatttttgccaaaatgaaatgatgtcaccagaaatagagcattacctgtctgcctggtgtgcattaggtggacagaagagggagacatagcaagtagaagactgttttaataaatagaccaggcaagaaattagatcttaactaaaagctcccaaatctttaggcatttcaggcatttctatgccagttggagactgggggaattccccgaggcctctccagagtaaatagactgca

SEQ ID NO: 134966 - DNA, 1041 bp, Homo sapiens
taaaataaaaccaacaaaagaaacagtaatacaattttactggtttatatttcaattcataaagttgacacactgaaactaccttagcacaatgtccacacacctagcattagataggcttacagctattttggtaactgaacaagaaagacacagaaagcagcaaaggggatggttggtggggagggggttgccacttgttacctcccttattacagataacctcagcaagcgttagtacagccaataagaaaaagagctacaaaacaacccgagtgtctttatatacaaaaccagtgcctcttgtaagcagccgcctcaacactgaacgcagaaaagaggacaaaaccatctgcgtgtcagcctgtcagcatatcactatataaattaaaagtcaaagttttttttttttttaaaggtgctaaaatccattccatagctttgaagtgagaacttacagcccatctgaacagtgaggtttgtacccaggcatactctgaggagggcccaaaggcccagcccatctgggagggacaggcccggaggatggagacctcgcagcatgtgcaccctgcgcagacatttacagacacgcaactcagtctttctcacttggacaacctgttgtgcaaaaacactaggaatcttgaagtgagggagctctgtccacagctcccgtaatggcagggaggagagcagagcccaatgaaccttgagtgaaattaagtgctcgaataaccacataattaaattgtgcagatcagcagtcctagtctggaatttaaacactgtcaacggggcatattgggaaagatatttatatatatatatacatacacacacacacacacacacacacacacacacaaacacattaagcaaaataagatttgtccatgttataatccagtctcacagtcaagtcacccaccccagccttttgaagtcatttggcagctaatgctaaaaagtaacaggaactatgagagttgcatagaattgatcagaaacatgaataatgccaaacccaaaacctgcacc

SEQ ID NO: 134967 - DNA, 1413 bp, Homo sapiens
cttattttgcttaatgtgtttgtgtgtgtgtgtgtgtgtgtgtgtgtgtgtgtatgtatatatatatataaatatctttcccaatatgccccgttgacagtgtttaaattccagactaggactgctgatctgcacaatttaattatgtggttattcgagcacttaatttcactcaaggttcattgggctctgctctcctccctgccattacgggagctgtggacagagctccctcacttcaagattcctagtgtttttgcacaacaggttgtccaagtgagaaagactgagttgcgtgtctgtaaatgtctgcgcagggtgcacatgctgcgaggtctccatcctccgggcctgtccctcccagatgggctgggcctttgggccctcctcagagtatgcctgggtacaaacctcactgttcagatgggctgtaagttctcacttcaaagctatggaatggattttagcacctttaaaaaaaaaaaaaactttgacttttaatttatatagtgatatgctgacaggctgacacgcagatggttttgtcctcttttctgcgttcagtgttgaggcggctgcttacaagaggcactggttttgtatataaagacactcgggttgttttgtagctctttttcttattggctgtactaacgcttgctgaggttatctgtaataagggaggtaacaagtggcaaccccctccccaccaaccatcccctttgctgctttctgtgtctttcttgttcagttaccaaaatagctgtaagcctatctaatgctaggtgtgtggacattgtgctaaggtagtttcagtgtgtcaactttatgaattgaaatataaaccagtaaaattgtattactgtttcttttgttggttttattttaacagcatattgattaaatattttggtacaaacaaacagcattgctttgtaaaaaccagttttgtcatcacctactcctgtcgcctccccttcttccctcatcccctgcgcacagaagcagtcagagaagaccactgtgtgtgctgtaagagaggcatgtgtgagcgcgaggcagcccctcacccacctgttgagacgtatggagtggtagggtgtggcaggccacatggggcaagatgacgacgttgatgcctctgtgtttgtttatgatgaacattgcccctctgagaaataacatgctgtagtagcagggatgagggacacttggtgtttttgaggcttaaggaagccttacaggaggtaagggtcaaattagaccttcaaaggcaaaagcatctcaccaggcagagatggaagagggaattccagggccaaagtgtgcatgtgcaggggaaacagctgaagagtagaaaggcaggctgagcacctgggggccggctgtggtctgctaaaagctttaaaagca

SEQ ID NO: 134968 - DNA, 1059 bp, Homo sapiens
ggcctgctcagccttagcccttcgtcaggcccaagggtgggggaggcaggaggaggctgagcgtagtcgtggatagaaacctttccctaccgcacggttacacacatggcatgggactcctggctgtagctcactcgggtctactgaagaccaagttggtttttagaaatctatttaaaatatctatcatgtatctatttactgtgtttttctgaatacgcaagtgtaaatagtataatttgcagtgcaaaatccttggcaataactttgtgtattatgtttaaaaacactggaaaccgtgaccaccatggactgcccttcccctctgaggcaattattacatgtaggactctgaactttaaaccttcagcgtgactgaagcagcagcctgcacatgtggatggtcatcagtgcctcgcccagagatacctggccttcatccaaagggaccctgctgccacaagtcctccaggcagcacccgcactgtggctccttcgcactgagtatgttggactctgccatagactgaccctcttgtctggctgctgcagtttgtctgtaatgccctgacatgttgcattctccccatttggataaataaaaacaaacaaatgcttctgtcacacacagtaatggattgttctgtgcaagacccactgataaaatgaaggatacagctttggtgaaaggttcaagtgcaggctcccttttcctggcccttaaggctctagttcagtacatgttacaggttcttcccttcatgcaaagggatggaggggccgaggatgtttgaaggggggtggatggctcctgataatggacagtgatttgggtggggccagggcctaattcatgatcccgttatggtccttaaaaccctgcctctctgtggtgtgaagtttcctcaacatgaaacatgaacctggcaccctggcacagtgagtggtaagtgatgtcatgttgagtgagtgctgacctcttaatcgtcacacctgttcgcggggtcagtaatacccagacagacaatacagatcggaaaccgaggctcagggttaaag

SEQ ID NO: 134969 - DNA, 1027 bp, Homo sapiens
ggaagaaagaggtgcagaggatttgaacagaatgagagtcctcctctgtgcagggagaaaggcttcagtgggtctccccctccctgctagggatcctccttgccagccctgggctgggcgctggcaggcccgttcccaggtctcccgccgagggcaggagaggagccaggcctcaggagagaagtgcttactgagtaatttaccaagagcgataggcttcccactgagccagacgggatccccaggaggggagtcagaggcgggcctggcatgcatgcacagagagagtgtgcccacttggggagtgtgaagggccttgctgtgggacccgagaggatgagcagagtcaagtggcaggtgggacacacagtctgcagtcacttcttaaaaggccctgggtggtgtgtccttcaatgatgaccattgtccacaatagtgagttccagagggtcgattgggacagttggatagccaaggaccagagtcaggaggcaaggctgatgagcaagaggctgttgccattggccaggcgaggcgtgagggaggctgatggagcgcagcagcagagggatggagaggcaggaatggcatctcctcacaggccaggctcctctgccggattgggtagggacgggaagatgatggcccccaaccctgggccaaggaacaatagcacccatccgggggcgggggacctgctggagtacttctcctggaccactgctcagtgggcaatagagggaacaatggtgtttctgaccaggacgggggaaggcaggggaatggaggaagatactgacagggtacagaggaggtagaatggagcgagggccatctccaccgggctaggaaatggggctttggtgggccacactccattgtgctggagcactctggcatctccattggcagtggggaggggcttgtgacctatcagcatcttcaccctttctgagtttccgccgggctgggctctccagccaggagtcacaggtaccgggtggttgttcatgctgaggccttttgc

SEQ ID NO: 134970 - DNA, 1597 bp, Homo sapiens
ttaccagctcctgggctaatgaatgacagctgggtctctgctcaggcgtgggtgggtgcggggatggctgcgggatccttttcaggacaaagtattcctcatccaccccaagtcatcctctttctgggcacttggcaatgtttctgtgcaccctgctgtaatcctggaggggagcaggaaaaaggaacctttgaatcccaggctgtcgtgttctagagcatgactgtgtcagggagaatgagcgcctggcattcatagaacacagtcctctctcaggccctttcccgtttgccatttcatgacttgctgtactggtggcccttggagaagcagcagtgcatagatcgttgttcccaccttgcagacagggagagtagagcccagagatctctccaaaccacactgcttatttgtggcaaagcattgtggcccctaatgagtttttaaccaccagaagaaataacatttcttaagactgtttttagaggtaacagcagccctttctgaggaattagttttgaatttcaccacaactggaattagaaattttctccttttacagatgaggaaatagatgcttagataaggtgacttgccccaaattatagtgcggtgagtggcggcgctcaccccgtctgaggctatgctgtgtgcaggtggtttgcgtcgctagtaggcaccaatgtccgttctgtcttccaagcccacttggcagcagtggcttctctctctgtgatgtgttcggctcacctttcctgtaggcttctgggctatcccctgtgcgccttgaaaccaagcaaaaaccaacccacatctccctgatccttccttagcctcctaaaatccagactttctgggctcgttctttttctgttcctttgttagtgtgctactgggcaaggtgaccaactggtcagccctgggccaggcagcctgtttttttgttttgttttcttttttgccagctacacagttggggttaatttctacagaccatcattttatactgtaactgaaccctataataaagtgcaaattcagtaattgctacttggagagctcctcaggggtgggaaggaggacaggggatgtgctgttggaagtatgtgttttatgttccgcctcatccacactttggtttttggccacatcctccgttcctggctcggccttcaaacatgtgctctaacccatgggatcaccgtcacagtaacacattttccagagcaatctggtgttgggatccccttggattcttccatcatgagacttctcggaagtctcagctttctaaaaatccctcattcctgcagaggctacgttaaaggaatatggtagccatcatctgggaggtaaaaaacctatggaaattggcacctggggaactcaggaaagctgaaagcaccttgaaatgagatggaaggaccagaaggttaaggctggtgaagaggagacctggagagaacgtgggcactcctgccaggtatttttaagggattatatttatttgttgtatgtggttccaaagggtgaaagacaattatgggaagccagtggggcaatttgagctaaaatacacctcccgcgatgacagacg

SEQ ID NO: 134971 - DNA, 1394 bp, Homo sapiens
aaattaggttatgtaagctttacagcacagctagaaatagagactagaaaccatgcgggaatctgggccaaagaatttctctccttccagcacattcccatggggctcaggaattagatgagttaatacacataatatgttttgaacagtacctggtgcagagtacgtactcagtgaatgttgagtgttcttaccatggttggccgaggtgaggatgaacgtgaggagggcaaggctctgccaacaggtgttggagaggcaggtgcatggcctgctcagggtggagctgtgtcggttccttggtgctgataggcgtcagctgctgccaggctttgggagaagactcctggtatctaggggttagacaagaaacacaccccaaagacctggtgagagctagtgtggtggcgttgctgcagatccaagcttaaggaagttgctcatgtgtctgttacagtagttaaattaccagccagtctgctgccaagggtttgtaaatacttgttttttggcggggggcggggggtgggatttaagggtgcttagaacttcataagggctgatcttagaatatctacctgctgagtccaagtgtccaaccagtgcattaataattttttaaaaaggtgtttggttacaactgcctccggaatctaaccttcagggcttaccagtgtttagtaggtagaaagcaagttcctttaaagcacagaaaggaaaggaggaaactgattggtgtgcttaaaaggctgttgactaggatgcttcagtgaaaagcactcctatagcttgtctcttctagtttgctttgatacttttggggggaaaaatctgcactcaacaccatatgaggcctcccttctgcctattagtcttagagaaaacatatctgcccatctattcgtctttctttttgtctatccatttactgtctggacacagttggaaagttgctttttttcgataagaggaaaatgggtacatgatgaaattgatgcttttggattaaatagagggtgcacgtcttatcttccattcctttgtgtgtctacaaagacttcaggagcctctgcagaaaggtggtcagatgcatccttggctgttggtaagaggtgagctaagtggggaacatagattggagccctcagatgctccaagtttataaaaactgcgttacgtagacaaggactgagtgttacctttaaggaggcaaataagatttggcttgtagtcaggaggtttttcttaaatctaagaaatacttgtttagctaatgtcctgcaaaagttagtacattccccccaggggaggctgtttggtggagtctttgccttgttcagccagcattgagggaggacttttttgccttgactgatcagttgtcaacattctaa

SEQ ID NO: 134972 - DNA, 4980 bp, Homo sapiens
gcctggttcctgatgcagtcactgattcttagttgattgatatgtatttgccccagggcactttaatttgggctgtagttattttttttaatacaatagagacttttcatttaactttaactttgtaaatattgaagtgtgtaataaagccaataaaatatgggtttgaatattgttttagcttattatttttgatatgttttggtatcaaattacaaggaattgaaaactaataacttagccctagaagcccattcacttgtaagcaaagtgctaaaacaaagcaaaggtgattgttagtttgagccagtctactcactttgtaagccctttgtactcctgttgtacaagggccatccccatgataaaggttccattctgttatttgagcattgcttattaaaatgatggcactacccagagatggggaaggagaatgtgattatcctagtttatgaatttccaagtttttaaaaataataaattaatcaatcaatcaccctctcttgttcttgtggccttcttcactctgtaagatattgtgttcactccctggcttttttcatgcagatagaagattagtgattttgctgggattcattgaagggtctcctttcctcttcaattacatcagaatctaaagcagcaacagggtccccataaaaacttgctcttcgattgtcccagttcttgttgagtgctgctgtgaaaagtgacaggtttcagccatgggtcagcatttctttttaagacacctgatgatgctggtggaaatggatcagtgggtaacattgtgctgttctgtaaagggtgcagacctaagtcctccacttgcattctcaccttgtttggaaagccaatgatgttactaggtcaatggtttcattaaggtactcacccccatgaaggagcagcagtgtggtcccctgtcaatatttataaggcaccatgtcttaaaaatgtctgtttttagtatgaattagctttcattttccctattcagttctgcttttgggaacttgacagggcccatccatgagaatgggcttcacaaaatatggcaaatgtatgtaccaaattccttcgggaccactaaataaaggtgaaatgggcaatgtacaacaaatgttagtgtcacttctcagatatatattacacaatgattagtttgtttcttctccttggtcttttgtctttattagtggtgggtgatactttaataaaacctcatcacttgctggaaatagctgtaacttatcattctcatcctgtgcattagtggctagacataaacaagagggcccatttcagctgggagttttcatgtttcattgatgcgttttgctgacctatggatgaaacagagccatcactgagaagaaaaagcatggctgatagtgtccagtttttattaattaaatctttacagtagtcctcattgtctttggaatactattaattggcagctgcggctgtattgttatttgaaattggtcatcaaatttggattccacgttggaatctctagatatttctcgttagaaaattcttttgaagtagctgactctgcttcataactcacgcgctctgtaatggtgaaaagggagctgtgctgttttccaacatgatggcagtcatttcaaatggtttctaccaagtcttttttttttttttttaattttgttgtttgttggaagttactaaccatgttgtaaacctgcccagttgctgcaaacttttacatttctctgctttacttaaaataatcgagctgtcagtcctttgttagaagtggtaaccatgcaagttcaactgtttaaattctgtaatgaattaagtgtccccccacctgttgcccttcccacccttccattttgtaatgaaaattccacttacagctgaaagagcagagaaatataaatgaagctcttggcttcaccaaattgcctgagattaacatgaagttttgcttctctgctcttttctccactgtaggtggttttttcattgacagcccctattgccagcctctgagcgtcgcaccatttattattcacttgggccctcaagatttcttctctgacttctagaaccatcaggttgtctggcttgaaatggcaatttctatgtcttggtcttaagagcaatgtgacaccctgaggctatccagctttcagacactccactctgacaccctctttttgaaagcaatgactgatcattttaaagaagagcaatactttgttcaaagccacggtgtctgttttaaaacttttcctttggaaacctagcaatatctgtacttaacccctttttagcatagtttcttgtcagggagtttacaggtcagtgtagagcttaaaattagcgtgtgagctgtgctatgttctgacagttttttacactttttagcacataaatagttacattcctgactgcgtcagttagcgttactataatttctcagagataggggtcctccttgaagccatatcctctgcacggggactggcccctagccagggatgtggcttgcagcttgtgtttcttcaggctgcaggagtaccccatctcttgtgcaaggtaattggtccagtagatttccaacatacctcatgctgactagatgaagtgcatgggtggtgaagtaaggagttgagtttatatagttctgaagtcgtttgtagtctctctcaaattgttagcctggggaacaaaccactgagagattttgctggtattggccttttctttttttttttttttttaattttgggtgaatgtttgaaaatcatgaatcagccaccattattaattgaagagctgggaatacctcgttaatgtatttttaaaactggtgttggaccctctgtgtatttcaggttaatacttttaagcagttttcagcacgtttatctcactttattctcgttctcctcggaccttcgtagccatatcacttgtataaaataggctgagatatagtgactgtaagctgtgatctcagtatacaaaggtaagctcttttattttctgattaaagagaaaaatagtcaattaagacaacatgcatatatgacaatcatatatgatgtatttgatctcttaggtcatatgtcatcgcattacctttaaaaattgtatggtctaaatgtaaaatagttatttttcaacatttgttttaatacccttgtaactgctttttactcaagacagacatttcacttacactaagtgtgtgtgtgtgtgtgtgtgtgtgtagaaacttaggatataacacgtatgtaaattacacacacatacctgtttaaatgtaagaattcagtgataggaacagttcatctaagaagattttaatgacagggcactcttttggccaaagcagtggaatttcctaagcagcaaggttggtaatagtgctggtaggatctgtatgtgtaagctgttacacaagctgaggatcaaagtgccaatttctcaaggagaaaaacttctccgagaaatgaaagtctctgatctgtgttgtatgccctaatacaacaacagcaagaagccatagaaaaaagcaatagaaaatgaaaaaaaaaaaaaacaaaaacaaaatattatggtaactatggaaaagtatataattgactgagctaagttaattatttgcagaaccaacttcagcaagactcgggtggtgaatatcgagtctgcagagaccaaatagacttaaagcaatccatctgtcttttccaggttaggtagctagattatttatttcccaccttattcaaccatcatggagttcatgtaaagatgtgagggttaggcagacattttaataaagatttgcttcatttaggtgtgtcccataaatgcatttaattgtgttagatgttgtgtgctaaggctgtatttgatatatgtagattaaaatgaatttcatgtttcatatttgtttctaagtagcagtttcttttgatgactcactttaaagttgctggaacaactcttgtttttttccatgcagaatctgtatgtacatttaatgtggctttggcatctataaaaggttgtatgaggtatagctgactagtactgagtgcgatccagtcctgctgaaacagcccagtgcctattaggtaccaggtcctcttctgggtacaagtgaacagaggctgtgaccagtggaagcattttaattctgacagtctccttgttgttggaattgggcctattacaaatatcctactttgggaaccagatacttagttaactgtggcaaaaagaatattagctcagttattagtttaattataaactatttaataatgtaggccctctgacatcaccaaaataggcgtcacttggaaattcactcatttaaaatatttccctggcagttttgagagcctgaaacctactctggtttatgttcatggacctctgtccaataagtgaacgtaatgaaatgaattcataacaaatactccggtcctttccaagtagtttttatagtagaacaaaggacaaagtggttaatttaaacacggagcacattttttttaatgacagatgagaaagtttcacccttataatcagtcattcaccataatttccctgtttcctagatttcattaataactggagggaaatcttcagcagtgagttagagaggaaagaactaaggagatcccccctgctttccccgcccctgcccccccccccccacccccccgcccgcaattagatttcaagcaatccagagccctatacaccagggtcattaagagcagttaaagctgaaaacaacctgctctgtgaatggtcttcccctaattcccattcatctgatgccagtgcctcctgagagagggtgggggctatctctgaatcatccagaatgagaaaggttctgtgtattcaaactcatactctatacagtctgacgccatgctgtgcagtgaccacaggtttctcggtgttattagg

SEQ ID NO: 134973 - DNA, 2473 bp, Homo sapiens
cattggccctagagaggaagtgatagtgggtttcaccagcagtcttacttaagtgctcgctgcaggaagtctgtagtacatgctagaatatcataggtgtttctcttctcccctctaaaataaaaaataaaagcaaatgcataaatgaactccagtggccctttggataacttttgaatgaggtttatgtggcaatggaggcaataggtttggagtcagtgatatgctcttagacacttttttctactcaggtgctacatgttatagaatcagccatctgcagggtgttgtcagagaagagagcatgagagtgtgtgtgtgcaagagtgtgtgtgtcagcatgccccaggctgggtgtgcatccacacagaagggaaaggcccttcctgtattgccagttttggcattagtcctctacatgagcctcagaccttcgcattgtgcattttctcttcatgcatctgctttgccatttttgtttggatgaaaattgtgttcctaaaacactgctgaactgaaccttcatctgatttcgtaactgtggacataagtagaaagtgaatagtttgaccactttgcccattaaaatagtttatatcctagaaagatgtgaagctacaagggtcacactttcggagcaaattttcttttaggcaaagtgcagagcctggagctacatcctttatatcctctggcacactcgggtgtggtcaaggcttccccatattttgaactgagccgtatgggtaactaggaattggagactaatgcaataataagcttacgcaggtttccttctaaattcaaactctctagttcctttgggtttgggtttggccatttgcttttaactattcagctggcttctgggtctcctgaccatctcatcctctctgtgacttaggtctggtccatttatccaagtacattttggctcactagactcactgtactatgtcttgtataagtgccaaaacatctgccgcttggggcagatatttaaatctgtgtctttcttttagacatacagtaagtttcagattcttcagtaaaggtttgctagagctcgatttttcctttgaaaatactttaatatctagattctaagttacattcatgtttttccttggtctttttttctctcttgttcctccctttcctcctttaacattatactttcaccctgtgccctctgagcccccacatcagaaagctcctctcttccacgtgccatataactgacttccaaagctggtgaaatttgatgcccccatttttcacataaaagatttggtttttaaatgttactgtgatgcaaacctactaaaacgatgctttattttggctgtaaggtaaatatgtcttttggcctttgtaaagctgttgcatgtggggtaatttccctctgatcatctggtgctcttgaatacctgctgttgctgctttgtgatttctccataggttaaatattagcataggaagaggagcagatttcaaatcatgctcgactatgcagaagtctgtgaggccacaagaacgtattaattacaaattcagaaagtaattaatctttccagatttgccatgccaatattggccatagccattaagaagttaagtaaacgcctggccatggctccagctggagctgaggtctgcatggaaagctatgctttgaaccttgacaacccgtttctcctggaatatgtgatatgccacattgagaaccaatatggatttctacagtcgattagaacatgattcaatagcattgcttttgattttcagaattcatggtagctcactcaatgaaattgcttcctagatgtagccatcctgattttgagagtggaaaatattatttatcaaaatattaagagcaatttcaaaatagatctgtgagcgatttatgggcctcttgcaaaatggtatacatgttgactgactgatctggaaaaggttaatgataattactgtcagatatttttttacctgaaatttttattggagtattaaaacttatttggagtcctctccgtttcttttctctgtaggtttacccaagagaatggttctgttacccgttatgaaatttccaacatatcctgttccccactactcattcttttagcaaatgacagaagctaattcctattgaacaacaatacagtacaacacagaatgttagagaaaaagcctttttatcctgctttctttgaacacatacttgatcaaaattatttgtaaagaacatctttcctactttttgattttaacaaatgcaaatttagttctctaaaacttgaaaaaaaaaaaagaaaccagttctgtgaaaacggtacctcatttctggaaaataacttataccagcccttctgttctagggaaataaaagtctagcagttcaaagtttaagttttaagagacgtatcagattatgtaaaattaaatttgtgaaggatgtatagagtct

SEQ ID NO: 134974 - DNA, 2066 bp, Homo sapiens
ctagaagataatcctagtaggtaaattgctcaaggagtgtgcctgctttggcacacagcagacatggattttgttctcatgcagcttacagtctgaagggtgagacgtagattaatcaagtaataacaacgagaaactgagatgagtatgatgaaaaagaaggacatgctgctgtgagagcatgtaacagagaaacctggtctagtttagtgggtccctggaggcttcccagaagaagggacatttgaattgggctttgaagaatgaataggagttaactcaaagaagactgggatgggagagtgttgcatacagaaggaacagcatgtgcagagaccttgtgttgctgttggggaatttggctcaattgaagaagcagaagtccagaatgtgtggaatgtggtgagcactgagtggcagaagtggagagactggggaatgatgtgaattaaagctggatgactcagtcccagacctggaggccgttgtttggattttggtcttagaaccctaagcacagtgttaagtcttgatgggttcttaggagaatagtgacaagatcagactttatttgtgaaggttagtctttctatagtgtgaagaacaggaggtagggataggtgtgagcattgacaagatcagttagaaggcatatagtttacagtaatgtattgtacatttcaaactggctagaagagttcaaatggttctagcataaagaaaggacaaatatttaagatgatgggtatcctaagttcactgatttgatctttataaattacatgggtatattaaattatcacacgaaccccggaactatgtacatctattatgcctcagttaaaaaagggctactgaagactactaacccaggcaagagacattgatagtattgctactggaggcagggaagaagaaagggggagaccagaagagaacagatgggaggaatataaaggaagcaaaattggtgtattgaatatatagaaagaagagtgatgtttcaaggatatctcagctcctagggtttttagctggagcattgggggaaaaggaaaaggttatgaatttcttatggtgtgacatagtttatgagtctaaaattaagacagtcttctgtgtgtctcactatttctactgatatttaataattttagccttattcagtgtattattgaaagggcaaagctttcattcacaataataggcgggttatagagatgaactatctttcttgtctttgatgatgtgttctattggggcttaatctggtcacgtctcttgttgccgcggaccatttaccacctgctagagtggtaaatggctatggtccagtggcagtaatcatgaaaggaaccgtttatggccactcgttgccaggctttactctatagtgactcctctcttgtgtcattgcattgacctccctgaaaggcctgtgtcccgaagcttttaaaaatgaagttattttatggccgagacaagattcagattaggtccctttagattatgaataggttatataccatttgcacagtatattctgtgcagcagggactgttgtcagtatatttacatgtattatttaattaaattcccctggcaactcagttactgtacatagaacactgaagctcagagaggttaaataacaggtgccattcacagataccttgctaggaaaaggtgaagttagaatcaggactccagtgtcctgatgaatgacctagttagtacttgtggtctcatttcttcttaaggaggttttggtataatccttagaactgcagccttagccaaacagcttctgttttctggaataaatttgatagctaaccttttttaagcattaatttcttttttggcctctgatctgtctcctcttcctactgcttatttcagctacatgtgtcctcttgaatatgatttagtgagcactcagactgagttatatgacttaactatagactaaaaagtaaaaattgttcatccctcagaactgtttcagttggtccctaaaagcagtttacttcttcagcatacatttgaatgcgttgtctcaaaca

SEQ ID NO: 134975 - DNA, 1019 bp, Homo sapiens
agcctgggtgacagagcgagactccgtctcaaaaaaaaaaaccaaaaaaagataattagtagtggatacatacatacacaaacagcagaggaatcgggctccaagaaatcatattaccttcctgaggtcacagttacttagagcaggaactggcatcctcatctttggtcctcctgtcttagtcctttatgttttccccccactagccccactcagattcgcagttaattctatgtaattagttgctcagatattttctgcctgttggcagataatttactggatttggaacctaggtaccaagtgtgtatgattactttagtaaggcctaaaatgactttggatataaattgattactgaaatttggtgtagaaaatgaactctttctggataaccctcaagcaaaaagaagttatttgcatattctcttaacatctctgtaaggtaggtatcatttttgtttttcagatgataaattgaaggttcaagatcacagacagctcatggtctcacccacgtgctcacagtttctcatagttgttgtgcgttgaagagatgatagaagaaataaaatggttcttatttctttcagtaatgaaaatgtgttattttaacaggcaaagggcgttgtgaatacagctgtgtctgcagcagtccaagctgttcggggcagaggaagaggaactctaacaaggggagcttttgttggggcgacagctgctcctggctacatagctccaggtatagtacaaactgcaagagattggccccctttactgggccgaaattcaaagaatagcatctcctgcattttctaaggttgtacagggtttgtggaaatataacacaggcatgaatgtacacagaaatttaaaagtagagaattggcagaatgtcataggtgttctcctggaatctgctgagtgaggagaggctacctggagggagatgacagatgagcaaattgcatttggttgtgggactgtattttgacaaggaattaaaggatattccatag

SEQ ID NO: 134976 - DNA, 1203 bp, Homo sapiens
ctccgcctcccaggttcaagcaattctccagccttaacatcccaagtagctggaattacaggcatgcaccgccacacccagctaatttttgtatctttagtagagactggtcttaccatgttggccaggctggtctcgaactcctgacctcaaatgatccacccgccttggcttcccaaagtgctgggattacaggcatgagccaccgcgtctggccgagactgaatcttttaagttttgattgtggtctatgttggaagcaaagtagaaagttttagatgttattttgtaattgacaggcaagttggttcaaagataaaaaatttcttgattgcctttctgggccaatttctcctaatggattgagtcatataacttagaggtcaaccagtatagtcttcctgttttgtagattggaaaattgagggccagaggagaaatacaggattagactctcagattttttcctttctagaccagggtactttttatagtatgctacttctgtccttatcctattggtttgaacctagctatcctgtttgttttctctacctctcacctccaaattaaatgaactaggaatagcatcaggtttatatttgtcatcctgtatttaaactcaattatcctgaggaggttttccccatttttccatggtgctaccctggtaggtataccatatttaaccaaggacttacagatttagtaccatcttgctcttcctgcaaggtgttttatggttcaaacactatggatttgaaacttttgttctcaatattttgtctattctctggtttctcgtgtctgaataaaactgcattttaatgtaatttgtacaggtattgcaggcaatgggatatccaacaggctttgatgcagatattgaatgtatgagttccgatgaaaaatcagataatgaaagtaaaaatgaaacagtgtcttcaaactcaagcaataatactggaaattctacaactgaaacctccagtaccttagaggtatacttatttttttctcagaaaaaaaataacatatatgtgcattgtaggaaatttgagagatgtggaaaagtataaataaaatcaaaagcatatgcaaacctgtacataaattacagagacagacataattattattttggtttatttccatccagtttttttcatgaatctctgtgaaggcagtcatcttttcatgcag

SEQ ID NO: 134977 - DNA, 1088 bp, Homo sapiens
caggattttgccaagttgcccaggctagtcttgaactcctgagttcaagcaattcaccccccttggcctctccaagtgctgggattacagatatgagcgactgtgcctggccaaaaagtgaagaatttgattgatttgaattagagttttgagactagatcttaactgagcaattgataattggataacttttttgtttccaagcttttttgcttaggatgcatttatattgacaagcgaaaattaatgtgtagttaaataatgcatacaatttttatagtgatattagcataataattttagaattacttatgaggttaatctgtgtgttttgaaatcctcatttaaaaaaattttggtgaatttacagtagttactaggaaccccaaaaacgcataaagcaaaattactttctagttaatttctgacctcattcctctttctttaacagttctggatagtaaagcaatagaccttatgaatgcactaatgaggctaaatcagatcaggcctgggcttcagtataagctcctatctcagtctggccccgttcatgccccagtcttcacaatgtctgtagatgtggatggcacaacatatgaagcctcaggaccatccaagaaaacagcaaaacttcacgtagcggtgaaggtacagtatttgttttactttgcaatgctttcttattttatgttccaaataatatgcttattttcctataataaattatcatttttaaaaacattttaatagcaataatattatatatagacttttgttacttctggataacaaagttgtttttgttgttgtaaaataatatgtggtagtcttacaaaatttggaaaatacggaaagaagtaaagaattaaaatatgtcaattgaacatttttgaagcaaagatcattcgtatttgtatctagtatgttggtttatttcccatcattttctattttgctgtttattttttaagtgagctcacagtatatatgtaattttatcttctgattttttttcatgtaatgtttcattagtgtttttcctcattatgaaaatcttcataaataatttttaatggcggtacgat

SEQ ID NO: 134978 - DNA, 1043 bp, Homo sapiens
tgtttatttttctctgcctgggactctttctccaaatggctgaatagttcactgttttactttctcaggtcttcatcaaaaggtctcctcattagtgatacctttctgctgagcacgacatataaattgtccttcattacactcactacccatagtatatgttgtaattagttttggccagtatatgtaagctctttgagaaaagggagattattttgttacttgctatgtgtctagcgcctaaaattgtcttgcacatagtaaatgtcaattaatatttcttgtttattgttgaatgaatatatgaatgaatttataatggggacagtaaaggtaatggcttcatgagggtgctcatgaggattaaataagttaatacctgtaagatgttaacagtgtcaggcatatggtaaatacgaaaatattatttttaaaaattgttgcctcagaaatgatcacttctcatcactagatattgtgaaggttgaataccacctgctttttgtaaagcaagaccctttttctccttaggttgctattatgattagccccacattttacagcccctttccaatggctgctatgatagaatgaagcttaatccatagaactctatgtagctggaggatttagagaagagatctctgcatttaagctagcttgtgatttccaggcaatcaagaagctgcttttaatgtaacttaatgagcagaagagtgattgaatagacatagttcctttttaacttttatctcttaaagactgcattctgggagactggcatactcatagttgtatgtaatgcaaatgaaatataatactcagccaacgttgccttctgttgaagagaacatcaagattgattaacctgagtggtaaatattgacccaagcaaatgctgaagtcagtgtttacctcaagggacaataaatcttgatcagaaaatacatagttaatctcattattattataggctttcactagaagaatctggaaatcttgtggcatgagtatcttgagcataattttccttaggaaaaaca

SEQ ID NO: 134979 - DNA, 1892 bp, Homo sapiens
tgtttgcttccccttctgccatgattgtaagtttcctgaggcctccccagttatatggcactgtgagtccattaaacctctttccttcataaattacccagtcactggtatgtctttattagtagcatgagaatgaactaatacaataaatagaatggaccaatacactgactttcttctcttctgttcttattaggtaacgtcagctaatgtaacataatcatgttttcttattagtgactaactcatttggctatgttggccagatgccattactgcatagactatactttcagaacccctggtctaaggagaagaaatcagcgataagctaggaggagacgttatcactatcactaatcagtttgattatctttctcaagcttggaaatgttatctaactgagaaagaaagaaaaatacagaggagaagaaaagcatattggaaaattcaggaccatcttccatttgtattagtctgttgaattcagagtttcagcagaaaaaatgtaggttttgggctcagtatgacctgggttccaatcatagctccaccacttcctagttttaggccttgagcagttagctcatctctctcactagggatattaccctctttcttatttttttgactcttgtccggttaaaatgcctgacttgttgcctagaatacagtggatactcaaatgtgaatccacttactgccttccttaggcctcaaaaatatttttttttccctccctttctcttcttttaaactagaaagtggaatatttaataccggatattcttcacctggaatgcagcctacctctaacaatggaaattactctacttttagatatcacaaaaatagtgcagttgcccagtctgtttatttagatgacagaattccagtgggtctgaagactttcagagagtctacaacatcaaagctgttgaatagtaataataatattaaggggtttttttttttttttggcctttttctctctttctttcctaagtgtatagttttccagaggctacatgtgacatgtgatgagatcgttgctctgatggctaatggaatgttttattttctatatccttgtgtttaaaattgttttgttttatttttaatatgctcaatattgacagatattacccacaaagcatagcacttcgggtgcttaataattttttaagagtgtaaagtactcctgagctaaaaagtttgagaatcagtgcctcacactgtaaactcctcaggagaaagaatcctccagattctaccctatgattattataaaccaatgcttaatattacttgaggaatgaaggccattttcttcctgcaggtgcttgcttagtggtgaagaaattattgaaagggatttacatacccatgtgacatcaagcattgtctgtgcattgaatgattgaataaaaatgttatatatatatttagattcttatgattagtatcagaaaattttatttcaatcaccaaattcacaaccactctttcggttttatattttccccttcactagatagtaaaagtatgtttactattatgtgacttagttttttttttttttaactttaaagatctttctcaaaagtttgggaactgctggtttgtcagttgatagcataaaatagaaccagactgccagtgttcctgttctagttctgtcaaagttatatggcctgggcaagtcactttaccattttgtgctttggctatacaatgatctctccaatactttcatgcttttagcacctagcttcctgacattcacgtttaaactttattcgtgttattctcggtgatttccttatgcatctcaggtgatttttttcaacactaatgtctcagttctgtgacttcttctctcacaaatattt

SEQ ID NO: 134980 - DNA, 1596 bp, Homo sapiens
tgttacagagcttgaaatattttttgctgacaaaaaggttttataccttttagaagtgagtgtcttcttacacttgactttgcactggtggttaatcacttagtgttcacctgctgcccacaaaagtctccttggctgacccacttctcttttggtgcccccttgcattaccatgaaaattacccaataggccggtataaggatcctatacctctgtagctttctctttgagtggagacatttacaaataagttcatgttagtaattaaagtcaggcaaacagtacacttaaccccatatggatatcatttatatatattgtaaaattgacttaacttggaaattatgcctgctccaatcaagacaacttaagaacattataaaacaatttaaataaagccgtgaaagatcattttataaatgaatgtagcaatgattactttgacaaaatatgagttcttagtttattgaacatggacatttggtcgtttgtttattctaatggtaatacttgagacaagctgtctgaaacgaagtcttattattatattgaaatatttgtggtttgtgtgcttcctaagtgggagattaagtgggctgggttttgtacactggctagttattagctattactaacttatatgaggacttgttaagtctttattaaatgaattagagaccatagtttctctagtgatcctttctgggtaaataaatgtaaagtttttgttacaaaaatgtcttctgaagatacgatcttaaaattgcttgatttaaaaactcttcccagggtaaaggttgataatcatggggaaaatgttaagtgggtcctaaatgttaaattgaatttcactctttggcctcccttgtagatagaaatgttagctcacatttaactggaatccttttaacacttggtgcatgtactaatttgtaatttaatatcttctagccactagaacttatatgtgaaaagtctataggtacttgtaatagacctttgggcgctggggaggccttgagacgagtaatggagtgtttggcatctggaatactacttcctggtaagggtttcaaactctggaagcagaacaatcagcaaatctcagtttagtttatttttctaaatatatgctaagtttgttctctacacaggaaaatgatgcataggagttcttttgcttggaattttgacaactagaatgcgtgttggaaaagtgctataaaactctttttcaataattataatttgtgttttatatgtactaacataaagggtactaataatatattgtgtctgctttgaatttgctttacctcgaactctgaatttgaaattgcagatgtttagttaaaatgtatgaagttcattctgtttgtagtctggttttaaatttggaaaaattaaatttggtcttattttccatatgtaatcccttttaagatttgggctgattcattgtgctgtttctaaattctcagagtaagactcagtttgggccttagatatacaagtgacttccagtataaaataaggacatacaagtgctaacatgttgaaaatgagagtgtgtcctttttactccacttaactga

SEQ ID NO: 134981 - DNA, 1728 bp, Homo sapiens
tgggctgtcttatatttaagagaatccttaaaaagaatggtaaatccgacttaattgtattaaacaaagaattattactcaagaagcatttgcatattgtgtgcatttatggaatgtaccaatcccaaaagtttaaaagcctacttttcagtagcttagaggagataaatttggctgtctaaacttgactttagtgtcatgtgacatcttctcaaatatggatatttgctgctttgggccatttaatccaactttaaattattaaggcaagctgaatagccataattaaatagtgttctttgttgctttttatttttaaaaggcatgtaaaacttgaaatgtagttcactgtattttatatttgtaattttaataattttggtttagaatagggaattccaaactgatacttgagttctcaatcatggggtggagtttctgttaatggttatcttgttgaattagtttatctagtgtaaaaaaattgtcatcctcagtttatttttagtatatctcattgatatgagacataattgatttccagttttccttaaagatggttagagattaaaatttcttctgttaaaaaaattgttaatgctattggtcccagatttcccttctttgcatcctgccaaaggaaaaagtgctctgtacttattttgtgccctgtaatgttatagatgcttaataagatcccagattttaagtagcagctgtcattgatttgtttactgaatgaatttttcatgtttcattgtatttgtgcacagaactactctgatgactgtttacttaaataataatcatagtgcacataatttttttaaaaagcaacacagccaaatgaggaaattttctgggagtcttattagttcactcaaatgctgttattctttttattttttattgtttgataatttgataggaatcgcttggtcaaattgtatttgtctctctttatcccattttactgttagaaaatgtttcgatgaaagatcctccggacttattggacaggcagaaatgcctgaacgccttggcgtctcttcgacatgccaaatggtttcaggttggctttttcttactatcttattgttattaaagtttgtccaagtttcatttggaacacctgccacttaattggtttctgtgtactacataaaatgaggggtgctttctagctcatagtgtggttgttggagtaattgagttaatttagatatgtgcctagtatagcttctatagttcatgatgttttattataattctttttggcttagtattctgaatttcagatggttgcttataaaatcaaacatgactgagaaaagctaaaggttaaattaggtagttgcctggagtggggttgccatgagactacgaaattaattttaatattatggtccttttatttttaaaatgtacctttttaagccttaattttactacttgtgattaattgatttttttgtttgcctgataactgatgaataatttgctacttagtattcacttgaaagaacttgcccaaaatgaagaatagatctcaatagggatatctggaatcattttgtttgttttaggcaagggcaaatggattaaaatcatgtgtaattgtcctccgcattctgcgtgatttgtgcaacagagtccccacatgggcaccattgaaaggatgggtaagtacttaaatatggctaaaagcaaatttggaagctgtagcag

SEQ ID NO: 134982 - DNA, 1074 bp, Homo sapiens
tgttctacttgaccctctagtataaaaccaaccatttctaagtagtgttgtaattataggtattattaaaaattatttgagtataaggagatgagaaaaagactgaagttgccaaaggctaagttaattacatgtttgcttgtatctgtcagcatccctttcattttttttttttgaaagtattaagggaacatcagtcatctttattccttggttttgtgtacttatatgagattttgtcatagctttcagtgatacctttaaacttagcctgttgcctttataactttaacttctgtttagagaagctgaaaacattcttagtatattgtactcttgctagaaactattatagaatagattttgtaataaagtaagagagtcatagtctctcttcaaggtgtttgagttactgaaggatccaaagacctctatgagctgaatctcatcagctgttatatgggatcaggtaaggtgaaggaatcagctttgatctaatgttttacacatcttacttccttttttttttttgaatggcagaaagatttgctttgctgttgtccttaacatcccagccctgttgactcacttgatatcttttataatttgctcgttttttctaacttgggctttgtcaaagacaatttttgatttttgttactggtttgtgtattcctgggcaacttggaggatctggtctataattacgcacttcagacctgggctgtacgattctgttttctcacactagacagctgctcatccccttgatgcagttcttttcagctgcatgggataaaagcacaagattcattcaggtcccaggaatttgtggggctgaaagttacccttttttctcctaatttatacttttttttttctcaaagttaaaaaaaaatccattgtaacttttttcttggagacattttcctgtagtatctcaactttccttcacctacccccacccaaacaaactgttcacaatacatacacacctcacatctttcttttttctgtcttaacttgccacatatttgggtaaaatctaaaaaaggaagaaaaaaaaaagagtgg

SEQ ID NO: 134983 - DNA, 1014 bp, Homo sapiens
tttgggaggccgaggtgtgtggattgcttgaggccaggagttcaagaccaacctggccaacttggcaaaaccccgtctctactgaaaatacaaaaaaatcagccaggcgtggtggtgggcgcctgtaatcccagctactcgggaggctgagacatgagaattgcttgaacccaggaagcggaggttgcagtgagctgagatcacaacactgcactccagcctgggtgacagagcaagactctgccaaaaaaaaaaaaaaaagaattatttgcatcatattgctcttgacttctaatagctgtataatctcataagatttgtacatgtctgtgtctagatttgttttatagtgtaagggatgtaaattgggggactgaatttttttaatggataatgtttagtaaatttttttttaggaggtttgtgaccctgttaacattttgaatatgatttatgtgagaatcatgctttaaactaactttcttctgaagttaagaagaattgctgtctggcagcgtcatcctcataaaagtagagaaatgtattcagttattggtagttttgagaagttcatgatggaattgtggtgggcttctttttctgatgtttttatcctgtcaagttagcttgtttctgcctctcattccctagaaacttgccaggtggtatttctcctgtgtcaaacctttgaccagctggctactctgtcatgacaatttagaggcattgcagcctatctgggccagtggggactccctgttgctatttttcatcaccagactttcaacaagtcccattgcttactcccttacctgaaataccagtgccgcagtaaatattggtcagtttcttagtttatttcaacttggtgataagggtagagaaaaaggtaccagtaaagttggagttttaatttttgagagacatgactcatagaatcacttaaagtaaaagtgatagactctttttaaaaaaatgctttttgggataactaaaatcatctatatcataact

SEQ ID NO: 134984 - DNA, 1058 bp, Homo sapiens
ttgtggcaacagggtgttactgtgttgcccaggttggtcttgaactactgggctcaaatgatcctcctgccttgacctcccaaagtgttgggattacaggcatgagccactgcacctggccagaaggaaatttaaaagaacaatttgaaaaaatatttaagagaatacagtatttttgagttttcttaagcaatataaatgtagtaaagaattacaagatctgtagtatgaaatacgttccccattgactccttgagggaagatagatactttataagcctcaaatctgaggcttaattttgtggatacttggatgtctggatttacatactcccttatcagtttgtaagagtattcaggaagccaagtgatgattaagttatagtttgggaaataggttgtgaaagtaatcatgcagacttttatttttagggatcaaggtggtcggacattgtgtggtgtaatgaggattggcctggttgcaaaaggcttgctgattaaagatgatatggacttggagctggttttaatgtgcaaagacaaacccacagagaccctgttaaatacagtcaaagataatcttcctattcagattcaggtgagtacagtttaactgcacctctaggcgaatttgtaaaaaggtgaaataggtagtgactttgaaaaaattattaaccagaattgctaatagctaataggatagacacagacaaaatgagtactgctactctgggtcaatgactaattcatcacagttaaagcaaacttctggtgatttgtactcaggatatatttaccaaattaagatggccattaaggtaccatcttaaacttttccgttgtatcttgctgagaatcttcattttttccaggctaggtctcaccattataaagttcttggaagggttggtatactgcagaaaagaattggaagattgaaaacagcctagatactttctagcgactaagagactttcttatcaacgagagactttcatagatagtaatttttaaaactgaagactcagttaatttgccacctctttgttctgttaatg

SEQ ID NO: 134985 - DNA, 1109 bp, Homo sapiens
gtgcatgccacgacacccagctaatttttttatttttagtagagacggggttttaccatgtcggccaggctggcctcaaactcctgacctcaagtgatctgcccacctcggtctcccaaagtgctgggattacaggcatgtgcccccgtgcctggccaggataacattatttataaataatgccaagagtgactgaagtgaaccttaccaaaacatgaatggaagagctcttgttttctggtgaggagttcagtagaatgggattttacttcccacgctggagcagttttttcttgtttcagtattaactgtttcacagtagacagtcagtgctatgggttggctaaagatatagttgtatatcatctttttcaggtgatgtttcttttgttgaagtaattgttttcgttctccttctaacagagatctattcgatcttttgctaatgatgatcgccatgttatggtgaaacattcaacaatctatccatctccggaggaacttgaagctgttcagaatatggtatctactgttgaatgtgctcttaaacatgtctcagattggttggatgaaacaaataaaggcacaaaaacagagggtgagacagaagtgaagaaagatgaggccggagaaaactattccaagtgagtgtggactgacctctgggacgctgtgctagagtgcacagcaaagctctaaggtctgctggattgagtgtgtgttatgctgttttttggattttgtcttatgcatatgtgagactataaccaaggaagtaaatgttacatggagattttctgagttaaatttgaaaggaaagcaagtaaagaataaagattagagccagagaaagaaaatggacctgcttaggatcccttttgagagaacaccaagtcctttaaaatcattatgtttcaaagttatgatctttttcctgtgttgattcagcctcctaaattttcaaataaatagtagtgtttttgatctctggggagatcataaaataccatttttgtaaggcatttaaaaatccttgtgtagaagaaagagtgtaggaaaatgtattttaaaggtatttttgactgtatctacctcactgattcccagga

SEQ ID NO: 134986 - DNA, 1050 bp, Homo sapiens
tttaatggcagtatccaatgtaaaagcatcatggaataatcattggtattgttgtattttcaggtgtctttactgaattttcagatgggtctgagtaatgccaatttctgattgaaaatctaatggttaactgcaacttgttgccatcagtggtagtattactctttcaggtggtgcttcttgactgaatctctttgcaaatgtatttatctcattgagtgctagtcagccagctgccacattgtagctacaggaggcttacttttctggccatatcacctaggctcctgggcccaggccttcaaaagatgtgttagctttttgtttgaactgagggaattttcctctattgagtttatttctttttaatcaggaacatgtttatgggttgcacactcatattggaagctaatagtaaataagcatttttgaagttgttttcctcttctcttgcaggtgtgttccagagaacaagccttcagacatttgctatattgacgctgagctgtcaggggactcaggcttatgaggaggtattgttacacaaaacagtgtctagtgaagacgacaagaaagaggggaaaggatcggaaaaagaagctaaaatactatagaaaaccatggtaggttattgtggatattttcataatttagttacaaaagactccagtaatttaaaattagaaatgttaacagtgagggcaaatgaaaaacagtggtgttaatttttggctttagtgtgtcatataaagatggcactctactattcaaagcgaatgaattcagatttactacaagctatgtaaaccacaaggtagggcctcatgagcctgtaggccatgaattattaaaacaaaggaggaaatgctcataaataatattttctaataaaactggcattagcaaactgatacaaatagctaggtttttaactttaagttcagttttttttcttgtggaaattaaaaattctgaaccagtcctttaattagtgatatgaatgatgtagaagtttataatatgtgtgaatgtttaactgaaaaagccacc

SEQ ID NO: 134987 - DNA, 1068 bp, Homo sapiens
tactaggtgctgtggagataatagtaaatcatatcattaaaactgagtaatagaaatataaaggaagctgaaaaagtgctggatggctcaaaggaggaagaaattatataaactgaagtattaggtaaggcttcatggaggggtagatttgagatgggcatttgatgaatagaacaatgacaaatcatgatggcgtagtggctgcagtccaggtaagggaatcgtttaactcaagcttagcggtagcacattgcaaggtgttctggcatagagtcattattcccgtgttgactggagctgtggtggtgagagaaatgacaagaatgacgataggaccttggatgccactgaatatttgagtttagtgccagttgcttaggtaattagtggttattgaaggttttgaagaggagtctgatgttctcaaggtaaaattttcctcaatgatgggctgaaatgggaatagtataggagaggataaatccccgtaaatggtaaaacatagtaaaacaactttacacagtggtatacaagacttccaaatatgtaagtatccttgaattattagatatctgtagtagtaaaacaaggattaaaacaagattcctgttcctatgcactatccccctttccctttttaaaaattgagatgggggtctctgtatgttggctaggctaggcatgaacttctgagctcaaatgaccctcccctgagctcaaatgatcctcctacttcagcctcccgacggactataggcctgtgtcactgcacccagccctttgtttgagtttaatttagacatcttgcctcctttgtaatttttcttttgttgactttccaaatagcacagtctcattttcctgccatctctcaggttattccttctttgagtatagttgttcttctccttttgctttttttgtattcattggtacacccactcccttggccattttgtggcttcacataccaaactactgaaaactcccaaatttatatcctaatccagacctctctgctgaacactaggtccatatccagctgccttcttagatgtctaataaata

SEQ ID NO: 134988 - DNA, 1046 bp, Homo sapiens
cagcctcccgagtagctgggactacaggcatccgccaccatgcctggctaatttttttttttctgtatttttagtagagacggggttttactgtgttagccaggatggtctcgatctcctgaccttgtgatccacccacttcggcctcccaaagtgctgggattacaggtgtgagccaccatgcacagcatatttgaattcttaactgtttcttggcacattacccctttttccttttagtcagaattgtcacaaaatcggtaaattctaaaaatagtctgatgacctctattactcccttttagttagaagaaaataaatagctacggagtcatgtactattctggtgctatttcatgtttgatcgtggtttaaaggaatagatgccatcttgagctttttaaagatcactgtgtgaaatcaaatatacacctgctctttgatttgtttgtggagacagtgatgtgaattggaaaagatgttggggaccccaattctagggttagttctgcagttacttcactgtgtgatcatagacaaatcatttaacatctttgtatatttgtgctttcacaatttaaaagattattaaaaaatttatctgttctttactgcttttcaggatcatgtgagcattgaatgtgatcctgtatgagaaaatattttgagaaattcgtttgtgtttctcttttgtgccagacattgttttaggtgtgcaatgcagagtaaacaaagacaccatctgccaatggtaaatcctatgcagaaaaataaaacagatgtgctttgggaggggctgctgtgagagaagttgcttttttgtttgtttgtttgttttgtttttttgtttttttgagacagagtcttgctctgttgcccaggctggagtgcagtggcgcgatcttggctcactgcaacctctgcctcctgggttcaagcagttctcctgcctcagactcccgagtagctaggactacaagcgcctgccaccatgcccggctaatttttgtaattttagtagagacagggtttcaccatattggtca

SEQ ID NO: 134989 - DNA, 1034 bp, Homo sapiens
tggatggcctgtcttagattcttcttttgtccgttatctccaaattactttttccagtggtttttcataaatatcagtagtactaatcttgtgatttacgtcaggttttaaaaggagtttgtgaaagggttgaattataatatcaacacctgagccaaagatattgaattgttctgaaaagctacttgtcttttctgacctagatacacagtttccaactgtggcagaggatgccagaaagagaagaatgaatagtagcaagagcctggaaattaaattactatattactgaaggatctaatgtacttattaatttttagcacttttaagtagtataagataattttcttgtatggacacaatattggtgaatctatgtatttctttttgtaggttaaaacctatttattttgctaagctgaatattattatttttgcttgtttcaaaattggtaatttgttaacattactgcttgcttataactggattgcagattctaagttcgttttgcaaacttacctcattaagagaaataatcgtgtccattctgtctccagatatgggttttgttttgttttgccatgctctgtggtacagaatggcaacagaaggtcttttgagaatcaaagacactgttttaagcttgtttaccaaggtattggtttacccttcagtgttaagtgtgcttcagcagacagaggaggacagagaatatttgaattctttttgtttttgagacagagttttgctcttgttgcccagctggagtgcagtggtgcaaactcggctcactgcaacctctgcctcctaggttcaaacaattctcttgcctcagcctctcaagtagctgggattacaggtgcccgccaccacacccagctaatttttgtatttttagtagagacggagttttgccatgttggccaggctggtcttgaactcctgacctcgggtgatctgcccacttcggcctcccaaagtgctgggattacaggcgtgtgagctaccgtgcctggccgaatatttgaattct

SEQ ID NO: 134990 - DNA, 1262 bp, Homo sapiens
gcttcctggagaaattgtcggctaaggtttttttgtttcttttttcttgagatggagtcttactctgtcacccaggctggagtgcagtggtgtgatttcggctcactgcaacctccgcctcctggttcaagcgattctcctgcgtcagcctcccaagtagctggaatttcaagcatgtaccaccaagcctggctaatttttgtatttttagtagagccgaggtttcaccatgttgaccaggctggtctcgaattcccgacctcaagtgatccacctgcctcagcctcccaaagtgctgtgattacaggtgtgagccactgcatccagctggctaagttgggttttgaaagatgaattcaagtacaacagtgggaaggaaggatattccttatagaagaacagtaggagaaagataggaaatggcatagtgtgtttaggtaactgtaaggagattggtacattcgcagtataagttttgaagtggggtaggttcattagagaccagagagagggagatccaggccagtttatgaagaactctatcttgttaagatatggggagtcagggaaggtgggtgacagatttatttccttaagagatcatttcatggaatgaactggaggcaagtggggcagagacagaaaatcttttgaggacttagactaagaaaatggcagtaaaaaagaggaggggagataatttggtagtaaaatctttagtacttgtgatttatttgatgtcaggagaaggggaggaatcttaagatgatgtccctggtctcctgacttgagtaactggattaattggtatactagccaagataagaaatatgggagactgtggtgctggcagtgttatatttcttgatttggctgataactatgagggtactgtttaaggattattaaattgcgcttatatgttttatgcatttttccatctgtaagttatatttcacaatctaaaagaccagaaaggaacaagagaaaataagtttgggaaagaagatactgactttaggattggacttttatatttggagtcaaccctccagatggagatgtgtggaaggcagttggaagtgcagtaaaattggaagtgcaatagaggagtataggctgctaataacaggtgaaaggattaggttaggtctgtagttctcaggcctcgttgtacattaaaatctctgtagagttaaaaaaaaaatactgataacctggatcccaccccagattaattaaattgacctctaggggtgtga

SEQ ID NO: 134991 - DNA, 1025 bp, Homo sapiens
taattctgttatagcttttctcttttgtgtgtaaaaataataaagctctgtttcatgctgtgagatttattgttagaaagacagggcaaatttctgaaatttccttgggtagtctcccttctcatctttagcttatttgaatcttaactatttatcaattcatttgcatacgtgggatgttaggatgactctttgttttgaaaaacagtgctgtcagagttcctgtacagtccgtgctgaaattagggtgccctagtacaatgtactgttctctcttagtcactataatggttttgtaagtagctaaaccctaggtcatgctgcttttatgcagctgtcttccttggttactgaaagttggatggcgcttagtttgcctttaagggaatctaggtttaattgtatatctcctagaacattttgcaccaccaagtaggttgtagagaatctttgttagcattctgctagccttattgatacgtgatcacctcactgaaattgtgcagtatcatgtattctttgattgtattttttagaaatgggagtcttgctatgttgcctaggctggtcttgaattcctggcgtcaagcgatcctccggtcttggtctcccaaagtgctgggattactggcgtgagctacctcatttggccaaattttaaataagaaatgctaacgtttactgttactgctgtgtgctatgcactttgctaagcagctttaaactgtggagttttcttttcatttaaacatcacaacaattaagtgaggtgagtcctgcttttattctcattttacagagacagaaaggttaagttccgatctcaaggttacacaggtggcaagtggtggagaagggatttgaacccaggcaatctgactttagggcctattctcttatctactatgctttaacactcccctgaggtaacacctttctgggaaactgtcctattgagaactttactttttatgtgttaccttgtgtgaaggcattaaaagcttgtgcctgtttgggattttata

SEQ ID NO: 134992 - DNA, 1141 bp, Homo sapiens
agcctaggaaggtttagccattgatgctcttgtatgtttgcgactaaagttatagaaagataaggatatagaaaaatgaattctatcaatgccttctctgaaacctgaattttgtgatatccattgattctatcaatcctgttgaaagataagaggagacaaataatagaaactactttttgtgagaaaattagctagtgatatttgcttttagtgaaatgctagtaaaatacgtctctgtgtttctctctctttttggcttgcctctttgaattcaaagacttgataacattaaagaaaatgcaggatctctagatttcggtgtggtgggcagacaataacatttttatacataataatataatggtttcatgaagaaagcatcatacagtatattaagtggttgagtaactactctgggtctagcataatgctaaattgaaggagaaaaaaggaatgttaaatatagaccttgctttcattgaattttgatgaaaagagaggtaaaaaagaataagctatggtagttgaaaaggatttcttggaggagttggaacttgaagaataagtaggacttaggtgggtagaggagaagagcaaatcccataatatagtaagatatggtggaaagaaaatgggcttatttttttggtcagaagacctggtttgagtgaggactcacttaatagtttgtgacattggatgaatcacttgacttctttgagcctgtattcccttaggggcatacctgtacttgcctcataggtctgctgtgaagataagactgtttatagcttcaacaataatagtaatgtagtacttctcgtgtcaggtggctagtttgcagatactcattttaggaacatttcataaattcagatgctacactgaataatttgtatttatcaaatattttataactatcctttaaaacttatgtgtatagttcctaggtcagtgccagacatttagtaaattgtaggtgatattgttactctgctcctgttataagaatagcataggaaaaagagatgacagtccttgtccttcaggagttcttgctttcagtaataagtcatattcataagaagctgggggaaaatgcaagacgttctgtgccctggtcctaagtttgtgatat

SEQ ID NO: 134993 - DNA, 1053 bp, Homo sapiens
tgttgcctgcttccgatttgccagtgagaaacagagtatccttcttatgctatttaatagtgatattacaaacagcagcaacatcaaaaaagaatgtgtcaggcacataatgaataataatgctgatagcaggcatgcgttgtgcatattattgttaatcttcacactagcctttcaaagtggttactgtatttctgatgagaaaatgaagccttgttcagtaactctagaatcacttagctgataagtggtcaatctgggattcaaatccatatctatttggcttgaaaagttgggtgttcttgtcactaaatttgggaatgagcaggcaaaaagaaacacatggaaggaatcatctcgtttgagggattcagtactctcttagcagtacagtgtgtaagggaaggggatttgagtttgttagtcctgttggtgtttgttagttgccactttatcctgtcccactatgatttgtatgcacaggaggaaaaacaaaataggaaataatctttggaactctttatggacattatcatgaacaattagaagaaatggcaatgtagcttctgacatttgttcttagaaattatctgtttctttttttcttctcttttaatgagtctttatatgattttattttaaattcataaattgatttgcttgagtggtttagtctgagcagtattggaacttgattgatttcccattttaagatccttttaaaaagtggtgattcaattccagtgaagcataactcaaattgtgtgtattgaagacttttgtaattacatttttgcccctattaaaaaactttattttagcttttttaaagtttgaaagaacttttggtaggccagttgtcagtcattcctttgaaagcccctagtaagtcacctcataaaccttgtcacttttctactgtgttttggcccgaatcatgttacttcccttcagtaataggccctggggtaatatgttaaaatatgctggctttgggtaaaaaggatggtatcatgtaaaatacagctctctggctactttggacaaagagat

SEQ ID NO: 134994 - DNA, 1087 bp, Homo sapiens
atactccttcctttttcaagttttagttatcaaataattacccatcatttggtatttccgtatgctttgacaggtaatgctctatttgagggggaatgatttttaaatgctttcttaatgttgtgtttggtttacaagttgtaaagagccttccaggtgttggtcatgattgacacagcaaaaatgtaaatagcaaattgccttttttttttttttttttttttgagacagggtcttgctctgtggcccaggctggagtgtggtggtgtgatcatagctcattgtaaccttgaactccagagctcaagtgatcctcccgccttagcatctcgagtagctgggactacaggcatgtgccaccacatctggctattttttttacttttagtagagaccaggtctcaaggtcttgctgtgttgcccaggctgatcttggacttctgggctcaagcgatcctcctgtctcagcataggttgctttattacacattaatttgccttgagcttggtgatacccagctccgatagtgatctttctttgctacgtgatctactctaatagtttactctcttaggtaacatgtttggacactgttacccattttactgcttttctgttttcatttgttttgcataggtccttttattggaagattggttgtttttcaaaattcgtttagctacagaaactgtttctgactagtaattctaagaggctagtgaatcgagtctaattttagaaaactttattgagagatgtaagtttaatgtatgtgtcagttaaaatagaagtaaagtaaataaggccagattaatggtgatgtagataattaggtgatttgagcctgaaagttgtgttaatctttaatatagcttttagttcttgcattgaatagtgaggtgaccaagtgacctgatttgtaattttcatgtctaatttgaattatttcttgtcctaagggtccattaagtgcatcctatttgagaagtatagtgcctgcctcacaacagactctccacatgtgcatgtggctgaatgaagcagtcctaaattttatttggtattcagattctcttaacttctgac

SEQ ID NO: 134995 - DNA, 3430 bp, Homo sapiens
ttaaaggatagcgggagaagtgcgtgaaatggagggtgtttatgcaggaagtatggaagaaggtgggatcagcaagagagggaattttgaggtaggacggagggtgaggggttcttggcaagtgttggaggacgttaggggcaggagctgggggagagggacaggtgtggggtggcgtggagtgtgtgaggtggagggcaaaagggggtggggaaagggaagtgttcttggagtggcaggtaaagtgtggggacaaatggaaggaaagatttctgaggcgggaagtgtggagcggttggggaggaggaaggtggaggggagggtgagaacgaaatcagtagagggggacaacgggatagactggaggggaaggtggacaggtctggagtacagtaggtggagggagggaagcacaggtttggggcactgaattttgtgctgtagggagaagggaggtagggagaaagaaggaaggtagacaggctattttggggtagaggatgtagaagaatgcttaatacctatagtggagtaagggaagggcaaggcagaggtgtatgtggacatgtctgtaactagaaaggcataggtgatggattggagtggtggtggtggtggtgggggaaataggatgcccaggtttagggcaggaaatgactgcttaagttggagagagctaggaacacaggttgcttaagagagtatggaagatccaaggagtggaagtatggggagagattggaacactttgagtttgagagatgaaaggggccaagatttttaggtcactgagagtctaaggaagatcaggcagagtgcagaagttggaaaaataactaaatggagaggattaaattccatactgagagaaactggagattgaggggtggggggacctggatcctggaatgatgttaatggaaagtggaggacattaaactcagtgtcatatctgaaagttcatactcctagggtcagagagatcgttgagcctgcttttaattccagaacccagtaaatgaggaagggggaaggggtaagggagagctgagtgcacatccccaaatttgggagaggtgtgtagtgggtatcatcctagcatattggtttgacgagtggacagaagggccacacagggtcacgaggagcgcaccaagagtgaatggaaatgggattgcagcaggtgcagggcagatgtctttgtgaaactggaagagaccaggcccagtggccagtagcattcaagggctatgcataagagaggaagaaagggataccttggtgcagtgtctcagataccctggtgctttctgggtaatgggtcagtattcaggcagcatggggtgatgtaatatctgagtcccatgctataggcagacagaagtaatgtacacctagctcctaaaagtggcagaattggagctttctgactcttaacactctttcaaggcgtgaataactgatctggattgttgactttttctcccaaatggttcaggtaaaatttagttggaggcttttggattctctggtattttgatttgagttgggaagtgtaatgttagctttattgaggaaagacacttatgggttgggcggacatatggccttcagcttgccaaacacatgggaagtaacctttaggggtttgaacacagacatttatttcagtgcaagtctcattcactgttctgtggcttgtgttagattcttaggggtttgaaaggattaagcaaactactttgagactgcttcagtaagcaaggtttcctagaatcttggaaaacgatttcccttttgacagttgaaaattaagtcttgtcagattttgctaagaaataaatttcatcatgttgcagaaataacttcaattatcactctgtgggcttcacgtaatgtgtagtgtggtacctagtatgatttcaaataaaaggttcgctttggtagcttgggagctttctgggttgattagttttcttcttttgtcgatttaggaagtatcttaatgcagccattgtatgttcgaataataagtttgagtggaagtgggaatcttgcctaaacataatgagggcggagcagaacaccaaattttaagtaatcggaatccgttaatataaatattaaaaaaaaaacctggaagcaaatgattcgtaaaatccaaatttgaagtgtgtcatggcagcaaaagaatgctctgaaggcattactgtaagattttatttttggagggaaagatttttagagtataatgtcccttcgattgaaactctgagtattttgagatttgatatatgtatacaatataatatagggagcatgtctgacctcatttgctttttggcagagaatttgagcagtaggatataagatgaatagagtgagctttgaaagttctctccaacatagccattgtttcctccttatatttcttaagtccattgtgttcattttattgacttggggtgcgcactactttcttgctcagaatactcaattctggtatagtgttcggattatatgtattgttcagtgaaattctatgaattgggacaatttgtaggcactttagatatcctaagtttacgaaccaaggaaagcaggttatttaggctttgtaggctgaataattgggttctggttttattttcgctggtgacttgctggacaagatatttaatccctttgtgctggtttcttctctagaaatctgactctatccatctcccatgagaatcaaggtggtttatataaaacaagtttaagtctttcgggaagactggagctacgtaaatacggggatagatgttacttagtttcttttttctcccctgtggtttttagactggtcaaatgttagtacttcgtaatttaccattaggtggattaatttgttgtgtgaaagttggatagagatgaaacttatgtgaaagagatgtctgcaaattgaagtttgttcattctttgctgtctgcttacctttccaatttctcagctaagtgttagtgctggtttgaattcttcagcctgagcagaagcttgtgagagacattgggttctagctatagcccaagattgtttctaagcaggaatttccagagacagaggccttctttggctcagtgaattcaattctttttttgggggtggggaatgcagtggcgctctgtcgccaggctggagtgcagtagcacaatctcggctcactgcaaactccgcctcccgggttcaagtgattctcctgccccagcctcccgagtagctaggactacaggtgcccgccaccacgcccagctaattttttgtatttttagtagaggcggggtttcaccatgttggccaggacggtctcgatctcttgaccttgtgatccacccgcctcggcctcccaaagtgctgggattacaggcgtgagccatcgcgcccagcc

SEQ ID NO: 134996 - DNA, 1035 bp, Homo sapiens
gcggcacagcaaggcggcggcgggcgctggccggcgctctcaggtgcggcaggacgcgcgtggagggggcgcgcggcgaacgagggggcgggctttccgttccccagcagccgcggggcccgccccctggcctggccaatgggcgcgctcgacggtgtcacgtgctcgctgccgccgctgccgccgccgaagcggagaccggagccgcgagcgccaccagggcagcagccgccgcagccgccgccgctgggcagaggagccggagacgcgagcgggcgaggtggcggcggcggcggagcgggagcgggtaccgggcgcgggcagagcgcggcggcgcgggtaggctccggcggcggggcgggcgcctgcgcggcgggccgtcccgggcgggcggcggttaaggcggcggttgaggcggttggcggagccggcccgggccccgcattgtttgttgtgcgtccttagcagcggcggcggcggtggcggccgaggcggagagcagggagcaatcccggccccgcggctccggcattgtggccgccgccgccgccgctgcggtgccccggccgcttcgggcaagggcagcgggcagccttcctcaccttcgcggggacggggtcccggccgatcaggggagggcgtgggcagggttgggggacgcggtgccgggaggtcttccgggacggagggctcggggctcggggcaggtgttggaggacattgggggcaggagctggggagaggcttcggggggcaggcggaaggtgtgggcagatttgggggtaaataggggtgcagagggatccggcccaatggaggaggagagccttcaggcaggtttggggggccccctgggccaggcgagtgcgagatggaggacattccgtccggtgggggggggcactatattgtggggttcaagagggaatgagggggcttttggggagggcagggacgagtggggtgggaatggagggagaagactggggactcgagcaggactggaaggagcgctgcgtgccaggggcagggagt

SEQ ID NO: 134997 - DNA, 1045 bp, Homo sapiens
ggaggctgaggcgggcggatcacgaggtcaggagttcaagaccagcctggccaacattgtgaaaccccatctctactaaaaatacaaaaattagccaagcatggtggcatgtacctgtagtcctagctactcaggaagctgaggcaggagaatcgcttgaacctgggaggtggaggtgagcagagatcatgccgctgcactccagcctgggcaacagagtgagattctatctcaaaaaaaaaaaaaaaaaattagtagtaagactagtaatagcagtaataggccactgctgctgaaggctgccgtggtcattcctgcggcccttagtgtgtccctccctcgccattcgtggcttattccgagctgcggtcccttgctggccctcgctagcctggtcatagtgaagaggtgctgcccggcaaccccgtgagacctgatgtccgcgtgtgtgtgcccccaggctacagcggcgagctgtgcgaggtggacgaggacgagtgtgcatcgagcccctgccagcatgggggccgatgcctgcagcgctctgacccggccctctacgggggtgtccaggccgccttccctggcgccttcagcttccgccatgctgcgggtttcctgtgccactgccctcctggctttgagggtgagcccctgctggggaagcggtcagcccatgtccagatgcccagggagggatcttgtgcccacccccccaccccccccacccccccaccccacaccccacacccgagtctgccctctctcttggactcagtctctctagctatagaatggaccctctcagcccctgcctggctctgagggtgcaggtgggacccacagctgggcctcttacaggagccgactgcggtgtggaggtggacgagtgtgcctcacggccatgcctcaacggaggccactgccaggacctgcccaatggcttccagtgtcactgcccagatggctacgcaggtgtctggggtggggtgggccctgggaccatcagaattggtggtcctcaggtgagaaggtcccttctgtc

SEQ ID NO: 134998 - DNA, 1266 bp, Homo sapiens
gtgggtatggtggcccaggtgaccgctgagggtggctgaactgggactcgctttggaggtgagactggggctcaggagtgtagtcctggcagctggggccatagtgggctgaggttgtctgggagaacgtgtggagggatggtcttcagggaagacggaggtggttcagccaggacagagaaggaaaggggggctattgcagagagttagggggcagcatctgtagaaggatgactctgacctttggggagctggggcctgtcaggcaggagttgggggttcagaagtctgcccctgccttgggtacacgcagatgcacagacacaggaccccggtgagcccagggagctccaccgccaacactgaacgtccctgccccctctggaatgcctgcgacacctccctcacacccgcccgcattcctgctggggcacactgcctcctccccctggcaggctcctgggcacaggctcctccaccaggggaaagagatggtggtcacctcttcccctctctcactcgcctgaagatggtgggactcagtgtcccccagccctggatggctgacactcctgggggtcccgaaggcccatccactgcctccatgggccgaggttccccaagtcctgctccaagagccatggcctcctgggtacctggcacacagtgggcccacacagcacgtctggcctctgggaagcatttgctctgcattttgttttttccttgccacagccccatgaggcaggggtttaaaaccccatcttacagctgagaggatgagggggtgtcatcccccaggttcaccactatcagcgggaacccggctcctctcccagttgagctcactgttgggtgacagggagggcagacctctgaggtcagagccagggaggggggaccccagctgcagggctgggctctttgcccatcctccctccctttaggccatgctgggcatgggggaggccagtgcctggcattcctgagcaggctccgaaggaggcagctgggccaggcagggagctctgcctcctccccacttccccagcctcagtgcccgcccaccactctcaacctgtctggagggcatggcaatggagccgggggctctgtggaccttcctgggccacctgtggctcctggcaggtatggaggaatgtgggccctgggcagggggaggttggtgggtggtggttcctaggaagaggctgtggtgtttgtgagctgatcgaggctgggcttcaaaccctggtgacttctctg

SEQ ID NO: 134999 - DNA, 1124 bp, Homo sapiens
ctcgtttgtgaggagatactgtgtctgtagtaggtgctcagcgaagaagcactgcaatgccagttatggtgggtgatgctcactgcagtcctgagccaacccctgccctgcctctcccacagcctgacccctgtttcaatggtgggacttgcctcgtcacctggaatgacttccactgtacctgccctgccaatttcacggggcctacgtgtgcccagcagctgtggtgtcccggccagccctgtctcccacctgccacgtgtgaggaggtccctgatggctttgtgtgtgagtgtgtgtcctgggcagctcccgtgctgggtgctggacacctaagctggttagatcccatctgcactctcagggcttgtaggatactggtggaccaggcatgccaagccctagggcagtgtggcggggccaccgcatgtagagggacagagtttctggagaaggtgagcctgtactgggcttcagggccagactctgagagccacagggggaaggatattttatggagtggcatagcatgtgccaagtccctgaggtctgcaaggacagtggaagtgcaagggggtgagcaggaatggggtgggaaagttggtaggggctttgaggacacccagctaggcggctctgactttatcccaaggacagtggggagcctctggagggttttaaacaggagaggggcatgaccagatctgcattttacaaagatgactggctgcagtgaagggcaagcctcggccatgaggtggggcagcttcacggagaagggaaggggccagattctgccaggagttgctgttgcctggcttgtgacctggagggtcgcctaggcatcacgccccaccccccagcactggccgggaactgctcctccatgggtaggaaatacattgggagtagaagtgagggtggtgggggcggctgcagtttccaggattagatgataggtgggtgcgtgtgccccaccccaagtaagtggctgtctgccactcgctgggggaagtggggaggtggcatttctggagaaggctccgtgggctattccctgaggctccttctctccgcaggtgtggcggaggccacgttccgcgagggtccccccgccgcgttca

SEQ ID NO: 135000 - DNA, 1045 bp, Homo sapiens
gaggtgggtctgggggcctgggaactgtgaggaggtccaatgaatgtggagggctgttcctccagccagggtggggcgggggtcctcgcccaccttctcacccctccctggtatcacagtcaccattgtcacttgagtttccttccatgactcgcaagaccatcctctgtgatacagactgctgctgggcagtggttgcctggtggcagttctggaaacccagcctcagcccgcctgtgggagaccataaaagtgcagattctgggccctgcagacagtggcgtcagcgtctggggcacctgccttcacacaggctcccgtcaccctaatgggatgagagtccttctcagtgacggctgctcaggtggtcacctggcagggcccagctgggcaggagcagcgcatggggacagtggatggataagctctgatgcttgctgaagtggggatgggcagcagagcagctgggagcacaagaggcagccatgggggaagccgctttctcagcccccctccctctccaggtgtcaggtccccactctcccctgtgaagccaacccctgcttgaatgggggcacctgccgggcagctggaggggtgtctgaatgtatctgcaatgccagattctccggccagttctgtgaagtggcggtgagtgttgtcaggggtgaggggccgtggacgtggcctgctgggcccttggcgagatgctgctggggagagagcgcagcaccatggggctgttcctgggccactctgtcatggggtggggcagtgagaggagcctcaggtcccttccacaccccccacacaagaggtatttccactgcagggagagctttgggggctgtcaccgtctattgacaagagcacaaagctcctagctgggtcagcggcttcctcagagtgcccagggcagtggcagtgaggacagatggtctctgccaatccaaccaggactcagggccatgttggtgttctgggatttaggttggtgaatccaggagactcatctccaggggtttctgagccagtgtcctgagta

SEQ ID NO: 135001 - DNA, 1066 bp, Homo sapiens
tagcagaagagcctgtgtgacagccgtgctcactggtgggcgatggatgctgtaaccaacccgtgcgtgtctgctgtgtgccgggcaccgcatttgctcatgtaaccaccaccaccacctgagcacctgaggctcagagagttaagtgacctgccaaaggtcccacagcaagaaatagcatgaccagaggtggaaccaaggttagcagggcaagcttaggcccagacagctcccctggagagcttccccagcccagttccccatgggctgttcacagaacctgactgtggctgtgcctaggccaccaaacaaacagcagagcagggcgggagcaagaggagcatgactgctggcctgtgagcccccttccagtcctgtctgttcctcacaccttgtctgaatggctcacaagcccagtagccagttttatgaaaggacctgtagtttggggggcactaaatgggtcccctgagtgcaagtgagagccaaagcgagttgccctggttcacagccccaggcccatcggcatgcccagcttgcaccctcgcagcctcccagactcctgccctcacggagaccccgggacactctcctgtcccgcaggcccctgcgtgcacccctcaagccctcaatgtgcttgggctggagtccgcttgctcctcccctgaaggcctgggtgggagagtgcagcctgctctgtccccgacaggccgcagccgtatcggacactcagggagtcagacagcgcggaaggcgacgaggcagagagtccagagcagcaagtgcggaagtccacaggccctgtcccagctccccctgaccgggctgccagcatcgaccttctggaagacgtcttcagcaacctggacatggaggccgcactgcagccactgggccaggccaagagcttagaggaccttcgtgcccccaaagacctgagggagcagccagggacctttgactatcaggtatggcatgggcaagggagggtatcggccgggggccggcactgtccgcacacgaggtgggatccccatgtgacagtggaagagactaagggagaaac

SEQ ID NO: 135002 - DNA, 1020 bp, Homo sapiens
tattataaacagcagtgatgacaatcttccagtgtgattctttgccaactttgagggttaaccaaatggaagtggaattactaggtcctatgtgatggatcatgagtttaaggctctggacacgtggcaaatttagtttcttttctatctggaacgagcttcctctcctgagagcccccaccccaggctggcacacagaggcagggccaggcgtggagcccagaggcctgcttcccgcctgcacgtgaagttctgagggcgcccctaactgcctgttctcttctcttttgtcttcctctgccccagcctggtaaagcccttgcgacactatgcggtcttcctctccgaagactcctctgatgatgaatgccagcgggaagagggcccgagctctggcttcaccgagagctttttcttctccgctccctttgaatggtctctccttccttcttccatttccctgagctcggcttggtgactctgcggggctgcatggcgaaagcggggggctggtgctgcttgcctttgtgtcggggggagggtgtctggagctgctgcctgccggtgccccagtgccaacatgcagggtggacaccacctctgcgtgccacctctcagggcatccgttttgccagctccacagaggctgtgacaatagagaggtgacagggtgatacgcgagcattggtccccttagagatgaaatgtgcttgattgctagtggaactggtgactacaattagcctggttgttgatctccaagtccttctttatctcagcacatcttggaaagccatggagatgggaatcagagtttaagttaaaaaagaaaacgttcctcatatgaaatgtgtatattaaatgccagcctatccaagtgttctgatctgcctgactttttaaagataatttaatcattattatttatagcctaagcctcataccaattacaagtagcgatttttaaaagtttcacccaccatccagccacccctaagattaagctgctgtcgccctcct

SEQ ID NO: 135003 - DNA, 1640 bp, Homo sapiens
aaccaaacatcatatgttctcactcataagtgggaactaagctttgaggatgcaaaggcgtaagaatgacataagggactctggggcctcggcagggaaagggtaggaagggggtgagggataaaagattacaaattgggttcagtgtacactgctcgggcgatgggtgcaccaaaatctcacaaatcacagctgaagaaattactcatgtatccgaataccacctgttccccaaaaacctatggaaatagaaaattaaacaagaaagttaggttcagggagatgaagtgacttttccaaggtagcctgactaggaaggggagggtagtggatggttagacagactggcacccaccggacaggcaggacctagcctcaccctgggggctgtccctgctcgtcagcacctgcccactggagccacgtgacagagggacacagcgtagccaagacatttacaaagcgaggatcctttgtgcctgagtgaagtgatcctttcaaaaatgatcaccagctccccttcaccacctccggagaccaagtcctggctgatttttccccgtctttatctcaagtacatttaaatgtcaattaaatttgaaatatctacatttgtcagcatttcattttgggccagcgtgacgtgctgctgatttgtccacgcgatgtgacacatgaaaaaaactcccgagatgcagatcttcctcattaaaaaataagccggtgcgatcccggcgcggcagagagcatggagcacgtccctgcttcctgacgccgtgtctctgacatggtatttaaaaaggaacagcctcgcctgtcaccactgtcacacgcgcgcgctaaccggcgacacgttaaaccaaacattagaaggggttcgggaagtcatctgcatgggaactccacgcggagacaaggtgggcagaggcgggagcagccgtgggggatgatggggtctgatccatgacggacggccagcctttcttctgcaccaagactctggcagccctcgctgggcagccaagtttgccgcaacctgccttttcacagacagctctttgtgtgtaataaaatccaggcaagtggtgggtggcagaccgcaggggagtagctgaattgggttaatgagggaaaaggtgctttttttttttttttttttcatattctgccttaagctaataaaaagtttaagcctggacgttttcgatggttcatcctttatctctgacaaatatctgactgtatgtttcatgggagaacatgggcagctgaatttaagtaagtttattttgaaacctcacctttcattaaaagtaaaagaggaaacaccctatctcttatttcgttgtttctgacccagaaaactgaagaggcaagatcccgtagtggttgaaagttggcaaatccacattcagttcctagctctacctttagctgctgtgtgaccctgggcaagtgactccccctctctgagccttggctactttgtctgcaaaatggggttgcagtaaagaattcatgagaaattgtatggacagcatttcgcccaaggcttgtaagtatcgccatccatgtggcctggactcgacaaagctctgatctgaccacatcagatgacaaacttctcacctggatgtacc

SEQ ID NO: 135004 - DNA, 1077 bp, Homo sapiens
tagttttgttggttggttggtttgttgtttgtttaatatgccctgttttctacttctgttggaaaatatttggggttgaaataaaccagtgggagcatgggagccagtttggtggttggcaaactaccagtgatagaaaacaaatgacaggttttctgtgagcgtacgtcacagtggctcgggcccacaaggagacagaggggtacgtttcaggacatcattccaagggtttctgttcacgtttgtttaacgaggaaggggaagttgttctcccataataccagtggtatttctagtgcaacccgggtgtttttctacgcctcttcccatgctgcttccccacccccccactgtgctccgccccttccaaatgccatgtcacaacagcacttggatgtgtttttctcaactgtcatcagctccagctggcaggaccaacttcttgaaacacaggaagcatccagcggaaaatattttaataaaacagactcctcataaaatattgttcgggggagggggaagaaaccggctccaccaatctgtcggcattgtattgggagatgtgagaagccaggctggcagcaggggcccgatcctaatgggcctttgtcaggtggtggttccgtgttgggcacacggacttggtgcctggccctttaatctggcctgggttttcttgaatcacagatcttcatctccactgggaatatcaaagtgcttgggaaacttagaagactggggcagcagaaggggatgcaggatctttgaagtggagaggagagattcattcctcctgacttcttgccccaactctcacttccaattgcacattaaataatcccagcactttgggaggccaaggcgagcggatcacctgaggtcaggggttcgagaccagcctgggcaacatggcgaaaccccgtctctactaaaaatacaaaaattagccgagtgtggtggcgcacccctgtaattccagctactcgggaggctgaggcatgagaatcacttgaacccaggaggcggaggctgccgtgagctgagatcacaccaccacactccagcctgtgcaacaga

SEQ ID NO: 135005 - DNA, 1890 bp, Homo sapiens
attttcagattagggatgctcaacctatataaaatgctgcgggaagaaaaaaaattcagtcaagaaaaaaatgaatcagtagcagctgaactgtctgtggaatctccagtgccatgttaggtctggcagagacacagaggagaagagaattaatattcattgagcaccttttatggtgcctaggactgtgctaggcacttgtgtaattattgtctcatttgtccagcccagagcaggcagatgccatctccctaatttgtagccaacaccacagggatgatgacaggcctgatgataagtcctgcctttgagcccagcttgcctctctccactgtctctctttgttttctaccaaacagcctccccttaagccaaagtcagcagcaggtagctctcagaattccccttcgaggcttgggatccaaggcgggcagggaatcttggaagccatgattcagggaaggatcattccccttggaaaaattcaagtattggagacagctacagtggactctgtgttgtctcactggtgtggggatctgtgcagattgcggggtgggctgccacatccattggcaactgaggactcgggagacagacgctgtgagagacacggagtagcagctgcctcaggcgctgagctaatgcaggaggtgactagcctggcgctagctttggctggacctcctgggttgatggcatgctgaagaggcaggatgcctaggagaaccagctctcctaggcttggaagtcagagaggcctgccctggtttgaattacagcttggccacttcctggctgtgcgaccttaggcaggatcctcacctctgagcattagtttcatcatctgtaaaatgggtttaacaataccacctggtaaaggtaatgaggttgtgtatgtatagcacctagcacagtccctggcatgtcccccgaacttacactgccaagcatcaccactaagaggccaatttgggagtcatagaagatttgtgctttctgggcccctaaggaccatttattctaaatgcatttatgcaagcatttccagtggacactgctacagactaggtgggaaccggggagactcggcatatggaacccacaagggcctcgaagagaacagcctaccaagctcccatgtcaggagccatcagcctccagtgtggctttgctgggtcacgtagccacaaactttccagacagaagtgcagccgttggcccagggtagcaggggctggggagggtctagccattcagcctttctggaaggagctttgtagcctggcacctgtggctggagttcagatgttacccgaagatttgggttttctttttaaaaagaagaaaaaagaaagagcagaagaaaaccatgccagtgtctcctggacgaaggggcatgggttggggcctgccagggaaaggcaggctgccgtcggcctgcgtgtgaagcactttataagctctgtatttattatttcttgctcaccattaaaatcaaatgtactcagtgcttttgtattcaatacacatttaaccctgccgacttagatttctcaggttttaaatccagtggggaattggctggcttcccaagtttcccctccagtcccccttgaacagagctggaaatctctgtttagcattttctccccggacgcggctgggatcctcacaccggtggggccagtcactgttgtgtgtgcctgtgggtttcttccttcatcaccagtacccacccttcctaagcacccccgaaacatgggtgtgatcgctgaaatatgacaagacttgtctgcatcgtctgtgattcgggcttcattaaaccgttttgtctgtgtgtgtctgtgcctggttgtggtctgccaccgtgtgtgtgtgagggggtgt

SEQ ID NO: 135006 - DNA, 1124 bp, Homo sapiens
ttactgaggcgtctgacattctttcctcgtgccgagtctctgaagtccagtgttttgcacttatagcacgtgttttttggttttgttttgagacagtctcactctgtcgcccaggctggattgcaatggcacgatcttggctcactgcaacctccgccttccgggttcaagcaattcttctgtcctagcctcccgagtacgtgggattacaggcatgtgccatcatgcccggctaatttttgtatttttgtatagatgggggtttcaccatgttggccaggctggtctcgaactcctgacctcaggtggtccgcccaccttggcctcccaaagtgctgggatttagagcacatcttaacgtggaccagacacatgggacattggctccccttttggctggggcaagtctggatttggtccagttagatgtatctttgtgacctgagtgacggaatgggcaggaaacaaccggaagcctcccggggattgctgtgggtccgcggcctgggtctcgcgtgaatttttactttccttactcagcctccctgtctcccatgcctgcgagagcatcaagacaggcaggctgttgaaaggacactgctgggcgttcaagataaagggtttgaggggagagctgagaagtctgtgctctactggttttgattcaaatcctgatttcaaaagccaatcattttggacaaattttatttgttcatcagacgcttgttgagcagattttttccccaggtctcacagagcctgcaggcatagggatgaacccccttggagatagacctgtaagaggtcccgtgggggcaggggtgagggatcccacgctgagtcccacatagcaggaggcacgaggcagcatccgagccgacagagctcttgaaggacaggcacacgtttggcaggccagtccagccggagcagcccattccacccggagggtgggtggcaaacaaggcatgagagcccagtgctacttaaaggatctgcccagggcaggcatgggtgaaggttgagaaaggtctgtgtggggcacagtggagtcccggtcttgggggacatgcagtgccagcctctagccttgagcaggcgcccaaggacaggagggggcatga

SEQ ID NO: 135007 - DNA, 1048 bp, Homo sapiens
gactggcctcacagatgaggacacagaggcccagggaagtcacttgcttgccaaagtcactcagcaaaccagctaggcctggagaccctgcggtgggagcaggagggccctgcacacaatcagatgttctagtgtccgaaatctgagactgcttcccacgggattactgtctaatccgctggtgacaatccagctgctcacctgtccccagcctcagctctggtccccagggcctgcacactcctggcagggcatcctgataattagtgcagccctccccttcttcctctccccagccccagggtggagggtcttcaatgcgcaccccctgggagttcacctttctcttcctggcggccaccccacaggaggtgtccccatcatatgctccagcatcataacaagcccagggtcggtgagtgcagcccccgtccctgtgtgtttcctctggtgacaggatcccctcgtgccgacaacccgcagggaaaactccccgagtgtcagaaggggcaatgtggcttcctgttcttggttgccgttgttgggttttatctgactgggtgcgccaggacatctgtaccacgttactctttcttggcatctttatatcccgctggctcactctgctaacttttagaatgggtgtggtcaagaggctgctttcttcccaccatttatcaattcagttgcaaaacagccagcacttcccgaggacaagcaaaagaaaatgagttaattgaagaatctggagaattgacatttggtgtgtttttacatgtgccaggaagtttaagccaaaagtaatttgctgagcacctattaggtatcaagtactctactagaccctatggtaaacagagaagtgagtgagctgataacgacagccggtgtgctgtggatgtgaggcggggttttaccagagatgagattgcggaggtggatggcggggccctgaatctggagggctttgaacacttcagacagcattttccaggggatattcatgggtggtatagggaaagcaagtctatgttcaaataaacttggg

SEQ ID NO: 135008 - DNA, 1027 bp, Homo sapiens
tctggagcttggaagaagcagctgacagaatggccgctggagtgggcgcccctccccttggttgtaatggcacaatgctggatttcagtattttaaatgaaaaatatatgcagttagctgtgcgctgacaatgtccttgaggatttgacagtgagattttccagcagttggtcttcgttaggatcctggcggtgtttaataaggcagtcgaactgctggcaccttgggttcctgtttgttctccgagggctcaggggctgctgcggtaagcacatcgaccagagctgatcattacaagggcgtacgccaccatgaataaaaatgtcacacgttttcccatctcacagcagtacaaaatgtcagtcctgtcaaacacacattgcagggagctgtgtgcagtccgtacaaattggagagccgcatattcccccagccttctgatattcttcatttgaagctgaagaaaaacagttgttaacctattagctaggattttaaactctgctgaggcggtggatgggtagactttgacacagatagaaatgtattccaaggtccaggaattttaaaaccaggttctccgtccatttgttctgagggaaggaaaaaaaaaaaaaaccttctgtctggtgaacctgactatctttctttaacagacacactagggaaattttgggatatttcatatctaagcttcccattgcttccacgtttgcattccactcaaaaagtctattgctttgggggatggccctggggctcaacctgttaggctaggaaacctgtaggtagagggtttttcctgatcagaagcatgccaggaatgttgccagtcttgcagacaaagtaactcaaatcatggggacaatgactggcgggtctggcattattcagatgctgggtgatggcttcactgataatttgatgctagttccccactcttgggcagccatttactttaacttgaccgcgtgccaggccttgtgccaggagccagatgtgaaccctcaaggactcaccttcttag

SEQ ID NO: 135009 - DNA, 1715 bp, Homo sapiens
cctcctcttgtgctgcctgtggcatcctgagaggaagctgttgtccttcttcaggtggagggaatagtaaagaggctaataaattggtggcctgcaccacaggactttataagaaaccttttgcatctttggatcttctaataaatgaaggtgcagcactgctttttgacacgcaggtacatctgtgtattggacacatttcccttccaaatgtttaactccactttacaaaggtttatttgacagcatgtgctagattcaaggctctaggttagagaacccagaccccaacgaacttacagttgatagagatacaaaaataagatagtgctaagcatggcagcctatgatcagtgtagccaggagcttccgaggagaagattacatctgagcactttttgagcagctccttaattcagaataccttcacttgtgctgtcgttatgggatgatatggcataaaagcaccaggactcccatagctctgggttattccaccttctaactatgtggctttgggtaagttaccccttctgagccctatttcctcacctataaaagcaggataatcccatttaccttgtgatcattgtgggaactaagtgtgagaatgaaggtcaagggtctggaaaagcacaggggtaggccgtccacacagggaaactcttctttttagcaggtgctctctccgttttgcaaattgaggttcaatttgcacagtgctgtgacatttttcaaagcttcctcctatctcatttcacccattctcccagtagctttgatgtttgccaagcaggtggtagtctcccattgcaaaaataaggcaataggtgcagagaggttgagtgatttggaaagattagacaactagttaatgggaaaaacaaaactagacgatagtatttttacttataagcgtgaactaagatgctttttccaaaactactacatgaattgttctttttttctaaataactattaccttagagttttctattaatacccagattttcttaccatattaccttgcagcttcatttttttttcagccaaacacaaacaggcacacacacccacgcacaaaattttacctgaaccaaaagtgaatttgttcatgtttgaccttattcattctctcatatctatcttgtaggatcttcacctggatccaaaatgccccttttgcccattgttgttttctagcacagatggaacccctccccatctttttccacttgacctgagcacctttggacagcccctttccaaaagagctgtttctgtttggccatcgacagcctctttcatcactgagcctcagcctggctgagactggttgatcaaacgtgggccacctgatccaagccctcccagtaaagccaggaggtcatcatctccctttgttgtttaccaagcagtacagacttctcaggtctggcctctacaggcagccttgattccttaggaaaggaggccagctggtaggcagctggatgtgtgaggtcaaatattggtagtaatggtagtaattggtagtaatatggtaattcctataatttactgaatagctaataatattcttgacactcagttgtattatctgtctcctttaatcttcatgctaccatatgcccatttcacagatgaggaaactgagtcttagagatgtatatatgtttcttccttaatgcataatttttcaataaggaattact

SEQ ID NO: 135010 - DNA, 1050 bp, Homo sapiens
tcaagtgatcctccctcctaggcctctcaaagtgctgggattacaaatctttgatctttaaaagacaaatcgagcttgttgatttagagtctctgtgattgaaaggagcaaattcacagttggtttcacagaggcttgaatttctggccaaactgttcccattgaagggagtgagtaagcatgcgtggggccgggagagctaggtagacttgtagaacagacattttcacaccttatcacacaactgtcagctccctgtctcccgacacattaaaatacgctgcagcctcaatcacagaaattccaactttggttactattttgatatcaatattcatattttaatttgcatttgctgtgctgtgaggtggcctgggaaaagaagggtgcggcacgagtctgtaaatggagacgggagttctcacacccgcagcatgagtcagacgggaaggcctctgcccataggggcctttcaactcccccacatggagatgtggtgtttgggcttctgaggcaggcaagtgggactcagtgctggttgtgtaggatgttaactatgtgaccttggataagttacaagacctcactgaacctagtttttctcatctgtaaactaggggaaatacaggtttttgctggatcgttggaaggagtagaagagataatgtgttgagacagcaacacttagtaggcactgaataattgagagtttcccttttgtctgtcttttgtttgtttgtttttgagatggcgtctcactctgttgcccaggctggagtgcagtggtgtgatctcagctcaccgcaaactccacctcccaggttcaagtgattctcctgcttcagccacccaagtagctgggattacaggcacccatcacacctggctaatttttgtatttttgtagagacggggttttgccatgttggccaggctggtctcgaactcctgaccttaggtgatctgcccgcctcggcctcccaacatgctgggattacaggcatgagccactgcatgtggccctctctgtcttcttatgtcccacatctg

SEQ ID NO: 135011 - DNA, 1049 bp, Homo sapiens
gaaatggattgcagatataaaatggagtggcagggagcggagagttttccctccttgatgcctggatcgtaggctcgttggtatcagaatatcccctgaagtaagcaaagaaaggggtccctcctcaggcaaaggccccatgcgccctcattggtcagatccactctctgcagaccgttaagctacagacatcaccttacctccctacttgtatgtgcaagcctctggccttaggaaaatccccttcttatgataagtaacatttctgcaaataaccagttaagctcagattttttaatgtggttgttcaaagatttgtttaaacaatctagatcactttccttccactctctctccctttctgttccttgatagtatctaaagcagatgtctccctccccttcccttccccctgccagtcttttcaagaatagcttcaggagataatgttctatagagagcgtcagtacatttcaggtgacacaaatggtgaaggcattttatagaaatgtggcttgtcaccatcggactgttgacagatctattagtgcacccttttcaattttcacttttccccccttcggtcgtacagatttccacagacttgatattttgcagttgttcttggaagagagctattttgtaattgaaactctagcattgttcgcatctacgggacttggggctccagcactctccagcgccctttcttgagctaatttaggatttggctgcacctgacctctcacatagcagtagaaaatatttccttggtttttttttttttgtccttctcccctttccctcctcccctttatctggcaacgaatgtacctcgtgactccccagatgcctctaatatagacatctcaagtttggtttctgccatgaaatcgaggcagtttccaacaaagatccaattttcaaatgtgctgggttgccacctggcctcctctaactctgcatagcaatggtgaccttgcagatataatcaagaacccaagcttgccctcttcaccctcgccttgggtttgaattgcaaatagaaa

SEQ ID NO: 135012 - DNA, 1054 bp, Homo sapiens
tcccaaacaaatactttttatatatctatgtatttggcagccctgatgtttttctttgttgttttagatgctcatataagctgcctcagatcctttgtaaaattaggtagggtgtaactgtataaaaataaatattctccttaccctaatatttttgggtcatcctcacagcccttgtgcaataagtctgcccagcttctgagttaatattggctagatttaagcaggaagaactcttagaacttacggaagctcgacagtaaatttaacactcatgcaactcattaaaatagtataaaagtggagcttcaaacatctctgtgtttgctaccagggctggggggtggggtgttacccttaattcagctcaagatctgaaagtctgatctttcagaattgagaatacaccgctgaaattaaagacttgtctgtgtagataagcactccaaacatgttcaaagaaaaagtgaggtgttagctctatacggataggatttttttttttttaactcagggtatcgtcttcttgactcataaaacatggtttggtaaaagcaaacttgcttatcaaacagcataagcataaaatcgattggatagtatattttatttttgatcatccccgttctttaattattttaaaatttcagtttgctattgtttaaggtcactgtgtaaatggttttcaaagtatgtcccacagccagtggcctagggactgcaaagatgcctgggatgttgggggatgaggaggtggccaagcctggagaacccagccagcacccctgctctacccccaggtcctccagagcagctgatctctgcattatggaactcaggtaacagggttccttctgtataaaatcttatttttttctgagatggagtctcactctgttgcccaggctggagtgcaatggcgccatctcagttcactgcaacctctgcctcccaggttcaagcaattctctcctcagcctcccaagtagctgggcttacaggcacctgccaacacacttggctcagctcatttttgggtttttgtttttttgtt

SEQ ID NO: 135013 - DNA, 1087 bp, Homo sapiens
gcccagtatggggaggacgcaggcttcggtggctgagcttctgctctgctggtattggccatgggtttgcactcagcctctccaagctcagggttccgctctgtaaaatggggtaacgtttactttctttcttttttttttttttttttttttttttgagatggagtctcgctctgtctcccaggctggagtgcaatggtgtaatcttggctgaccgcaacctctgcctcctgggttcaagtaattctcctgcctcagcctcctgagtagctgggattacaggcatgcaccaccatgccgagctaatttttgtatttttagtagagatggggtttcacaatgttagtcaggctggtctcgaattcctgacatcaagtgatccacccgcctcggcctcccaaagtgttgggattacaggcgtgagccaccttgcccagcctgtaacatttactttcacagcattattttaaggatcaaataattacagaagaaccctgacaattataaaactctctataaacatcagctgttattaccgtggcagtttttgactgggataaaaatttttaagcaaaaagtttaaaattttaagcaaaaatttttaagcaaaaagctcaaatattttaagcaaaaagctcatgcagcgcagtaggaaaatgagaaaatcctagggtctatataaagtgatgctttgttacccacatgtatggcaaatgtctctcattaatgcctttgataaggtgggaaactgtctggtgttggaggatcaggctggttttgaattctggctgttaagcttaatagcagtgtgatggtgagcaagtgacttcaaactctctagagccttggtttcttcctctgtaaaatgggaatcattgttcttagctcccatgagcttattccagttgtgagaagtaactggggcaatgtatgtaaactgcctagcatataccttcaccctgttcctttaatggaataaaaaaaggctgaggctgaggaagaggacagtgaaaagcatgggttcagccagcctaggttagaatctcacttgctcactgcatgaccttggggaggcactcatcttttc

SEQ ID NO: 135014 - DNA, 1157 bp, Homo sapiens
ttcccaagtcacagagcccatgggccagggagatggattcagaaaatgaaatctgctgcagtgctagctaaatgttagcaatggctagaaaatccagaagcctaggcatgagagtttagcctccgcatgtggaggccaaaaacagagtctttgatccattccttatatccaggaaactttgtaaaaccagcacatgctcctcaaaggtgagtgcaaactgagagcaaagcgtcttcttggatgctcaggcttctttccccggcagctgaccccacactgcgtgtgtgtgtgtgtgtgtgtgtgtgtgtgtgtgtgcgcgcgcgcgcgtgtgtgtacgcgcacacacacacacggtgtcccctggtggaacctggcagggggagaggtaaggtctttcagcctctccaaagcccatggtcaggtactcaggtgggggagccctgctcgcagccccgaacctgatctgctggtgttcagcggaggagattacagagcttaatgattagctcctccaagctgcagctgatgccagcccctaccccctttacacctaattactctcattaatgagctcctctgctctccatagagagagtttcctctttggaataagaggcaaaaataccttgcccaggtagattgctgaagcctttaattattgcccacacctgctaagccttgtgactcacacctagtgatagtgcggagctgaaatggagcttgtttataatcacgagcagattttaactctttcaaagccaaaaagccttctgatttcaagagacatgtttccccaagacctcacacatgctcatttcatgcatgcacgccaggctctgctcccccaacactggggatcctgaggcagcagaagtgcagctcctgccctgagggagtgcacagtctaggaagagtgacaggctagaaactacacagacaattatagtggctaccactcaccacttccctacatcaggtcgcctgtagccctcgaaataaaactttgaggcagatgttactacctccatgttacagaagaggggagggggcgcagagggaggatgtcacttgccccaggtgccacagctagggagggtgtgaggagagtgggatcaggtctgctgggctccatggccagtgtgcaccccactgttgcc

SEQ ID NO: 135015 - DNA, 1051 bp, Homo sapiens
catggaaattgttttcaaaacaggccggccttaactagtacttctaaaggtgattttttttaaccaaagtgtaggaattcacaattgtcccaaatacacctcaacttgttagtttcagcctattgttccagtctcctgagaatttttctggtcctttttgtcaccagcttctttacagattttatcagcgttttctgtgttttaacctaggtgactactgatgatgtcggttgggatcagaacatgcagggagcgtacaaagcaccttcaccagcagtgttgacaacagctactaacccactgtctagctgtggctgttcagcccgtgtttttccattttgcccataaggagactgagtttctccagttatctcactgacaccagcttgtgctgtgtctaaagtagcctcgtcccactgaacccaagccccactcccaagccacctgaccacctattaataaaagaaacttgcccttcactgcttttagacaccaaatggatgaactaattttcactagtgttagtgactgataagagccaaacttgacttttatgtgaaacaacaacaagctgtaactggggccttcggtaccacaggcagaggaagaaatttatttggagcttatgccactgaggcagagttaatagagaaaaagttgggggacttaggcgaggaaaaagttcagtgcccttcaggccatttctcattgctcttgccgaaggatgaggcttcctgcagctagtggtggagacctggtcaggatcatctactcagtgccaggattcatggatggaagcatttcctgtgtgtgccactgctgtgctagcggctcacacggagtgcctccacctaaactctctctcccttactctcctttcatcatagtaagttttgggaataggactagaacttctaacttcagatcacttgcttttggcatgacctttatctgtggtctcaaacatagtcccctccattcgagctaggtctgtggttttggttctcgcctgcagctgtatgtgtgcgtgtctgaggtgtgtggatgtgtg

SEQ ID NO: 135016 - DNA, 1402 bp, Homo sapiens
cttgcttcatattgatcggtgggttctctcaagatgtagaagtatcatgggctgtgaccacacagacctgatattttgctctctcctctttgcctcctcccccagatgtctttcatcctggagaaagtggccatttgtaacacccgtggttttttaaatgtttcctttgagaaggaaagtgggcctttgactcgtggtgttgtgacttagccacatgggccatttgaatgtccacccaaggcgggaagagctgcatgtgttaatgaaagctcatcctctcagagctattcccagctctcagaattcctggatttactgagaccatgcactcaacacattcgtttggctcccagtgtccagcactgctggctactggtgataaagaggtgaataaggcatggccccttgtccccaaactcctcaagccctgtgagggaaacagacattataagagagagagagagagagagagagagagaaagagacaatgatgggtcataatagatagacatacaagagaagtacaaaaggccaggtgcagtggctcgtgcctgtaatcccagcactttgagaggccaagatgggcagatcacctgaggtcaggagttcaagaccagcctgggcaacatggcaaaaccccgtctctactaaaaatacaaaaattatcctggcgtggtggcacacacctgtaattccagctactcaggaggctgaggcatgagaatcgcttcaacccgggaggcagaggttgcagtgagctgagattgcaccactgcactccaacctgggcaacagagtaagactctgtctcaaaaaaaaaagtacaaaaaaagggcctgaaggcttctcagtggaagaggtaataagtgaggcaggtcctaaaagatgattaggagcttattgaatagttagaaggtggggtaaggcttctaggcagagtaggcacttgtgcataggccaggaaatgggatcatcagactgtgtttcctttaatagggatgatctggcttaaagatccatctgaggaccagaaggaaatcgtattcttagctgcacttttaagggtgtgttctgtaaccttgagccacccctgaccaaggctcctaagaggctctggaaaatcttgaactcagtatcaggagtcctggtttctagtcctaggtctatcccttaaaagtcatttggcctcagttgtctcatctatgaaactgacgtacccccaccatgccagcttcatagatggcccaggtttgatccaagagggtgcgggtgtattcccaggacctccagacttccggggaatggcaaaaccaggagttaaactcagattaggccaactccaggcccatatgcttcgcactgctccaggttcctttggacagccagtgtaaaaaagtcagtt

SEQ ID NO: 135017 - DNA, 1085 bp, Homo sapiens
gtatatctgtttacatctccactatagcaacctgtgtatgtaagtaagtagcatggattctgtacaaaatatcacatatttacataaagccccatttcctagaagcatttgtacttgtacatattgtaatttaccaatcaccatagatctgtccatatagaatatctcacgcagggagttgtagctgctaaaatatgttaggtaacataagttgggtattgatgccaaattatcacggagttccttcagagttatcttgcagaaatatgtgactgtctaaagacttcattatttaacattaagagtgaacaccagcaaaactcttcttttacaaggggggtgggttcttgtgtcatgctgtcgccgctttcttgtagtcttttctgtatgtgctgtggttcatcgtgactgttgggtccataattaccaagcagaacatgttggtgtcattatggagaagttctcttcagcttagctaggcatggggaggcatttggattgtgaggccctgattggtcacctccatgcccctgaagaactgccttggtagtccacagagctgtagggaactgctggcctgggcatcaggagtgccggccctgcctgagcgcctctcttctctgggcttcagtttcttcgtctttaaaatgacagcacggggtcagcaggtctccaaagacccatggctctgcctccctcagattctgtattcagtagagcagaaagtacatgatgttctgaaatccactaagaatttgtagtcagatgctaaggatttatattctgagaaatgaaaaattttttaactgtataaaacctaagacatttaaatcagacttaaaaacactctgtcattttccagtggctccttctgatgttctgtgagcatttggtcaatgttataagcatgcatcccgtgcaggcctagtgtcaggtatacaaagacaaaccattcatggtcctgccttccaggagcttacctcccagtgggggtgaaaagagagtcaagaagtcatcccttgttaaagtacaacagggtagggtaggtgagatgaggtgaggggcaggtgtcccagaggagggga

SEQ ID NO: 135018 - DNA, 1023 bp, Homo sapiens
ttagcacagttacccgtgtaaaaatattatgtttcttttctttctttctttctttgtctttttgagacggagtctcactctgtcgcccaggctggagtgcaatggtacaatcttagctcactgcaacccccatctcccaggttcaagctattctcgtgcctcagcctcccaagtagctgggattacaggcacgtgccaccatgcccagctaatttttgtattgtttttagtagagactgagtttcaccatgttggccaggctggtctcaaactcctgacctcaagttatctgcctgcctcagcatcccaaagtgctgtgattataggcgttaagccactgtgcccagcctttttttgaaagagcataaggaaattttgagccatctctgggttctgaagcttgaatatgtgtttattctgtttgccctcaaagcaacatcttttggtgggaagaaccctggactgaagacaaacctgggttcaaccccactcctgtgactttctggctatgtgaccctgtacaggtaatttaatctctctgagcctatttcctcgtttgtgaaacagtcataattaccctaatctctgtaagttgttatgaggataaatgtggatacacttattaataatcatcatagtaataattcttttttttttttttttttttttttgagacagagtctcactctgtcaccaggctggagtgcaatggcacgatctcggctcactgcaacctccgcctccctggttcaattgattttcctgcctcagcctcccaagtagctgggactacaggtgcacgccaccatgcccagctaatgtttgtatttttagtagagacaaggtttcaccatgttgcccaggatggtctcgatctcttgacctagtgatccgcccacttcggccacccaaagttctgggattacaggcgtgagccactgcctggccaataattcttaaatagtgcttactccgtgcggggcactaattaaagcactttatacatattactcatttaatcct

SEQ ID NO: 135019 - DNA, 1389 bp, Homo sapiens
ttcttttcaagtttgaaaatgtgttaggaaaaagacaacattatgataattgggaattcagtatatctgtcttttccctctattcttttatacttttttttagatacaattaacacttcacacttcacctgatctctcctcagttacctttgacacttccttgatatttatttagatgttcatgccacgttcactttgaactctgtggttaagagaataacttttaaaacaagcatttttcctcactgaagatgtgcaattagcgaattacacacatgtggatgtccacttgtctttttttatttgtcaaaagatcatggcacaattacaagaaaattgtaaagaaaagtgattatcatcaaatcaaaatacctgctgtgaagttgcagaaacagctcattttattacagtttctagaacagcacatttcacagaagatgggaaaatgcttagagatatcttcatgggtgtcgtcttagaatttacgaaccatgaataatgcatttaatttaaaatggctgtattttctgtaagcatgtatgaatgcaaatggcaaagacacagtggaatttgactctgtcctatcaggtccggacaatatgatcccgttgtcatcaccaaaaacgaaagttaaaaatgtgctttttgccaaaacttttgctacttttccagtttcattttaggagccttgtcttgtataacactggctctggacttactaagtctagctgaggcggtgtttcttgatgagtcccatctctctttgcctgtgttatctgggagctgtcagataatgtcaccattaacccatcgccgatgtgcttgaaaaagaatactgaaactctagatggattttgatgctagaacttgaaagataaaaagcaagttgttttctgagtcaatgcattttaagaggaactgaataaagtcaaagcttcacagtagcaatggaaactgtcttttaactctctgaacactagtaattttaagacaaaaaatatttatttatttatttatttatttatttattttgagataggttctcactcccattgcccaggctgcagtgcagtggcctgatcatggctcactacagcctcagccccccaagtagctgagggctgcaggagtctgcaaccacgcctggctaattttctttttttttttttttaagagatgagggtcccgctatgttgcccagactggtctcaaactcctgggtttaagcgagctgcccccctcggcctcccaaagtgctgggattacaggcgtgagccactgtgcccagcaaaaagtaattcttatgttaaaattttctgctttagtctacttgggagggagaacttgtaatctcacatatctggaagggctctcagcctagaaccttgc

SEQ ID NO: 135020 - DNA, 1044 bp, Homo sapiens
tgttcttattttcccctttagctcctgtagagcagggtcatagtgccagccggtattgttcagtgagttattgatcagtgagaaacggatccggttaaagctgtcttctctctgtccttctggcttgtggcatttatctgctacctacacgagtatacaggtgattgaggctaactcaaacagtgtcttctctcttggagttttgatggttagcatgtttttcagagatgccctcgaaaaaagaggctgggattcttgctgtgttccttccttgtagtcatcttcccacttacccccaacaagagtaaatttaaccgagcaggccagaatctacctaatagcaggccctaaaagttagcatagaactttctctctgaagagggctgctccctgggtcctggttcccatgcagcctttccatagaaatagaaggtgtgcttagaaggacagcttgcctggtttcagatcttggctctgctgctcacttgcagtgtgacctcgaacacgtctcctcctttttcggagcctcagcattcttatctatcaagtagagtgactatgcctgtttcccaaggtagtcagagaagctagtgagccaagggctatggaacgccttagcgataagaggtatgcagtgcctatctactccctgtccttccctcatttttcagttattaaaatgcaattctctagctttccaggtgtgaaacagtctgggttgaaattcttcccatctcctcctgcaaggtagctaagtcggaggtaggcgtttggttatattccccagttgctgtaacaagagcacataccactgtctgctcaccaatcagtaaagagcacaaaggtacaaatgttgagtacgtgggacagtgaccccctcttgaaagacagcctcaactgttactgcccagcctccatcagagggcagcctgagacattgtcattgaagagattccagtcgggaagaccgccctggttcatctgccactttaccagaggtcaaactggcagcctgcaggccagattcagcaaattcagccctta

SEQ ID NO: 135021 - DNA, 2468 bp, Homo sapiens
tattggcaaacagtctgttatcaatccagtcatcattcttttatgaaaaatccatcttttctctccgggaactctgaagatgttctctttcgccttatattctgtgattttaccctgctgcatctaagtagatttatttatcatacttgatacctagggctcatgtctttcttcaattctagaatattctcaggcattatctcttcaaatactacttctctgccaaggctagttttttgtttttttattctggaaactcctatataaacatgtcggcatttcccaatttattagccatgctcttacctgctctttcatcttcctttacccttgatctctctgttatttgttctggcgaactctttagtattatctttcagaataggtgatagtgtcctaattttctggattaaaaacaagcaaacaagaaaaatttcagattggatttttcccgaggtaaaatagctagtaagaggtagagcctggatctgaatccatgtctgcctaacacctgacctgtattctgtcctttgtgaattcatgagttcatccttaaagttaaaaccctagcatagtgaagtagcttcacatcactgcattattctatcatgtgggtggatgaattgggaagatgaatgtgacttcagacccagactgtgggatgtcatgtgccagaagacctgagaagtgtcaagagttatatctggcctcttttccattttcattctaacttgtttctgagaaagaaaactttagttcctttttatcttttatgatgcgcagaatttccatctttcacgttcttttggctgtctaaatagactgtttactgaggtttgtttgtataccacttgtctcttctcggtagcagaattttggttttattttattgggcagatgttgttaaacttagaatttttcagcaacagggaagtgatgaaatgtttacaatgctagtctataaatataaaaaaagtctattgttgttattcaacatttgttaagcgcccacagagtgctgagtgctgagtatcactacagtcgggggagaaggggtctaagctcacacagattgtttctttgtaaatcacatttcttataatttgtttttaatgtatctattacttgtctcaaatagttcagtaacattttttaggtcctcataccacccagcttgggcaatatagacaaagatgagggtgacacatacattactttgtcattcattcatttgtttaaaaaaatattgcattggtcatatgttatttgacaggggaactcacaggcctataaggaaaacaaacatgaaacacagttgcaatgcaatatgatgaagactataatgaaagaagctgctaaataagagagtgacacaacgaggatgtgattaactctgccagagtaagtcaagggcagaggaggagatactcactcgaaatgggtcttgaaggagaagttttccagaaagcaaacagttacttcaaatagagggaatggcatgggtaaacatttaggaaaaactgaagttgttctccgtggctggactatgaagtgtgtctttgaaagacgacactaagaggggctagtttggaattgtttgaatgccttaccagctgccacccaaaagcttgggtgtccttgtggttagtaaagccacttaagggtttaaaacagggagcatttccctttctggaggcagggaggaagctggttggaagatgacagcatggcagaggccagtgagaagggcattatattagctctgggaagcaaaaccagctcaaaactctgatcagtggaaatgagtgagaagaacacatctgagggagattgaagagaatcagtcagtcaaaaaatgtgcagctggagggaaagggaatggtctaggataacttctaaaattctagctagggatccatgtggagatttttttcacaccataagcctccagcaataaatatatggcaaatatttctgtttttatctcagtttctgccaagcaactcccagtcctggaggaaataaagaatattggtttcccccaagaacagtatactggagaagctgcccaagaagaaaatggcttcactttctcagtagcttgctaggaaagtaatgagaataaggtttcaaaacttagttcctctaatttaatgtctttggaggaatcggctcctttgcagagaatagctttgatattgagttcatgactcctgcctttagctttctttcatcattgcagatggagtgctggtcatgtgtgtcttactagccagctctattctcatgttccccaaaatgttctctttgaataattagactttttcacttaatttttaaaacatgtctgatgcctattatgagccatgtgtgatggcaggtgcgttcacatgtcatctcatttaatacagcaacctgagagatagatagcaacatcagttttacagatgaggaacagattctgagac

SEQ ID NO: 135022 - DNA, 1856 bp, Homo sapiens
gaatcactttcaggaagatttcagtcattaacagtgctttcactaacaatgacagattgaggtaagactagagggtttgacctgaattgagggacattctacaaaatagctggcctgtactcttcaaaatgttaatgtcttgcaacaaaggacaacccaagaactattctagattaaaggaggctaaaggacaggacaacggaacgtggtgtgtgatccaggattttcttttggtataaaaagtcattattgggacagttggtgaattctgaatcaagtccaaattttagatttgtattgtatcaatgttaattttctaattttgatcatcgcactatggttatgtaagaggacattcttgattttaggaaatatagtcagtttgttataatgcctgttttgacaacacaatgttccaatgccatcagtatgtcagggagcaatttgagcataatgtgaatttcatttcatttgattcatttgattgtacagggtttcacctatgaaaaattctaagtgaatgaagaaaattgcccccagcttagccaagatgcacatgcacagaacacacatgcacacccttcaggtatttgccaattacctccattcatcacatgttataagccacatctgtcctgcccatgtctggtgctatgattttctgtcctcttctcgccacttcaccatatactcacaagctgcaaccctctgccccttccacaaacaaactgtagatctttttcaaggtaaaatgacatatttattatggggtttatatatttcttaaccatttgctatgtgtaaaagtaggctaccatttttaagtttcttatttctagcatgtcactgaagtttttgagtgtggtgaaaatgtgatgatttttaggaatgcttaagtatttgagggtaaaaggatatcatgtctgcaattttttcttaaatgttttaggaagacattttatatgtaaaacacatataattgccttctgtgtgtgtgtgtgtgtgtgtgtgtgtgtgtgtgtgtgtgtgtgtgtgtagagagagaggggggaagagaaggataaagccaatgtggtaaactgttaacattttgggtaatctgggtgaaaggtcggtggtaattctttctattattcttgcaactttttcataaatatgaaactatgtcataataaaaaggtgaaaggaagaaaaagactcagggaatggaaaagattttttaaaaatgaagtccaaatgtaaaaaactaaggaaggcaaaaggaaagggaaaatgattcagctgggaaaataatgaaagcagagtgggagagaggatcttaaacaaaccttctacgaagtggattagaacatgagtttagtttgatgcaagctgtttgtaaaatatcataggaatactacggctacaaaatgggaaagaaacatttgctttcccagaaagatttttttggaagtctaacccagaatagtaaaaaacagaatagacccacatatatggaaatcatataaattaacaattctaaatgtatttaatatctttatctcttcctaacaatacaaagactttgatatacagtagtctccacttatctgcagtttcactttccatgacttcagttatcaaggtcaaccataaaaatattatgtacaataagaaatttggaaagagagaaaaagaccacatttacataacttttattaccatatattgttataatggttctatttattttattaattattgttaatctcttaatgtggctaatttgtaaattaaactttatcataggtatgtatgtttaggaaaaacatagtatgtttagggttcgatactatctgcagtttcaggtatacact

SEQ ID NO: 135023 - DNA, 1020 bp, Homo sapiens
tctgaggtccagacccctctagtgtaacacatttcaaactttccaaggatcttgaaatatgacttgaccccatatattgaggttctgggtttccacagtggccgtggaggagagggagtggttcagcttgaatgtacgtaaacattctttcccacatttttagtaactaaacacaggaaatcccactcacagcccttaccctttactgacctttctagaaagaattcagaaactctattggacaagtaaattccttcctgcagctttgaacagagcatctccaatgggtccccctctgtagtggcagcatccagcactctccacctacctgactggttggaagactctctccctccagttcgcagtgcttgagacattgtacaagtacacagacaccagacaccaacctccaaaatccaagaggtctgtctttctgcagtccatggatgtgcagcaaatggcaggtgagctctgggctctgagaaagccaggcttgagtgcagtaccatttcttcctctcctgttctaaaactcagaatgcccaaagatattggaatagtcccatggattccatagccatgtttttcttgtgctaaagagagtgggcgaatgaatttgtgcctttttatttttaatcaagataaaaatccaggtgggagaaagaagcccaccatgaaaatagagtaaaagcattctcaaaatgtgtaccgaaacatatcttgagcaccttctatgtgcttggcacagagctaggcactctctgaccacgtggctagtaagtggtagaattaggattcagagataggacttgattctgtagaaaatgtgagtttccttttgcaggagaattcaacagcagagatagagaaagccagaatgagatctttctttctcattttgatatacattaagctgtaaccctgcatttcctacataaaatgtcctatgtgtacttgtgtgcatgattgttgtttgtgagtgccaactcctggtgaagctaccatctgcattatttatcca

SEQ ID NO: 135024 - DNA, 1063 bp, Homo sapiens
gaggttgtcttgagcaagtcagctgccagcttaaaaggtcattatctgttctctgaagggaaacttttatcccgggttgattagttttatcctgggttgataagtgtttatgcaaaagaagtaggggtaggaaaaacctggtactcactgaactcctacttcttgccctttatgtatattttcttggttaaatgtacacagtattatccccaacttgctaaataagaaacataaagcagagagaattgaaattacttaatgcaacaactttgctcaaacatttaccaagaccctactaaaccaggggactattctagatgcttggaattgcagcagtgaacaaaatgaagtcctagtcctcaaatctcttctaccttaggaagacacagagagtaaacaaagatgaaaatcaacatataatatgtctgatggtaataagtgttatgcagaaaaagaaagctaaggaagaagatagagaaagctcctgggtgaggtgaggtaggtgccaagaagaaagagtcggactagagccaggtctgtctgcctctagaactcacggtttttccactggtcccatgctgcttccgatcctctttggtgatggtttccagcatctagggaggaaacatgaactcctctagcatcttgcttcttagtctaaagctgataattcaatgtgtcagggtggtgactttgcattcctggggtacagaaaacatttttgccgtactccctgctgtcagcagcatgtagctgtttctttcgtctctctggtttcacagacacatttagtcttgatgcagaaagcatcttgccagcttggactcgagccctagtgctgaggagaccagtctgtcctaaaggagggtctctgtgactgctgggctcaaaggaactcatcacttcttttttctcttcttccaaaaagtgatgctccagggagtggcttatgtcatcttaatacctgtttcctgatctttaggactcaccaagacagtctaattctatttttaaaaatgctgccacctcctctgtaccaggcccagtggcaggcactgaagaa

SEQ ID NO: 135025 - DNA, 1050 bp, Homo sapiens
tagctttctcacagcagtgttaatccatatttcttgttggttgtttttcagttgatgttaggattttacaaaagcaaattattgacaatcatgataaaagccacattcatataaggtttatttattagggattgtattaacaatggaattttgatttatagtgaatttgaagtctattatagtcaagccttgttagcacaacatggaacaagcatttgaaatcttacaatagtggtccccaccgcagacctgaccagggcactgacttgcacacacactgacaaataagacctggtcactgttaaagacagtgagaggcagagaaggaaaggaagcagagagttgcagtaaggggtgggaactgctatagtagaatgtgcaagctgggagacatttcagcacagggctaatcactgcagattgggtgctgcggggaagcttcccagggacggatgtgtctggaataaggccttaccggaggaataggagctccccaggagcagggggcaggaagtagcacatgcagaggcaagcggccttgacagcatgtggcacggtcgggtactgtgagtgcccctgtggctggagcagggacagaaggagcgtggctgaggacgaagcagaggagtggtcagtttccaggccataagagactgtgttggcctctacaggattcagcactaatgtcataagccagcatttccagaaccctgttccttgaactattagacccaaagatattgatatattttctgatcccatagaatttggaattgttacactttacatctactgtaactttttaaatacattaacaatgtacactactgaagcccagctgtagagaaatctggatcactttgtttaacccagcatttttcagaccttttccacaaaatacatatcagcattccatgcatctagtactcctcacagcagtttacgaagcactgctagagctaatggctgatggttaatttttcttgctctgagaccatggaattaggataccagctgggttcatttttacccgttccatgactgggaatc

SEQ ID NO: 135026 - DNA, 1024 bp, Homo sapiens
tctgtcacccaggctggagtgcagtggtgcgatctaggctcactgcaagctccgcctcccaggttcacaccattctcctgcctcagcctcccaagtagctgggactacaggcgcctaccaccacgcccggctacttttttttttgtatttttagtagagacggggtttcactgtgttagccaggatggtcttgatctcctgacctggtgatctgcccaccttggcctcccaaagtgctgggattacaggcgtgagccacctcgcccggccaatacttagttttaaaacgtatcagctgcagcttcatcttagaacctgagaggaataagccacacaaacaccacatcacgaatgtgtaaatgtaaagcgaaggcacagcccagcagctgcatggtggctaaccacaggcatttagagttagggaggatcatctcctgcagaattgtcatgaccagtaaatattctcttctagttagaaatacacaagagaggactatagtcatggattaagctgaagccaccacggcagttttaaatactctatctttgtggaagcagtggcaaagagaaacggttgctgctactggtgttttaaaatcagatgttctcactttagggtctctcactttttcagtgagactctgaaaaggaaatctttctgatccattttcaagcaatgataacatttgacaatttgcagcctgaaatggtgctaagtgacttcatatgcatagctagactatgaacttcttaagaacaggagatcttgggaatgggcgtggtgtctcacacctgtaatcccagcactttgggaggctgaggtgggcggatcatgaggtcaggagatcaagaccatcctggctaacacagtgaaaccccgtctctactaaaaatacaaaaaaattagccaggtgtggtggcgggcgcctgtagtcccagctactcaggaggctgaggcaggagaatggtgtgaacccgggaggcggagcttgcagtgagctgagatcgtgccactgcactccag

SEQ ID NO: 135027 - DNA, 1064 bp, Homo sapiens
gaatatggacccaagaatatctgtaggaaaagttcatgaaacatttgttttattttccggtatattttaggcaagtggataaggaattatagccaaaacctacaggccggagctaagcagattcattgatgggggagtgtaaaggggactgcagaaggggctggtaacttgctaattaacattttttcccattttagtggtcatctgaagtcaagatcatgtcctgggaatgaagcaaggataaggggaggtgcttctgccccaggacttcagggaccatcactatagctctgtggctctaagtggctaaggaggccaccgaatgtgatggaaggagtatggcctttggaatcacctgggttttaattctagttctgtcatctactagaagatgactctggaagttacttcaccatcctgagactcacttttctcatgtgtaagatgtaaataatgcctagctagcaggactcttgagaaaaatagcaataatatgcaccaaacaccagcatagtgccttgctgatagtagatgttaactaaatgatagtgaccatccctgggtgacaaagtaaaggaggaagggaaagatgagactgcgacattctagaatagtggtgtccatacttgttcaacaagtgcccaagaacctggagccatgcaaaacaccctgaaattattctggcccatttaattctttcttttgaactaattgtgaaagtatggcttttatctcaaatgatacataaaggatttgaaataaatcacatatttaattatttcctttaatatttatttatttatttattcattttattgcccaccagcaattatggacaaataggggtggaaggtaccaagagttgaaaatcagagtcatttaaaaaattacagtcaggttttgtttttgttttgagacagagcttcactcttgttgcccaggctggagtgcaatggcgacatctcagctcaccacaacctccgcctcccaagttcaagtgattctcctgcctcagcctcctgagtagctgagattacaggcatgcgccaccatgcccagctaat

SEQ ID NO: 135028 - DNA, 1124 bp, Homo sapiens
tttgtttttggtgtagtggaaagcagaaaaatatttttaaagtagtaaaatcaaaacagcaccatagtcccactgatttttactacatatgccttttgtatttactctttattttttcattatgcaaagggtttacataggtacaagcaaatctcagttaaaagttagttccccgcccccatttaacaagatttcatatgcatttttacataactgcagaatattccatcaagtataactaccataatttccataaccaccctcccttgttggacatttaggttatttccagtcttttgatattataagtaatactccactaaacatctttgtgaataaagctttgaaatgctgtatttcaaagccttctgagtggaagaactgagtctgtgagcaggagcctgactgtgggggccaacttgtcacagcatcgcaagaaagcagatttcggttgactcagcctcgcggtggctcaagatggaaaaagaatcaagaacccttgatgggtgggagggtgcgcactccctgccctccacacagacaagcagaggattcccagaacacacataagggatgtgactaatttgtctgtgcccccatcttgtgctgaaaataggtttgaggaaccttaagacactatgtacagtacagcaagatgagagataaggaagcaaggaaaccgggagaaagaggaaactgcatgacgcctggaagggactgatgtgtgtgtgcagctgtgtgtctgtgtgaggctctgtgaccctccacacaggttgggagtggtggagctgggactcaccccatcacacccaggtctgtctaaagagcccatgctttaaggaaaaaaaatgtaaaaaatacatataacataagatgtgctattttaaccattgttaagtatacagttcattggcatgaatggcattcacaatgtgcaaccatcactactgtctatttgcaacatttttcatcactcccaacagaacctctgtatccagtgagcaagaacttctcatttccctttcccccagcccttagtaacctctagtctactttctgtctctatgaatttgcctattctagatagttcatagaagcggaatcattcaatatttgtccctttg

SEQ ID NO: 135029 - DNA, 1752 bp, Homo sapiens
cccatacaggtgggggaggtggaggtggggtcatggctgtcaggttactgcagtcacagtgctgtgttttgttggaaacagaaacatgagggacctaagcgggctcctgtctgctctgcttctgcctccctggaccctgagcagttattcacctctccaatcctcagttccccttccataaggtggatgtgtaatcccctccttgcaggagtgtagtgaggcttaaataagcccagcacggtgcctgtcctgacggccctgggaagatgggcagaaccctgccctcgcccacctcctccctctgaggaggaccctgccagtctggagcccgttgggggacagctccagtccgtggcctgcctggctctgtaaggaggggtcgagctctggcctgagaagcagaggtgggcatctcctcctctgcagtcacgtctgaagaacttttccctggctcagagctcccttgagatttttaccaccttggcctctctctctctctctctctctctctctctgtctctctctctctctctctcgctctcgctctctctcgctctctctcgctctctctctctttcctaatgaaaaaattcagaatgcagctggctgggggactcctgagctttgttttctttaccagatccagaaggaagaaggaaggggaccgcttgctgaggcccagccctgtgccaggagctaggcttctcctccccatctgtgctttctgcgggtttgttggggaggctgggtgcccggctcagggcggggagggccagtgttggctccctggtgatgtgtgtcttcagggccgggtgaattattccaaaggactctctcagggtcagaaactgagatgccaggggtgtccagtcactgccaagttcacctcagtggcctcccacagggtcagcactcagttcaactccgagttgcttcccatccgtgctctcagtaattctccatcccagcccctcactagccctttacacacaggggatggagcgaaggctgcagtgattcctaggaagcagcagagccagcagacagcctccaaacccaggttccctccaacacatcctcccgcctgtctttgttctagtttccacatgttccgtgttagtaactctctgcatttccaataccaggcacaggtcgtggcaccgtgtgtaggtatcagtgaatatattttggaataatagacgggagaatgggtgaaggaaattagggaatagggaagcatttgaggcagaggggctccacttggcctctggtgcatacacattgcatcctgtcctatctatgggcttcagaggttgctgcttcctgatagaggggaaggtgtctgcaaatcacaagggcatgtggcccatttttcggtcacctggagaaaatcagatgcaaagcccaagatatttaacaatatcagtcaaaccaacttgtccttctcgacttaaatgacagagctaccagcagccaggcagccccatccagagaaaccccctttatccatgtcaagcggcagcccaggctccagctcatttatttaggcctttcttgctctctgacacgcctcctagcagttgccaggcaactctgggagtagcagtgtgtgttagggattaactagttagggctggggtcctttttggcaagaaggggataaaagacaaatgagtttaattgctaggccgagggtcctttctctgcatggtagaagattgcaacttttggaggatatgtgtagcagtatgg

SEQ ID NO: 135030 - DNA, 1049 bp, Homo sapiens
aatacaaaaattagttgggcgtggtggcacgcacctgtagtcccagctactcaggaggctgaggcaggagaatcacttgaacccaggaggcagaggttgcagtgagccaagattgtgccactgtactccagcctggtgacagagcaagactaactcttaaaaaaaaaggtttgaagtaacaggactagaaatgagaaagcaccacccataatcctatcgtcgcaaggtgagatacagtggtggcaggtttccatccagcttctaggatttttcgtttcttttgtttttacatttttgggttttggttttttaacttccttctaggcagatgagatatgcctgagaaagcaatccagtatcctagttattaatattttttttgccttttagtttgtgtaagcattttccacaccacataaaaactcttcttagacatcattgacagtggctgagcagagcctatcaggtgacccttgtggttcccaaccctggccgcggatcagaatcacggagggatgaggagcggggggggggcggcttttaaaaaggcaaatgtccaggcccccctcagagatttctgtcaagttcctgtgatctgaaatcagagccaaggcccaccatcttttcctagtgctggtctttaaaaaaaaattattttactattgtattattattattattttgagacggggtctcgctctattgcctaggctggagtggcatgatcatggctcatggcagcctcaacctcctaggctgaagtgatcctcccacatcagcctcccagctagctgggactacaggtgcatgccactgaactcagctaatttatttttaatttttgtagagataaggtcttgctatgttgcccagctggtttcaactcctgggctcgagtgatccttcagccccagactcccaaatctcgtgctgagattacaggcatgagccaccgtgcccggcatgctggtctttttgattgtcagtaatgtttcatgataccacactgtgctaaacatctttatataaatctttatgcatggtttgaa

SEQ ID NO: 135031 - DNA, 1021 bp, Homo sapiens
aagtcattaaaaattgtttttgtttttattagacatgttctaataggaacaacattcatttaaatttcaaaaacatgccctaattctgaacacttttttttttttgagactgagtttctctctgtcgcccaggctggagtgcaatggcgcaatctcggctcactgtagcctctgcctcccgggttccagtgattctcgtgcctcagcttcccaagtagctgggactacaggtgtgtgccactgcacccagcctgaacacgtttttgtcctcccagtaactgaggtatcaaatggatcctgccatccgtaggatcttccagggctccatatgtagtgggcttagtcagccaccctactttgaccctgtcctcaacctgtgttttccttctctccatcaccagatctcttccctgaagaacaggctgaaaaaggtctccacaaccactggggatggtgtggccagagcgttcctcaaggcccaggctgctttcttcggtagctaccgaaacgctctgaaaatcgagccggtgagtagccttggcatgtcacagagcctgtgtttggtcagggctgagaagcatacctcaggggccacaagaaatgccatgattcttctggtttccagattcatctagaagagcttgtgtgtgtttgtggtgggggacagtgtactccccttgccatacctctcaacacaaggaggctgtgctatcatgtgtgagaccctcactgctctgggggctgttatgccctgtgcaccaccctagacagtaagccccaaccgcgtgtcagatgcagcgccaggcccctcacactcacctgctctccctggggcttcacagtgcacctgtgcagtagcggtgatcagctccactttacaaatgaggaaaccaagactcagggaagagaaacaacttagcccggaaaagccagatggccccggagcccctgctttcccactgggcctcgccacccctgttctttcacgggaccgctcctccacgcttgagaaagcagagcc

SEQ ID NO: 135032 - DNA, 1468 bp, Homo sapiens
ttagggaagcaggcatcttggtggcattcctgctgtgatatgctcatcttttgggcctcagatagtggctctgagggcagaagtgcattttggttcatttttaatatatgtcattcaatttgccagagtcattgtgagacattcacatgtctgactgagatactgctgatctgtagaattaattatagttaaatggaaaggtggcttttgctcatgaagaaagtcgttagtctcttgataaacatttttaattatgattaactttagtcttcctccaaatactttccattagaaaaggcattaatgttctggttcattagaaatagagcaatccttttatttttggtttgcagtccattttgttcttgaaagatattggtccacttttttaaaaaaaaattggtggatgttgtgttgtaaaaaacatataagtttccttttgcaagtgcatatcagttttttcaaaggtaacttacactttaattttgtgtgttgtgtttgcaagagaatgcttcttggtttattcatgttgacaactgaaaagccttagacctaattaaaagaatttccatgagcacctttactgaaccatttcattacgcggcactgcacagattgcattgtgaaacatggtgatagtttaaatctgacctttaaacctgaactgccagaagtatggggggaaaacccttctttgaaaacactccccggataaatatatgtgtgtgtatgtgtatgcatacatgcatgcacatatttggttagaagcaatctttttatggaatgaccacctaataatataaatacacatttactttgagctcagatcttgtagtctcctgtagcttgggtaggattttctagctacattaattgtgtgtgtgtgtttgtgtgtgtgtgtgtgtgtgtgtgtgtggtgtgttaaagctaaattgttgtataaggaaaacaaagataatttcacttactctgggccaacaaaaaaaagtatttggaggaaggtaaggtttacaaatagaaaaacacaaaagtcttcactactgtgtgtttcagtttcaaatggtgagatactcagattaatctcatggggagagggctggagtgtatatgtgtgggcaagactcctcctgagctttatttggcagatagtggaaacaggccttttttggttttgttttaaaattgcacttttttactccaaggatgtcattctaaggatttgatagcttattcctgggatgctcagcagagccactatagcacataacgaagtagccattcacataatgataattgatgcttttgtctgacaaaaagctgcctggaattctaactcttgccactaactttctgacatatacacagcccacaagttgtcaggggagagggagggagcagagacccgggctcgtagggtcatagccagctccagcatggaactccacataaatagcacagccctcactcc

SEQ ID NO: 135033 - DNA, 1052 bp, Homo sapiens
agatggctttctttttggtaaacttcacaagctgattctaaaatgtatatgaatatgcaaaagatctagaatagccaaaacaatgttgaaagagaagaacaaagttgtaggacttatattacctgtttgcaagactcactataaagttacagtaatcaagacagtgtagaaacacatataaatcaatagaacaaaattaagagtccagaattagacctacacataagtggtcaattgatttttcaacaaatatgccaaagtaattcaaaagggaaagaagagggatcttttattccaacaaacgtgctggaacaactggatatctatatggaaaaaaaagaagccttgacttttacctcatgcaaatattagctcaaaatagactatagacctaaaaatagaagcaaaaacaatcaaatgactagaaaaaaaatatgagagggaatcctcatgaattgggggtaggcaaaaatttcttaggacataaaaagcacacatcataaataaaaaagtgataaattggatgtcatgaaaggtaaaaacttatgctccccaaaagcatcatttaaaaaatgaagaggcaagccacagacaaaatgagataaaatattcttaacacttatacctaaaaaaggacttttatccaaaatatatttaaaaattccaaaactcaatagcaagaagatagctcaattaaaatgggtaaaatatttgaagaaacacatcacaacatgcacatgaaaagatactccgcatcgttagtcatgagggtacaaattaatgtcacaacaaggttctactgcatacccactggtacggctaaaataaaaaggctgaatttcttatagatgtatattttaaacatatgtttactgtatgaccaggcgatcccacacctaggtatttgcccaagaaaaggaaaacgtatgtatgtgtatgtttttagcaacccaaaccagaaacaatacagacgtcccccaactggttaatataaaaacaatcagtggtatacccataaaatagaaggctactccacaatcaagaagaagaaa

SEQ ID NO: 135034 - DNA, 1049 bp, Homo sapiens
aatttttaaaaataagagaatttggacattttggcatatggggttttttaaatgaaatttcatggaactgaaaacagtcaattttaggtttccaaaaattgtttagattttcgctggtataaatttgctgcacatggttttggggaagttctgagagatgcatttgggactttggggttggtttttttttttttttttttttgagatttgtgattgagttttaaaaggtgattttcccccctcccccaacctcaaagtgtaaatcaggggagatcagagttccattttctaaggacacttttgggtaatgacatcattatgcactgctgcacaactggacttggggctgagttattgagccttgtttcagcaccatttggacactgcacagtatattccccttccctgcctcggagtgattttggccgtgccattagcagcagctgctggtgataagcaccgggagagtcacctgtgtagggtcaggcttattgcacatcaaggtttggcagtgtcagaagagagggaagatgcccaggagggggctccaggccacctgccgagtgaagatcaaagggttgaaaggtcagagggctcagctcccttaactgtatctgtctgtgcaatagctatttcagattgtaaatcttggcgatttcattaagtcctcctggctgctactggggcattgaaataataaaattttatatctattgcctttcctgcctctggcagccaggctgatacgttgtctgcaagatggggtcgtctttatgaaaaccttccctggaatgatctgagtagcattaatgaagcctcagattgggaagttggggttcataggacgtcatcctcagcaggagggagggggtttataaataaagaagacccacacaaaccatttagcagccttttagatttgtgtagcacctctcttctgaaaagcaggtcagcaaaatattacctattgctaaatgtttaatcttaggaggaggggtgcactttctcactgctgctgcttattaaatagcccctgttctaatgaccct

SEQ ID NO: 135035 - DNA, 1061 bp, Homo sapiens
gcattcttcattgtagtaaatgtgatataaaatgtatatagaatcatgaagaaggaaattaaaattatgcacaatgccattattccagattgaaccattgttagcattttactaatctccctcttggtctttagtctctaaatatatgttttgtataaatatgtataattgatatactttataattttgtgtctttattttaattaacatggcttgggaatctctacatgtttttatctactctcagtaataatttttaatttgccacctatcattcccactatttggatataccacaacgtaactgttttcctactgttggacactgaggttgtttataatttttcactattataaatagcatttcagtgaacatctttatgcataaggctttatctgcattttgcctcatttccctagcatagaacccctaaagtagaaatgcttggtcaaagctatgcatcggatgccagattgctttctgtatggctgtaccaattagatagcaattcttttaaaggacttttctgtgcttttgtaagtgtcattagtttgtagacatgtaccctaagccctttcctcctcaggagagagttttaatttgtactagagcaaaatgaggcgtggggagggtgcttgcctgtgttgcacaggagataagctctcagagggaaaatctacagccatgtccgtctgcggtggtgctttgcatgtcttgaaggaagtgctacttctcttcttctgttcccttcatttcacgtcgacgaggaccacctgcttcactaactgttgcacactgtgctattgtgcttacgaaaatgaaagaagttggttatcgaaaaacctgtttgtttgacattgagaatcttgatcaaaatagaccacagaaatctgctcaaatttctaatttgacaggccggccatgtggctcctacattctgttaacagttcctccttgtcatcacccagccctaagcacatacagtacacagtttatggactatctgggatgatgtatttagatcagattgaagagatttcttctgtgttttacctttgtt

SEQ ID NO: 135036 - DNA, 1093 bp, Homo sapiens
agtcccttctctgtaaaatgggtattgtatctatgggtattgcaaagttgttatgtggattagaatagatgaatttaaagttcctcatataatgtctagcacatttgttattggtaggtaacataaatgataatgtatacacacacacacatacacaccgacccctgaaatcaacggcaggaccggtgtatccaaaatgcccaggttttaaacccattggagtttagttctcatgcctttgctcagtcactgacttaggcaacccgtggctccgtgaatgaagcagttggcagaggctttctgaattatagtgtcatgggatggcatgtgtgcaactggggaggagatgcttgctggcagctctccaagtactttgtccaatcagaatggacagttagatcacatctcttgatgacagaggaagcagcaaatacaaaatattcttctttgaaacacattatgcccttcatccaaccttaactgctttttctgttgtaatcatggcaataatcgttcccatctgtattagaactctgctgatcatttaacgtatattttctttgattctagtaacaacgtgctggctggaatccaggattccattttaaagataaggcaactgaggctgtgcagttgcagagccgctctttaggggctaatatcaaggttgatgctcttcctgctacccatgctgtttccaatgctgcccacgttttgaaattcttctgaagtttctaggcttgggaacaaaatgtcatattaggatttttgttgtgaaaggaaatgtaactatgcatacgtttattaaaacagtttttctccaaatagtgaaccatctgtaattttctgtcagaagcaacagacattaaagcagctgtgtgtctctgtttctcttcacagtgctcccatgccctacctcataggaatccatttaagtttaatggaggtaagttggcttctttcctccccagatggctctacctggggctttgtttcattgtgtggcggtggagagacccagtctcagcagtcacagctctgcacgtgggagcatgctgaagcagcacctcccagcgtacagagctgagcgttc

SEQ ID NO: 135037 - DNA, 1955 bp, Homo sapiens
ctctggtgtctgttctttttctttttcccgttctcttgtcctttaacctctctaataaagccaggctcattatttcgagcagaatttaaaaccacaagacaatctgtgtttacacgtttgtgtcttttacaaaaaaagaaagaaaagctcacataagacctccttcagagtttttctttctgactgtgggatcccctttgcctgatcagggtatttaattaagaaggtggtggccctctgagaggtaaggtgacactgtgatgtgtatattgtaacgtggatacctatgtgtaaacagtgatctttccaaatccctgggctgccctaagctgtgttccttcatgatagcagaggtgttgcccacctggaggtggagggaccgcctctcccttgtttcctctcccctcccactttgtcttgggaagctgtattttttttttttttaagcagccagtgttcctttatttcactggactcatttccaattagtagctgctcacctcaggggaacatgattaacagagccctggttatctgggggaaaggaattaaacaaattgtgaaagtgcggtaataatgaacaaggactacaggatcgttagtaagtctgcagtttccatattcttgcttcttccttgctgggaataagctcatgccataggacttacctgtcagagaagcgctcagcatcacaggcctggaaccaagaggactggcgaatagcccttttggtaccccagcgctcttttcctttcagcttaagtactgagtatgtgctgtgtgacctcatgtgcagagcttgggctgtctgttcagcagccttgcgtctgaagtacggcttcaccactgaccagctgtgcgatcttggcaaattttatctttctgagcgtgtttcctaacctgaaaatatggatgatcgcaccaccttgcagagttcccttgagcattatgtgtgtaatgcataaaggtgactgaattatagtagctcaataaaagttccttttcctcttaagaggattcaaactaaagatatcttccaggtaaaggttattctgttgtgtctgcctcaacaccagcaacagagcccttttccttttcaggggagaaggaaaaaagagtcacttttactctcacgtttgtaactgatgaaatcagatagtgcagtaattcccagagaacaaaagcttcatacagatataccccattctgctattccaggatgtacaatagcatcctacaatcactgtcagtcatacagcagttgtgacatggttgtcatgacctgcctatgcataagtttggttataactgttaatattatcaccactttaatttaattatgtgcattgttggttctgcacatgttgtttaattgccgtttaaaatgtcttcaaaattgcactatgattcaatattgaaaggtaaagtcactgtgaatgctaaaaggctctggagaagagaagcagagtatatacatttgctattactgaagcagatatttccattcatgttttctagaacagcaacaaataagttctttcttgaacctaaacaggaagatcacttctagtagatggattttggtttggttttgtaactgagatacccttggaaaaacatggacgtttatgcctctgaattagaaaaggattcagatgtgttggattctgaatatgaagaagttttttttttttaaatagcttacccaatttattttgctgttttatttttaatgtatgctcaagagtgataagaggtttttaaaaatgtgtccaagtgatcagaaagtcatgaaccattgtttcattgatagtttttccgttattggtggtacattagaaaggaaaggcaccctcctgacgagagtgatgagcaaccctcctgaactcagtggagtatccgggagacaagagtgtgcttgggagtcagaaatccatgtgtagagatggtgtgtg

SEQ ID NO: 135038 - DNA, 1154 bp, Homo sapiens
aataggtgcctatgcacagggaaccagggaagactttgaagaggaagtacttacacagagacctgagggaggagtttgctagaggcacaaatccaggccagtttgggggacgggtggaaagggatgggaggaaaaggagtacatgactctatctaagtgatgtattccaaggacagacttggagaagatggtacagagtgtggctacagatggctgctgtaaagctagaccgtgggctggtggagccatccgggccaggcttgtccccaaagacttctgagtaggaagtgatgggccggaacctgcacttgaggaggagcgctctggcagctagttaaagatgagcagaaagagctgagacccagggccagtggaaccctccagcctgacttcagggtggaatcaggtcagagttggttcattctccactcactcaacaccagcaaggacttttcatctctaagaagccctgaagggattagttttatatatgtgtatttttgtatgtgagatatatatatctatatcaccctcctttatatgggtacctatggaaatagaatgtgaagggatgggttaaacctgcgagccttgacggggtcactgggaactgttcttgggtgcctgctgaatcagttccagttcatggcatggacctggctcaagaacagggtctggaggaaagagtcagggcaggtgggggtggggagtagcagccctggctttaacacacagctctcacaactgtgaaacatcagcagaatatccaatttaaagctgttcatgttacactaacctctgggattcttttaactgggccttggcacgtcactctttcgccacgtaaatgttcttctgtcagcaaaggccagttaacagcttccaaaagaagcaaagtcctcatgggaacaggcttccctgaaaccaaagaaacattaaagaaaaaaagacagaaagaaatatgtgttgttggcttttgtcacttcatacctatatctccaaaagttgttttttttccctttcttttcactatattgaattttgtagcaattgtatccctttgtagtatctttgtttcctaaatttttaattgcatcaaatactgattgtatgatgtctctagctctcaagaaaaaaaaggaatacaaaatagg

SEQ ID NO: 135039 - DNA, 1033 bp, Homo sapiens
gacgacataatagagactgatcaagttcatttagaagatgtttatgcgtaccgactggcacttaaaaagctctttgtttccatattctctttgggagagctttgactggggccttggctagtctagaaaaggaccatagctgagtataatctgttcaggctctcagtaattttacggaataccagtgcagtccaccggtgtaatttggggtgcatgtgtgtaaacaggtgatgtttctttttttttttttttttttgccatttcattaaattcatccgatttctgccatggcagaaaattttattattttagtaatgcggtcaagtcatgaaataaattgtgtcttccttagattgcaggactgatagcttctcatatgactcttatgaatcagaattttaaagaatcagaattttaaaggataatatttaagtcattgacatcttaatctacttaaaaagccctgcacccactttggcagacatggctgtcataaaagaaattttgagcgcctactaggtgcttatgacactgggagcaaggactcataatttcctgtgttgtttctgcagactgaaagtgtggtcactttggtgaaccaaggtagtgtgatatgaggttagaccatgaaatcatcggtaagtgcagacacggagcacattcacatttgttcttttctgctaccttgatagcttcagagtctaccagctagatgtgtcagacagccctgctggaggtatcttttcccaagaaaaaagacagcaggagtggaggagagagtatcagactgcaagtcaggatggctttgttccacttctgcctccgccttgtacttaatccaccatgtgccactttctagccatatggccttgggcaagttacttgacctcttggagtccctctgtcctcttctgtgaaaatggggatagtattcacacctacctcaaggtggttaaaaagatccggtgaccatccagatatgaaagcacagagcccagcactgggcgcactattcactctgtaaatgttacct

SEQ ID NO: 135040 - DNA, 1058 bp, Homo sapiens
tgctgttggtttgggtgaaaaataagacctgattgtatagtacttagaggttttttttttttttttttttttttgtagcttgtaaagctccaagaccactaaagagcattcacagaataaatgtgtaagaatatccttaagtagattcgtcctcagtactttatatgggagccccgccgttctcccccacccttttaaagttcttttaagttaaccttttgagccatccatttcctatatgacaggcactatgctaatcatgtatgtgatcatttttttcattcgttcttgcagcaaccctaggagcttgtgggttttcttctccctttgcagatgggaatgttagcacccccgaaagttgatgtgccttgtctaagatgagcagcagagatggaattaaaaccaggccagcatccttgctgcctcatacttccttcttggtaactcttcattgtcatgaattccctgtgacacttgtacttagagaaatattcttagcatgaccctgttggccatggatctaaaataatataaagaacctctgcctggtcgtcgtcacctttgaacgcacacctaagctttttacttcagattcggcaagccctgtctgtgcgcctgacactactctaggcaccaggaaacaggaggcagatctgtgaattcccattgacacacccagtctgttagccacagctccatttccttaaacacttcagattccattccgtctgcccatgccttcttagacttggctgtctcccagcagctcctgcaccctattcctaccatgagtgcggccttggtggagccctggggcgtatcttctgtaactcactgtggtttcagggttcatatattgcagctatgtatctttgtcctatataataaagaataaagaaccttccagggttcatatgttgcagttccttcgagcagtgtatcttggtcctaatcaccccctttataatttagggatactgaaagaaatttggacaactaagaatatccagttaaataatgacaaaggcatatttactttcctgagaaacatctatttg

SEQ ID NO: 135041 - DNA, 1054 bp, Homo sapiens
cagcctggtacgtagcttttgcagacgtttataataaattaataaattctataatgggaaatcaaattttattgtccagtttattaagggcctaccctactggaatgtaaacgtcatgaagacagggattgttgcccgtttccttcactgctgtgcccccagtgcctgtggtaacaccacgataaatatttgtggaatgaagacaaccggataagcggggtgactggcctctgagaggataacagttcatttgcaaagggaaggcagaatccaagtcttaatgtggaaaatgtgaaaccaagaattcgtgatttagaaataaggagataaatcctgtgttgaatgtgattacttcgagtgaagggtgtaagaagaatggtgaagtggactgttccttttcatgataagccttgactactttttgttttgttttgaaatctatgaatatgtattactatgacttttaaaaggcttttcttaacaaagagttgattcttaactgggttcgaagtttcatggattgctggtagaagcttctctggaggaggtggggttctccttgtatgtcacgtgcagttggcagcatcctgagaggttctgcggagtttggggatgacgtagctgagcagacttctgttgtattcacacctttggacctcttcaaattcagaatttgaaagtttcccaattgttgccttttatttccttaagagtggctttttattatcttttagatgggggctggtgcggagggggatatgcaaaggccatctcagcctgagattttttgaggaacctctcttgacagatcctgatgtggcctgcaatacttgacaaaccacattcttctcaattgtgtttgataagatggaggcttaatgctcctcagagccaccaagcacatgaaagataaaagctgtctagcactcgagtgctgtcttctataaaaatggctgtgtcaatagagacaaactcaacaatatttagttcagaggcaggtaatatgcatttcggggtttctcggtcaataacattgtgatattctgtataagaa

SEQ ID NO: 135042 - DNA, 1168 bp, Homo sapiens
tcagccacaaaccgtgccttcttctttctcctagagaaatctgacagaatattttgtggctgtggatgttaacaacatgttgcatctgtacgccagtatgctgtacgaacgccggatactcatcatttgcagcaaactcagcactgtgagtagacagtcttaagactggctttttaatgatctaattttaattgaaagatacaccagcaagatgaaagaaaattttagaaaaaggagtcagctacagtccccttatatggcagcatgtcattttcattaattgttcatttttttttttttacagtgccaatgcacatttcatttattcctgtagtcgcacagtcaattataaatagctttccatttgattgtgtgttatgaacattttgcaggtttctacatgagcttcaattgtcattttttaatgtctacaccatatttcatgatacgggtgtgtcattatttactaaatccttctcttgatggccatttaggttgttcattatgatttaatccttttagtagataatactgcaatgaacatcttttggcttcttttgactgttacagttatattctaaggagtgggacactaggtcaaagggcttgataagcgctatgacttagggactgccaaattgctttgcaaacaggcggtgcttgtttacagtgaaggctgccagctgtagatgagtgcaccattttcaccgcagctttgccaggaaagagagagagtgtgtgtgtgcgcgcatgtgcgcacgtgtgtacgtgcatgtgctcaggtgttttaattctgctaagaaagtagatgtgctatggtatttcaggcttgctttaattttagaattacctctttggttagaggtaactgaatattttccatgggtttatttttttatttgtattttgttaatatcctttcacatttattttataggtgtcttgatttttttattaattataatgaactttctatataacttttgctgtgtgtataatataaatatttttatattccttttattttagtttttcacttgctaagtatgagttcacattttccccaatattttttatgaaaattcttaagccattatagaaagctgaaataattttacagtgaatgctgatatacttccatctaaattctactagtgacattgtatca

SEQ ID NO: 135043 - DNA, 2806 bp, Homo sapiens
tgtgttgattgcctgattataggagatagaaatgagaggatgaggatttagtctgcaggagaagcaaagtgctgggagagtggcttatcttgtgtcttttatcagcagaagctcataacgtgttctggctgtagtcttgactgaggacagcctgccgcggaagtcctcccttctatcctctgatcttacccatcggagaaatatgcttggcctggctgtgaaatgaacacatgcttctgtgtacagccctcaccccagttacctgataaaccactaatttatttacatttttaatacatgtagccacagctaccatgaaaagtcacccctccctccctccgccattcccagttacttaccggtctttgtgtagcttccagtggcagttctttttctgcgggttcttcaccattactgagtaatcaattgcttcatctggctcagagccaggttttctggagtcacatgctacgttcttcctaatgtcccacctggtccatcttctgggctggtgcattcctcactgcactgttctcgcctgagtgagggaccagcaccctcagccattgcttcctccgtgcaccgagcttgctgtcatcaaactgctggatgatgggagaagcagcttcacctaacaggaccccgtctcgtggcaaaaacatacttaaaactgagttactgtaagatggggacaatggaagcatacaggagaacttgacaaatgaattgaggaagtctcccgggaggaggtgacattggagctgggccttgaaaagtaagcgggtgtcctcaaggaagagtggggcattcgaggcagaggacacagcaggagtaattacaatttccaggtatttcactcaattgtctctcaggacatggcaggcctgagagagtaaggattggtgtggctgggggagggagattcctgactccatggggcgtgcttctgaactgaggcttgatgggaactgcgagtgctccctgcagctgctcctggggccccgctctgccccacaggtgctcccacggctgagcgaggttcccagggctgttggcactcccacccactcccacccgctcaggcgggtggcatcccagaaggaaagaggcaggggaggaagcagataagaaagacagcttctgtttagacacaaatatcttggtaatcagcacagatgggatgagaaataccaaaaaaagtacatgacagtttagagagaatttggctaaatgttacgtatttttaacatacctgtgtagagtttttggaacaagcacctgagtccctcagaatctgattggagatgggggacatgcctcaatcaaatggtgtttttatttcagaaatgtttccttcccatccacaaaagtatccttgtgatttttttttctcccaccaaaataaggcgcaggatttgtctctgacgctgtgtctccctatttggacggcaagctgtgtaacatatttctccccagcgtgaagcttcttggcagactcttgaggccacgttttggtggcttcagagttatctttggatctgtcaaaagtgctaatgggctttctggccttctttaagctcctcatttctattttctttttacttccatcctctcctaaaagaaaaattcatgtaattcatcagcagttaagctttttactgaaatgctcagtgaagggcctcatatttttgtttgtgaggagagctgtgccatgtcaccgtcttcagagcaaaccccacccttacatcattagctctgtgttcctccgtccagtggaggaaccaagatacactggttgactccttccgactgcctttggtgtttgctgttttgtttttcactgagtttgttaagaggcaagttggtgtggtggttagggtatgagttttggattgaggagatctagttttgaaacatggctctcccctttctagctgggtgacctttagaagtctactgagacttcctgagcctccagtttttttttttttatttctcatctatataatggagatgataatgcctgtctcaagcttgttgggaagattggaaagaacacaggaaaagcacctgttgcctgccacatacagatcactccgtgaatggggtaacggtaatttttaacagaagcattttcctttctttaggcatacttgatcttgttgcgtttctttttccaaatatgagttttacctacaattttgtgtggaataaaaagagcatggatttagagacagacccactcaggactgaatcatgtcacatccacttactgcgtgacctttgtcaaattacacaacttctctgtgccactgttttctcatcttcgtagagggataataatacttagttcaaggaacagtttgaagattaagtgacatgtttaataatagatgtgaatctttcaaacaatagatgtgcataagagggacagtgttgtgtacgggaaagcgtataggccatggagtcagatctgactttgccagttgctgacctctcccagactttatattggaaagaataacgcctcactggatttttgtgaagactgcacaattacacatccacagtgtctggtacagtggctggcacttgataggtagttagtatatagagctgttaattcacttgctctgtatttataaaggttgatggttaacttggtacttcagtcaaacaataataaattataagataagtgcccatttttactcccagcccataatattgttgaaaagcactttgtgctattttgcatgtaaaatccacctggtttacttcaatttatgggttatagatctttaat

SEQ ID NO: 135044 - DNA, 1025 bp, Homo sapiens
tatgaaaccaacgcctttttcatgtgtttagccatttaacttctttgaactatttatgtatttatttagagacagagtttcattcttgtcgcccaggctggagtgcagtggcacaatctcagctcactgcaacctccacctcccgggttcaaacgattctcctgctttagcttcccgagtgtctgggattacaggtgcccgccaccacacctggctaatttttttgtattttcagtataaacggggtttcaccatgttggccaggctggtctcgaactcctgacctcatgtgatctacctgccttggcctcccgaaatgctgagattacaggtgtgagccaacactcctggcctgaactcttcatttatatctcctaaagaagttctcctctcatagaaaagaactccatctaccaaagtgatgatttaatgcatctggttcaatctgacattatccaaagaaaatattccatgggtgtttcttctgagtgaaaccgtttccttttctgagtaaggaaatattttccaatcatttacctgaattctgagtaatgcaattgttacacattttagcagaaataaatcacttttgcttttcttttctagcattcttattttactgtgcctgataccagagaacttcccagcatacctgagaatgtaagtacttgggaagaagaaaaaattaaatttttattcttctctgttttctgcctatttgtttgaataaataaaggatgtgatttaaaagtatcattataaaaattatggtttttaaaaaacacattataaaaacaaaagtataagaactgaagtgtattataaaaacaaaaacaaatagagaatatttgcaaagtatagaaagtataaagacaaggaaggatttttattcctttttctcaaaggtaattatgtattaatatgatatttgattccctctttttagaatgtatttttacatagttaaatcacctattataaaaacatcttttccattttcattcatatgacttatttttgtcaac

SEQ ID NO: 135045 - DNA, 1113 bp, Homo sapiens
ttatctagaaaaagtataaaaaagtataaatttacctcaacaaactctgtctcttaattccaacaatgcagtaattcttagaaagaataatgcatcaagtattgtggggagaggaggttataatttttctgacttaataacagttcatagttgactttcacagcataatcataaaaggagtcatttttttccaaaagtatttgaggacttcagtttcccgaaggtctcttttatcctttcatattgaaatcattttcttttgatgtgactgttgtgttactatccttgtttttcttgatttttctcttcatgtcttgttaagtggtctaatacagccaggtcttcatttgtcagtgactttgcctcaactctgtgcaggtatccagcatgtccaacatgggcttcataaaatccagtctcctttgcaagagttgtagttttagttcatggcaaatttgcattttattatagatgtttggctgagatacagacagaggagcagggatagatgctaggtgaaacttgaaagggtggataggggacgtattgtctggaaactggaagggtggagaagggtcatgttgtttgaagcagtcacattgttggtgagtattttcctcttataagagcttctgttttcctgcccattctggttgaccacatggtatgaggaatttctgtagaattctggaggagcctctgacccagacaccaggaatcaaagagagattcccaaagctgagattgccaagggggacaggaagcgtgttctggattggtggctgtcatgtccatcaggtacattagcaggtggtgtatatcttttcatagaggaggaaactgagttttgggaagaccgctttctcgaggtgtcacatctagaaaggagcagaactaagattcaaactcggggttaccagactcaagccagtgttctccccagcatgtgccatgctgctctgctttttaacattggggaggaggtttttttgttttgttctgttttgttttaataggaaggctttaaatattgagtgctgaatggtcttaaccaagggatgctttgccattggaaacacgttggcaaaatctgctgacagaaagaaagggata

SEQ ID NO: 135046 - DNA, 1046 bp, Homo sapiens
ctccctccctccctccctcctttccttcttccctccttttcttccctccctccttccctcctttccctttcccttttcttttttggtacagactcttgctgtgtcactcaggctggagtacagtggcgcgatcttggctcactggaacctccaactcttggactcaagccatcttcccacctcagcctcctgagtagctgaggcatacaggattacagtgactacaggcaggcgccaccacacccagctaacttttgtatttttttgtagagacagggtttccccatgttgcccaggctggtcttgaattcctgggctcaagtgacccacccgccttggcttctgaaagtgctgggtttataggcgtgagccaccacacctggccattcttttcaaccactattattttatggacattttcccatatgattaaaaataatctaaaatataattttctgttgcctggatttgctgtaatctctctagccattctcttagcacatgtttagagaagtgtgtgtgtgcatgtgtgtgttgtgctgttataagtaataaaagaactatcatttaaaatatattaccaaaaaaattgtcacaatatttaaggccggtaaaaacatagtaaaaatgattcatgcgtacatttttctgcccttcgttttaattttctactttttgtagtaactcattaaaaggcaactttcctgcattcattcaatcctatatgagtttatgaatttacatcagaggccaggtgcagtggctcacacctttaatctcagtactttgggaggccaaggcaggtggatcacttgaggtcaaaagttcgagaccagcctggccaatatgatgaaaccccgtctttactaaaaatacacaatttagccgggcatggtggcatgcacctgtaatcccagctacttgggaggctgaggtgggaggatcgcttgaagctggaaggtggaggttgcagtgagccgagatcacgccactgcactccagcctaggcaacagagcaagactctgtctcggaaaaaacaaaaaag

SEQ ID NO: 135047 - DNA, 1101 bp, Homo sapiens
aatgaacaggagcacaaagaggttaaataatttacccaagggacagagctagagtaagaacactggtgatctggttccagagcccagacttccaaaagtgtttaatgaatatgtaaatatgtattgaatgaatgaatgtgttgttggaaagttgaggtaactcctgtctaaacttctgttttcttgatgaagtaggtggtaagatcagatactgagggtgaggaagagagagtatgaagattaaagatttgagtagatatggaatagtcatgtaggccaactagtggaaaaggctggacagtgttgaagacttagttgatgttgtagattttataaatgtagaattcctagaggtataatatgtttgtgtggaatttttccctagctatgcatattagcctaatggaggcacagagaaggtaaatagttgcattcattcaagaataaggcatttccatgcatcagggatgaaaggaaaagagacacatgcctttatggtctggatatgatggaccatagaactgagctggataagccagtggtgaagaaaggagagtctcatacttgaggaaaatgaagagaccattagtgataagggttaagaacaggtagaaaaggagccgtaagatgaatgaacaccaaggataagaaactagtttcagatttgggaagtcttaattagtgattttagaggcagggcgggtttggtaatgggaaggttaaggggagactaaagaatgtggctgggatacagtaaagaaggaggtcagaatgatgaggtcattgaagcccctgagagccagggtgttgaatgactgcccccatcaactgtgcacatggtagttatgctttaggtttgcagtaggtaggatgtcacagtagcagtggacttgaaagacattgctttgttgaatttatatatatatatatatatatatatacatatatacatatatatatatatatattttttaatttattattattttgagatggagcctccttctgtcctccaggctggagtgcagtggcgtgatcttggctcactgcaacatctgcctcctgggttcaagctattctcctgcctcagcctctctgagt

SEQ ID NO: 135048 - DNA, 1031 bp, Homo sapiens
tcccagctactcagtaggctgagttgagaggatcactggagtcaaggctgcagtgagcggaggttgtaccaccacactccatgctgggccatgggagtgatatcctgtctcaaaaacaaaaaaacaaaaagcaacaataaaaaacagatccagtgcctatagcattaatttctctgagctctagacatatagttgatgatcctggagtctgagtactttaggttagatttagtttagttgctgcttaacagctgcaaactagctctaggtagtttgctaaataactttactcactcattcattaatgaagcctgtgttaagtgtctcctttgttcagtcattgatgtgggtgaatgaatgaagaaaggaagttttatatgagtcagtgaatgaatgagagttgtactttctgtcttcaggcagctcacagtctctgataagatgatctgaccaaggctctttttatgtgagtgaattttagaacctcgtgccagtgggatatactgccaacccagagtctataaatcacagttattttttgcaagaattgagtattctcatttgtcttgctaatccagaaaagttaagttgtaaacaaaacatttattttttattattattattattttttttggagacagagtctctgtcacccaggctgaagtgcagtggcgcgatcttggctcactgcaacctccacctcccaggttcaagcaattctccctctctcagcctcctaagtagctgggattacaggtgcccgccaccatgcctggctaatttttttattttttagtagagatggggtttcgccatgttggccaggctggtctcgaactcctgacctcaggtgatttgcctgcctcagcctcccaaagtgctgggattacaggcatgagccactgtgcctggacgtaaacaaaacatattttagaagttactgaaaaataatttttaagaagccaatgaaacctgactgtggagaaatatattcctagcaaccaacctgtggactcagagaaagaacctag

SEQ ID NO: 135049 - DNA, 1145 bp, Homo sapiens
ggaactgtctccaaaaaaatgtttatgtgggtttccttaaaaagttctatagacattataggttttcacagaaccccttctgtggtctctggatcataggctaaaaatccatatttaagatcttttcttcacttgctgtttttttcaccattattaagaattacccaagtactgtatacctcttctatgataccagggagcaaatttcacactacctattgtgggtgcttgtgtgtgagcaactggtaaaagccagaggctcctccctctattctcttcattcattttttaatgctctgtgctgtgtactggggattcagctgtgaataaagcactatccctgtcctcaaggacttcatggtctggtgcatttcggaaatggtcatttttggaatggctaaagtatgttcgtgtgatagggagaggcagcatggagtgtggtggaagaatctggattcatagtcaggcttggattcaatgtgagacacgttattattgaattatctgaggggcttttgtgtcaagggaataatgatgctaatgcctaccttacatcctttacaaatgagagcttttcttcgtaaaaatgacttcttctgaaaatgaaatacatgtaaagtcctgagaagaacacttgttgcagactaggccattaataaaggttgcccattattaaaaattaacacattttattcaacaaatatttgagagggaaatcaatgctgtgagtcaggtcccattaatagagatggatgtataaagtcgtatcatagtgcaacacaaactttgatatttaaggtctgcattcactaatgcccagtaagattttactaaaaactggtttaagtcgtgagtagaaattatattaggttgtgcagtttttcttacttactaaaagctgaacgtgtttttcttttgttgtttgttgtttacctgttagaatttagtttataaggggccacgtaggtatttcctcaggaagatatcttcctcaagatttccatggcataatttgtgacagaattaagttatgccacctttgaagtcggtcacagcccgaaagcacaagaagttgtttacaaaggaacccatcgattctccttctttctctggaagcatccgagcagtgaggcccgtacagtctg

SEQ ID NO: 135050 - DNA, 2208 bp, Homo sapiens
tacctttagccttgataaagacaaaactgctattggtgtgtatagttactataaggatttttagttctcattagaactacttatccagctatgagtacattggtagagaaggtgcagtctaactagctagcttcagtgatttttcttttttctttttttggagacagggccttactctgtcacccaggatggagtgcagtggcagtggcacaatctcggctcactgcaacctctgcctcccaggttcaagcaattctcccaccacagcctcccgagtagctgggactacaggtgtacaccatcatgcccggctaatttttgtatttttggaagagacagggtttcaccatgttggccaggctggtcttgaactcctgacttcaagtgatccacccatcttggcctcccaaagtgctgggattataggtgtgagccaccacgcccagccaagcttcagtatttttttctaaaaggtgactgttgttttgggaattcagaattcttgattaacaataaaaacttttaaaaaaggaaacatctcaccacttactgttttgttactcatgagaggacaatttctagaatatcaggcaaatactgagtgtggtatgtgtcacggacgacctgaggaaatcatgatgctggcttttttgactaggacttcagagatcatgggagcatcgggaagtctctgcaagtgagtgcagagagtgtgagctgtggagtcagaggggtttgcatttgcttaccagctcttgcccacttatgatcttcttacctaacatcttgcaacttatttttgtcatctttgacattcagagataaggactcacctcaaagggttgcgagagagagagagtgtacaaattattcagcagagtgtctgatatatagtggggactccatgaactcgttccttcctggatgagctggtttagaacatctagaaatggtcatagtggaaataggggtattttaatttttatcacctggttaatattgggaagttcactgagcctttagatagatgtgccctttgatatcttccttgattttcttggggggagaaaagcttagaatataaactcagaaggttcaaatcccatctcctcttttcccagcaacatctccatgagcatctccaacttttctggcttctccttctccatctacgtaatgagagcaatcataagtccttggaggattgtagcgaggatcaaatcataacgtatgatgctgcctggtagtagtaactggttcctacacaagttttacctagtgacaacttgaaagctaacacggctttttttaaaaaataaaaaaaattattttcccaagccctctcttgggatgtgctcatgtgagaggatgaggcagaaacttgctgtaatacacacccatcatatgtctagaaccaagtgccctgaacattcacgtgcattctctcctccactcttcacagcagtcccgcagaggaagaattatcctcgtcttacagaagaggaaaaggaaccttagagaatcattattagctgatattgtcagtatttgaacctagctctgtttgactctgaagtccatgttcctcccattcttttgtcttgcccccatcccaaacttggtgccttatttgacttaggctaaggaaacgtgtattgttatttggtgtctgtaggtgtcctatactccactgcagacactgaggatgcagtgatccccgagacatgcactttccccactttcacatggcccaggatctgaaggcagacatataattaaacaattagttgcaatattgaactctgataaagaaagttaaattattatgtaaatgagtagtcatctgtgtattttaaacaggcaatttcctctgaataggtgacttctgttggtttcagggtatcacataatcttaaagtagttctccttttggggtgaatgtaacatcctgtatttccataacttatcttgctaaaatatgaataaaaacttaataatgactctgcctctacataaaaaaataaaaatgttacctgggcttggtggcagacatctgtagtctcagctacttgggagactgaggtgggaggatcacttgagtccaggagttcgaggctacagtgaactatgaactatgtgcctctctgtactctagcctgggcagcagagtgagactgtcttgaaaagaagcaaacaagaggcctggca

SEQ ID NO: 135051 - DNA, 1020 bp, Homo sapiens
atgatcagttctgtttaaatccgatgcaaggtatgtttgaatggaaaaccagtgaaatagagcctgtcttttgaaaggatctcagaattcgacatgagggaccctttttgggagatgaaaaagcattctacaggagaggctcctcggtgctttttgattgagtttgagtgtcaacaatttttcttggacctccctgcaagccagccactttccttcaacagcaataagcagaaggcatttatctgagcctgatctttgcttttcactgggtgggaggtagaaaagaaaatggctcaaaatacacctcactcctaaaattgccctttgcttctaagctacactcttaagagcaagatggatttgtgaatacaggagtctgaatttaagttgtctggccctttcagggatcagttttagaagcagtaggaagcctaacattctctccatcatggagaggccccataagactgcaataataggtacttctttacagaaaaatcgtagtaccatgattgaagtttgaagaagtttgaagactctacaattctagcaatcaattatgagccacttatttttaggatgttattttttaagattataaagatacactttctcattagagaaatttagaaaactgcagaaaagaaaagaaatctctcatcccaccatgctgataatgactaagggtgtttccttccctgaattgggatggtgctgtaggtataactttgtatctagctttttcacttattaaattgtaaccatctttacatgtcattaaatattctttcctgagagtgtttttaactacataatttatttgtgtgagattgatttataatacaaggaaagaagctcttagtaatgtgaaagaatatttcttgctaaggcttatcttctttttaaaaatgcatttgctataatgttgtcattcagctaactacttggtatttttttaaaagaaacactcaacttttttttttatcttaacatgtgagctattacctgattcttgacaat

SEQ ID NO: 135052 - DNA, 1034 bp, Homo sapiens
aactttctgaacttggtagtacaaaatgaaaaaaaaaagtatttcttgtcatttaccaaatataaaatctaatgtgcttctaggtgcactgttcatggaccacctctgattttgatatccatctcccactgcacttctgctaccctcactcttttaggaactgctcaatctttggggtgggaaaatgtaaacaagtaatgaaaacataatgcgatcagtgttgttttaagaaaacatatttatgtgtaaggttcttcaaagtcacagattagacagtgcccatctctaacttgagaataagggaaagtgttgctgatgagttccagttaaactgagtcttgcagaatgagtgggggcttggctggaggaaaatgggagaacagctctctaggcagtgagaactgatacacaaagtccccaagaaatgaaaggtatagcaagatgaaaggatgctgagaatgcagtgagggagcaatagcaagagatgataccatcgaagtctggggtccaattgtgagtgcttctggggcgtgctcaagattttagatttatccggtagcaaatggaatactgtcagctggtttcgggtagacattagagatgatgatgtttttagaccaaggcaaaagtgattttttgaatgtgaaatgtgcttgggtttttctggttattgtttgaagggatgttgcgtgtcactttggaggtagcacccagatttagactggatttttcaaacctcaactgcagggggtttttttgttttcttttaaaaacaaggatagtgattatcccttcttccatgctagttggcatatggacttgattctaaacctgagtggtgttcagtgacaaccttcttccttctggagcactttctgatctcaagactggaatgaccattgcatccattctcagctgtgttacattcattttcactcgaaacacagaaaagctccatttccacggagcaaaaaagaagctagaagtaataaaggagtctggctttaagaactttggctttccttgctgactgt

SEQ ID NO: 135053 - DNA, 1398 bp, Homo sapiens
gttagaactatggagaaaaattcggtgggttaattcattcatttgtgtgtcagttcttaattgaattcctactattagctagtcactgtccttgagtagttcccagactagctggggagatggatgatcacaatacagtatgctgtatctaatacacagaatgatcccaaggcatagtgtcgtcttgctgttgcttttctagtgccagaggatagtgactgtggctaaaaataaaagagtcctagatgaattgtggaacatgaattttatgagtatttaatatgagggtagagaagctatcttttccagcttgtgtggaaataaagggcacacccactgacactttccctctgttgggtttgggaacattgctaggctgagactagcatgtaaatggaagggtttactgttaaagctggatgactggttgacggtgtatccactggggagtggagaggtctgccaagagaatgagagctcagtttgggtctaggttacattgttgtattgtcctcttctgctgctcagtctccttgcttcctttagatactttctctttagttaacctgtgccttgaggtccaatcacccttcacagtgtgcccagggctgtggctcaagtctgctcataaactacctctacttttgctttccatttcttctcaagggatgtagctctcagttatggcatctgtgcagacgtagcccctgtggttccaggatttagcttcacttcctccttgtctgacattccaaacttctatgctttctggtccatgtgaaccactcaacagtctctgctttcacatgtttacccatcctcccagactcagcctaggcacctctgcagagtagccttccccatgtagaggtaatcattccctctctggcacacccagcgtgctttgcattctttagttacacactcataaccttggtcctcctttgttttcctcctattggaaggtcaactcttcaggggtaaaggctggatcttaattaactatgcatgcatctccagcagttagtgtagtgcttatccaagatattgtgtgcattgggatcagagacagggaaatgcatcaagaatgggagggcagggcaccaaagactttgaatgagaggacaggtgtcatgggacgtaaattcagagaggaaataagaaatagttgttggaagaagtgtagttcacattaccaaactcatttcatgctagttgtaagagatgcaccttttaatctcacaatggaggttcaatattgagtgatagacattttgtccatgaagggttaagccatctgtattttaaaatttaaacttaatttcacaatgaaaggtttttagacaccctttgtgcaacataacctacttattaggttcctttttattttctgttcct

SEQ ID NO: 135054 - DNA, 1067 bp, Homo sapiens
aaatatctgatgcctttttgttgttgttagaaatatgtttttcttccagaatccttctctccaaattatgttcccctaatcatgttccttttttttttcttttttacaaaaggatttgaggacagaaatgtttctttttgaatatttcattccttaccatgtacaatagttctttcttacattgtattatattacataccctatgggtgttgataacttttattgataccaaaaaatcattttatgtggggactatatattttctttctgttcccccacctctaaccttggtatactttaatacagaagagataataataatgaataaagttcatttgtaagaaatataaaggtttcaatgtcttaatttttttattagtttgcagttagcactgtcaaatggatatccccagattctgaggcccataaagtcccctagatgggtttatgatattgtttgacttagaaaatatgccagcctgggagacaagtaatgccccaggtgattgcgttcaaaaaagaaagcttcctgatcttttcagtatctgtgcttttctaccccaaggaacagtcataaaactttctgacatttctagtctatatcaagaggtggattttcacagtcatcatcaaatcacccgttaacattgacatcttgctgtctcgtgtgttgttttaagatttttctttttcaaactaggacttaggaaaaataataaagccagtagcttttcaaaagaatgtgcttcctcatatattatctcattttatcctcctatcataagagataagagcaggtgccattatcttcatttgaacaaaattctaagctgcagagaaattgggacttgcccaaggttctctgagcacaacctagatttccatctcccagacaaatacgtttcagtagaccaccttgcagggaagaccagtcaccaaatatatagagaagaaggaaaggaaggaaacgaggtttgatttccttatcgattctagtcaaagtgctggatgctgccacatcactgtctcatttattcttcctagaagctctaggagatagatggtgg

SEQ ID NO: 135055 - DNA, 1027 bp, Homo sapiens
tcttcgagattttgcttccagataggattctataatggataatattatacatttaaaactttactgggttcttaggctcagtatcaacagaatgtaatctaatttctccagattggagtaaattcgggccttctgaccggatgagaattagaattggatgaagtgaatccaaagtagactgaaatgaatcttgagttcatttctgaatttcatttgcaagtgtatccagcgttaggtgtgttaatttcatattttggttcatactctgaggcttggtgtctcttgtgggcagagctttgtagatgttacttttctattacactatgcaatctgctgcttcatgtatgcataactgaaagatttgtgcaactgcctctctaacacacttcctccctgccccctctgctcttatttcttcctacatgaagtatcatatattttgttaggaagaaaaacccttttggaaattgcctatttcataaattgtctggtgacacaaaggggttgaatgctgtattcttgtctcatttattttgaaaactttgctactgaactcaccttaatcaatgagctcagtgttgtctccaataagttatgtgttggatatattgattgggagggattttagaaaacccgtctggggtttataatgtcagcagtgttttgattatgaaaagagttggaaccaggggacatggaaccaggtggcgaatgtcctaaagccagtggtgacatggtggactggtttcctcctgggatctagttcatgccctgcactttaactgtggtgactggctactatagattcacttttttgctcattaaaatgttaaaaaatcaaactgtacataaaaagatttgtgaaaatataaacttgggaattgatctggagagctggcacacagtcctccccaccccctgccttagcaatgaggtcatttacatttcatcagctgtgcagcatccccaagatccgatttatgtggcagtagttgaagttgcaccgaggctggttgtctaaaagagc

SEQ ID NO: 135056 - DNA, 1041 bp, Homo sapiens
tcatgaaggtgtataaagtggtttcagaggggtctctttcactgttgaaagccttcttcttctgcacttaatgtccttgataatttagatacacagtttatatgaaacatgtttatagagtatgatgaatttattatatttatctttgaattacaacattaatactgcatattaggtattacatataaaattgcataattataacatgtatatgactcaattaactgaagtttataaaaagtaaactaggggtaaatattgaaatgtaccaaagaaaggaagcagactctgtagcatttgagcagcatgttagaaatttgacccggcttttatgtttgggtgttgaaaggcctttctgtaaaaccccttattccaggcttctttttcccactgaaaaaaaataaaaatttggttgtaattatactatggatcttagatttaatttgacacttatagtgaaggagaaaaattttatttcctgtgttcacatttaggaaacttctgatcaacattcttgaacttggtgctaattaagcttccaggaacaactgctttacccttcttaatcataagcatttaaaacctttgtgagctttcactggaagcccctggttttaacttgaaatggcttaaggtagaaattttgttagcttttttgtatgtttggattttgtgtgtgttctgtttttaactttcaacttgagttttaagatcgtcaatcaggcttttctttcaagtcagtggcactgcttgcaattgcaggacttagagggtcagcatttcccttatggtattaaaaaaaattaaacatagggagtattttaggaatttgagctccactgatcttttcatcacacacctacattttgaaatgaacaaataaattagatataagaaacccaggaaatgttctcccatggtttcccttccccttcctctttcactgtcgtttttggacaaaggtaaattatcaactgctatatcggctttcagcaagccacaaagaggctaattgtggctttacatattttaaaatacatt

SEQ ID NO: 135057 - DNA, 1030 bp, Homo sapiens
tgtattggtttagaggtttaagttgtcattaaggcacaaactagagccacttctctgacacagtttttatcacatctgctaggcttgtgtcccaagaggagacgtggagagcagcgaattcagcatgggcccattatcgactgctttttcgtgtgttgtaaaaggagtgagacctcagggaggcttggagcctcctcccgtgtaatgtccaagtcagatttgaaggactggtggcaggaaagctttggccttggggtgtgaattctaagaaatagaggcacaattaagtttaaaaaattcaaggactttgagcttgataatgaaagatttttctctagactaatgtgagcagaaaagttgcccatctgtgcacatttttgtgtgcatttaaaatatttaaaagctgacagcttttaatatgcttacaaaatagtatttctatcagtgctcttttttttttccccttttcttttaaaatagtatcttcctaagggcaagttgcctcttcaatgaaatcatgtttgcagttttactgttgggacccctattcctttggtatgttctgacttgtgtcccctcctccccccttcctttcagaaatattgataacataaatgtgcagataacaggaatttaaatgcttaaggaaatgagcaagagaaactattttagagtaatcatattaagtccaaggaattaccactgaattctgattagccactgaatgctaattgtaagagatcataaccaaatcatttgttcatcttggaagtacagtatttgaagcatgtgtgaagaattttattggcatttcatgctgaccttataaatatagctctcattttcaaccactttgtgtaagatttaaaattaataaaaggaatcttggaatagaggatgttatataatatcatgattatggaacaactttgttttagctaagtttgagaaagaggaggatgcaaaaggataaagttaattttgttaaaaagttttaaaaataagatggagtatttttgcttcagacttc

SEQ ID NO: 135058 - DNA, 1048 bp, Homo sapiens
aggctgaggtgagaggactgcttgagcccaggaggcagagattgcagtgagccaagattgcaccacttccctccagcatgggcaacacagtgagaccctgttttgttttgtattttacaaaacagaacaaaaaagaataggaacccggagctggagaggtagttcagaagtgaacacttgaatttgagagtcatttaccttgtgctgttaattgaaactaaggtataggtaaactgctaatagaggaggacgcagagagagaaggagaaagataaagtcctggaaaggagttgagaaggggcccagaaatagagcagtgagagaggcaggaggaggcccttctgtagtcttcatctaatggaacgtcattggacaagcaatgtgttttgagtgagtggggagtagagcaccagaaaaggctttctgctctttcaatattgctttaaaaatattctaagccaaacaaaccccaaattgaagagctctccattatccatagagcatgaattcatttatctgtcaagaaaacccatggaccttacctatagaaatgaactatattgatctaagaattgtctctatgaagagtccatgccacaaaacagttgtgagttttggatggtggaaacatgttttatttttaattatttatactttaaacatttttttaaaaatagcatatttgtatgcggtaggcatttggtcatttggcaacaatcacatttgaatcgttgaattaccagagaaccaacatgactggcattggcattttaccttttaggatttctgaatttgggtttttgggtgttggtgagtttgtttgggttatgcggtgtggccaggctccttaacactctagatcgggtttggcagactatagcctgaagccagctggtcacatcctgcccggggctggattttgtatggcctatgaggtaagaaggttttttacccttgttaaggattgttaaaaaaacaaacaagaacatgtgacagagaccataagtggcccgcaaagcctaaaatatttacaatctggcccttttga

SEQ ID NO: 135059 - DNA, 1058 bp, Homo sapiens
ctcctgacctcaggtgatccacccaccttggcctcccaaagtgctgggattataggcatgagtcaccgtgctcggcctttttttaaataaaatgtttaactcaaagaaaagttaggaggcaaatatccccatgttatatgagatttgacttttgatatgacactttgggcaaagactacattttttggcttcatctttttcatctgtaaaatgaaaaagtattaataatactaactttgtagaattggcaggaaaagtagccataatgtttacataatacctgaattcatctagtttaataaatgttttctgatgtagtatgaggaagaagaagtttgatgcttctgtgtaattgatgatgtctgatattgtatctacatcccagaatgtagacaagtccttcctgtagataaagagcctgaagtccagtgataaaacctcactattttagcaccactctccagtttctcatcacaaggcagatgaaacaactgtttattattttattgccctccagacaagccatggtttcccctctaagattctggtggccatagcatccaatccaggatacttttgagactgaaagggagcactgtgactacacagaaatcgtgggcataactgggatgtcctgggcaaactggcaggtgaggttaccctaccctaaggcccttcaacagaacagcacaaacatttcactctattcctgcaagttggaagtgaggttggagaaaggctttatctgcattcaacatggagggctagtactgcacaaaatcttagctgtgtgaatgcctgtgaccctggagacagaatgctaatcaagattctcaatctccatcctttagtagagaggtaggcaagttacttcaccagtctacctgaaactaatttaacttagttttcaaggtgcattccatcgataggaggataatatctgcataaaattagtggtaggatcactgggtatgtaacacttctagcaagacctgacacatagtagttgctttatcagtccctttccacttgttacttaaccccctcacccacagccg

SEQ ID NO: 135060 - DNA, 2624 bp, Homo sapiens
ctgtcaattatttacagatcctgaggtgcagaggcaattcccggaggactacagtgaccaggttcggaatgcgtaattaattttttacatgacaaaatttatttcagagttgttcaacatattattactgttctttttactgaaagagataaatgaatttttagaagggaagaaaagcagtaattaggaaccaaagacaaaaagtaaaacgtattgaagtaggactgaaaatattggtgctagatttggggtgtttccttcagggagaaaatgaacacaaaataaggaagaaaacctatcacaaattttactcttcactttgaggtttgctacagtctacacttcattaggaaatcctttttgcattgcctgtgaactttttaaaaaaatgctatttcaggagtcaagaagcagtgtaacaaaaaagagggaagagggaagtttataacatttcctggaatttgaaatagatgatgaaattatgtgttatggtagtattggaaggagaagatgcacgtgcagaaatggacttaagggtgagggtggtgctgatgaggatagtgagttaaggttggccagttggctctaccatcttgaattgacagcattctgcaagcatagaatggggtagaaggaacgattttactcacaagatagtgctgaagttctgatgttgctgtattttttataattagttctaggttatacattcaggattctagtttctatcttgagagatattgaagatgttttgtagcttttttggggcaccttacatttttagttcaaatatgcaatttggtatactttttaaagcagctttgaaataaaagcattcttgattacactgaataagacaactttataaaacctttcacatgtgaaataccatatacagtaaaagcatcttccttaagcacatctatttaatttttttattaaaagtctttgaatgaggataagtacaatagaatagaaatacccagtacagtgatagtaacacctttgcagtgtgtcttgttgtatagagagcaaggtatctgatacatctttatgaataaaggggacataatgtgaccaggaatagaactggataatcagtataatgagatgctttgtaatgagatcttatagtacaagaacccaagagaactggtatggtttgctttgtgtttgatctcaagacttttaaataagattttaaaaaatattaaaatcttctgactctgtctcttgcttcatcttctactaggagagttaaatttttattttatcttaaatttctatgagattgggctctttagattcaaactacgcaatccaaggattataggaccttttcattaatgaatttcctttctttagacaatatataaaggctggaaaatcttaacgtattatttagaatacacttgagtccacagattttaacaaaattattgttctaaagtcttgtgtctaggtaaataacctttgtagttccatgatctgaattctcagtgagagggaattttataggagaaacttaaaatagcatagttaccatctgggtctattccgttcaacatagtttcttactatatctgaaagtttttgaacaacatgatttcttttttagtataactttaaaaaactgcatgggtaatatgttcatgacaaaacatgtagaaactatagataaagcaaaaataaatttacaaaagaatgaaaagaaagaaaatacaaatcatcagttattatactgcacagagataaccactgtaacaatttggtgtttagctttccatgtttatttccctgagtacacatagaagtttgtgcgtttaaggagagtgtatgtgtacgtatatgcatacacatgtactattcttgcatatgtgtgtactgagagaaatataggctattatcaattccatcattgtatacagagctcagttgactgattagatattatcttatgaacgtaattctctttgctttagttaatggatggtcttacaagtatttcatatattgaagttggaattattagaattatagtaggaacctaaataataatgatagctttagttattttaaaggtgcgcatagtatagtagtatttgttttctttgttgaaatcattgacatcgttttgaaatttggagaatggtcctcatggaccagaggtagacttataagagtgcacacaactcagcctcacttagcagagatttatttatctcttccaacttgacacatacgatttccttttttttttcgcctcctataacccaagaaatgattaatgaaggatctactttgttttgtagacattatcttcaaattcccagaaatatgtttgagagttgtatctactgggaaagaaagtgagaactgtgtgttttttaatttatctttttatcatttaggttgtaatcttagttttttctccttcacatttgttaaattatcttttcctacagtaaaactattataaaggaattcttagaaatatttctattacatacaaaccttaaatgctgaatatgcacttaatctcgacaacatttctagtattaaaacatttatgatgtaatccttaaggaatatttgagataattcaccacaaagtatagcactta

SEQ ID NO: 135061 - DNA, 1030 bp, Homo sapiens
gttaaagtcctgcttcttaaagggcagaatttgtaattgtaagctttaaatatgttcaatattttgtctcttattgattgaaatatcctagagataatgattgggtaaattcagcgggcattaaatgtaatgttttctgccttgaatacctaacatgttaaaagtgaaagcagtgtagattcccgtgttaactgctacatttgcagtttctcttaaatttcctaaaagaggtcctattataggagatgatggcgtttggttagtatgcagttgttaacgtgttttgtacaaagtgaagtcggtgtattttttaatcagtttaaaaatatgtcatgccttgactctttaaatgaagtcattggtatgacagagggaaacaggaaaataatttggtaagatgtgtgtgtgtgtgtgtgtgtgtgtgtgtgtgtgtatgtacacataggagttaccaatgtacaaatgagccctcatacgtaaccacagcacttttatgaattattttgcatttctgttgtaaaagatctgtctaccacgttttctaggaactttaagcctaaggcagaactcagggtttttggagcctgtgtaaaataatttatagcacctttccagtaagtcttgcacacactcttattctattaattaaacattctgtagcaatctggtatatcttaaagatttaaaagtatgtatagtagaagactggaaaacatagactgttgagatggaagaagattagcctttcttaaaagaaaaaatgttagacatgtttgtttaggagatcagttttttcctgctgtgaagacatagctttttaagcatggtcatgttctgtgcctgagtgagattgtgcttttgggagtcctatactgtgaaatgtgtgtgttcaaatatggaaatgcttcttgtggccttcagtgaaagtgatacacacttttctgtggggacagcctctttgatggccatggtgctgtgacatcacaatgacatgatacgaaaccttgtctgagagctacctgcctctttg

SEQ ID NO: 135062 - DNA, 1091 bp, Homo sapiens
gccaggaggcgaataaactgtagcttaaagattttggaactactgacaatgtagagaaaatcagtttctgataaagttatagtgtttctaagtaagcagtagaaggcaatgggaaaattttaattgggtttataaaagtttatttcaggaacacatgtatttccaatttgaggcacacctatacatctgtagtcattgaatttatagtgcttgcttatttctccattggggttaataatataacaacaactaatatttattgtgtgcttacgacatgtcagtgtgatctttaggaagtctgtagcattcaaaggcttgttttcatttggatatttggaaattggccttttatccacttggagacacagggtgtttaatgagttcattttgttctattaattctattacactccaaatatttgttcggtatttataacagttaagacattttgtaggagacaaagttaagtaagacatggaacttggcctcataacagacctattcactatattgtatatgcttcagaagtgggcgtgccgtgttatgggatgagccctgatctagtcctggactctacccctggctctactacttcttcgtggaacctttttctgcccccttaggacaaggccagatgcccctgtgctgattaactcctagtatcacacttaccaagccccatggtacctgcttgtttaattctgtgtgttctccattagggctagactgtaaactcctggagggtgaggactgtgtcttatttatcaacagggccagccacagcagagcatttgttccacgagtgactactaattttctaactttggacaagtgataacctattgctttaactatgataaaattgatttgatagtctctatagcatagctttgtcaggaaggtaaaatcagaaaatttctctaaaatgcctgtcacagtgcctggcaaatagtgggtgttccatcaaatagtttttttatatttgaataaataagttatctcttttcaccaaatttgacacatatgatacatctatttatgaagaccatatggagtgatgtcatatttgtaatacataaagggcacagct

SEQ ID NO: 135063 - DNA, 1010 bp, Homo sapiens
caataaaggagaatacggtcagtttggaaaattacatagatcataatgtgtatcttcgggaattttcttagaaaacgtgattttaatacgctaaaactatttagttttaagtaataaagtaaatattaaattaatatttttaccccttcctttctcagctattagaacttaacttattgagaatatcattttaaacagtatttctttgcaaatgttatactgcaagtgctatataattatctttcaggctgcaaattttttgaagggggcttattagaagttatttctggtctgtagcacagtggctgtttgcagtgactgaccttctgatcatttttgagtagaatttgtttagtgtgttaaagttgtttctagtcatgtgaatttactgagacagttatatggtcagatgtgtattttgcagggggatgtcagactttacacatttgctgattagttaggaatatttcgtctgctggtcagtggttcctgctgatttaaaaacaaaaggtgcatctgtagacagtgcttagattgtataaattcagttgcattagcatctgacactgcaggagagcaaattatatcttgagcaaataactgtaaagaatacagctgtttgtgatatctttattatgaaggtactgttttatttccacccacagtttgagtaagatttaatttcccgcctaaccacatcgctttcttttctagtgagattttgtctttgtaggctgaattgtttttagttttatattttaatgaagaagattgtcagcattaggaattcctttaatttcatttgctttcagcaaacattggaattattgttaaactctcaaaactatcattcaatgaataatatctaattatcagttgtaaaaacattttattaatattgatgctattccaatgattgcatctttagctttccttgtttaagtattttttaggtagcgtcacttggacacaggaaactagagtgcatttttccattaataaagaagtgg

SEQ ID NO: 135064 - DNA, 1056 bp, Homo sapiens
actctgttggtcaggctggagtgcagtggtgtgatgtcggctcaccgcaacttccgcctcccaggtttaagcgattctcctgcctcagcctcccaagtagctgggattacaggcgcctgccaccaagcctggctaatttttgtatttttagtatagaggaggtttcaccttgttggccaggctggtctcgaattcctgacctcaggtgatccacccacctcggcctcccaaagtactgggattacaggcatgagccaccacgcccagccagcattttctatagtatatttctaaaagttgagttacctggtcaaagggttagtacacatttttaagatgtttataatgtaatacctaatcatattccagagagctgtatcctttatattccaactaggaaaacatgagaaatttaagttaacgttctgaggtctctgagggaagttttcaaaaggggactcccaaaataatttaacatgtgcattggctcattaaggttattatcttgtgagggcaatactcatttgcatgtaaaaattctaatatattaaaatgttggttgccttatcttacagttataccttgcacgtggatgattaacatttttaagtgttcagataaaagtgtctattgtttccttaaaccccccggcgtgtggaccaacacatttatcttttttaacctcctacagtgaaatcccactgaaattttacattgcctattgtaatttggtataaagatgagtcatctttcatagggctcaaagcagttctagggaaggtaataatctctgatcttgagggacaaagactgggtacaaatctttgtcccttttcacttatattttgaccatggagatcatctaggctttaaacctcaatgttaccattgggtaacattaccatcggggttaccattgaggttattatagagaggttgggtattactggaacagagtgttatttcctttttggagcccatggaattctgccaggaagtaacctgcttcctctggccttgaggagggactgcagataagagactagttagctgtct

SEQ ID NO: 135065 - DNA, 1028 bp, Homo sapiens
taataaaaccagtttaatgggtcttgaagtgaatttttaaaaatgaaatggaataaaatagcaattatcagagaaaataacatatagtaaggacaggtatagttttctgaaactttctgtgtgtgaatgtgtttatgtagtaggtgtcatatgtatcttaatgtgggcaatggttaaaaattttgaaagccaccattgtaacaaatagctcagtgtcatgtagcctttaggcaatcctgtgtttgagttagtgcagctaaatgaggatatatcccatttttaaagaaatgtaattctgcctttgctgacttagtacaaggttcagggtcctagaatcctccttagtcgtaaatgcatctacaaaagctcctgtgattactaatttccccccttctatagaggctgtatccatttctaacctgtgtattttcaaagtaatttttacttctatatgttgtataccatggccttttccactatgttgaaaagatatcttcaatattgttaatatttagtgttgggacacctgtctcatataaagtttatagtgatggtagtaacattatattgtgtttatcataaagaaattctctgatagctcaaattattgctcttattaaattttattgctttagtgactttataggctttagtattatcagtttgatagaaagccagtgctatacagatatataaaaactcagattatatatggggacatagaaagccagacccagacaaaaggaagccaaagcgtctaaggattaagacaataatagttatgattgtggtagcttggtaagtgatttcatttttcagttaattctttacatcaggttggtaaacatttgtgttactgaactatgattttcttctttaaggccagtggtcagttgaaaacctttgatgctgttgattttctcagcattaatcattgttttatactccagtctccaaggatgcataaattataatagcaacaaggggagggctggagccgggtggttgctgctgcattattgtgtcca

SEQ ID NO: 135066 - DNA, 1063 bp, Homo sapiens
aaattatttataaaaatgtatacctgtatacatttttctgtatagaaatttgttatatgcagtaacattttagtatttcctcaaatttgaaatgaatatcatgtgatattaagtcacttaaaaattctctaatatgagatatgaaaaacttagactcaaactataatatattttacttaaccacctttttggctacctttcttttggtattttattatatatcctttttatttttgtaaaaaagtatattagcttttttcttcttaaccgtatttttcccctctataatttgactgaagaaatgaacttgtgttactttttctctcatattaagccaagtctggtgaataaaatacccatagtcaagaaatttgtgtgagcttggctgcactgtgaactccctgatttccttcagtcttgttaattcatatgtgagcccaggggtattattgcccattagcctttcctcatagttattttatgaaagtgcacaattaatgtgagagtgtcgtgaaacctttggagacagtgccctggacatactgaggtaaattttgttcaaaatcaacagatagcaccctactgtaatctgctaacagcttgtttatctaattgtcaataaaatttctggttcaggaaagaatttatgttatcctgaaacttaacataccatgtccccggaaccaaggagaaataataatagtaactgccaaacacctactgtgtgtcagacaccctgctggatactttacacacagatctctcattctcaaattctgagatagcccttcttcctcattttattgagggaggttgagaaaacaacccctaaccatctcacttttgccaggcttcatagctgaagctctccccacttttatatagcatatataccatataccactttttaccatatcctcaggaagcccaaaggacctaacagaagtcagaatgtattttgatggaaagttagtgattcttttctactaatttttttctatcggagtgaacgaagtgtgtggtggaggagtgtgttttgagagtttttgcagtagaaaggtac

SEQ ID NO: 135067 - DNA, 1701 bp, Homo sapiens
agactgtttactccatgctggttatttggataacgccccacctgcctagtaacaggcggtgctgagtcttgcataaatcttggaaagaaggttagggttaatatagtgagttcttcagtaggaaaaaaaatacagcatatgtgataataataatggcgactctttgattactatttttgtaccggcactgtgctaggcccttggggacagagtgtgacaaagagggagataatataagtgagtacctttcatgtgtcagctattctgctatacattttacttacaatatttgtaaaacttataataactctgccaggtaggtggtgttatctccatgtatatatgactgattcttgtttatctcataaaaaattctaacgacctcattggagttctgttataattatcatgtttaaactttggtgcttttttttaagtttaaatagtcttttttttttgagacaaaaaaaattaatgagaagagacaaagaaacatcaaagagctttttcctctgattgctgtgttagaacttttgcctgaaaataggttacattccttctgttttcagctgaatcctcattaactttacattttaatgatgtccagggcaaattacaccatttatggtcagtaccttaaagggatgcttaaaggggacttaaaaaaattttttttgagtggtggatgtatttactccaggaatataaattgatccagaattcttgaaaaaaaaaaaaaatagacaaaaacacttgaaacatggggtcgatgttccatttctaactattataacaatttaattcaaaagaaattattttcaccttaaagtaaattaatcattaaagaacatttataatatttgggagtatgcaactggaaccagtgtcctacatttatttttgaaaatagtttcggtttctcatttacttggatttaaattcaattctactgcttagcttcagaaataattcataggtggtagatgctcaataggaataaatgaagacagcttctcccagttatgaaaaaaacaagggtgattgaaatgctaatatgttgatagacagattgtatttgcacaagaatgagggaatctgctgtaaggtggaactcttcacaggattccaaattattcaatttaaaagaacaatatgaactgtggagctgtgctttcattgtaagctttgaatgcttaattattattagatgataaattggaataaagtgtcgtgttgtgtcaaatactgtttatttccttaacaattattggataagtggattaagggaaattggcctgtctgtcgcggaaactgtaattatgagaatgccccatctaacatcatgtattttataaggtttgtactcctgttttttaaatgtgtttaattgaatcccttctgtgtgccaggcagtgggctaatgtccttgttaaggcgtttttgaatacaaggggtggaatttcactaaaactagctcaggaagggcagggatagaggtggagaggtctgttgtacagtgaaggacaggaagcaaaaccagctgggcttcatgaggaccaattggaaccggaaagtcatgcaccagggtggcttcatctctttcatcatggctttgcctctgctggcttccttcgttcaccacttatcttggtaatggttcaaagtggtctatatgatctttcaagcttggcttcccaccgt

SEQ ID NO: 135068 - DNA, 1043 bp, Homo sapiens
acctcatccaccttggtctttgacaagccctgccaggctggtccttctgtgtgggtgctctcttcactttgaattttgacaccccgtgcatggctgccatgtccttccatgttgttccctgcataatcctcctcaggatctgacaccctatcaggtggcccctgcatggaaagttccttaccctgctcaggtgctctgacacctcacaccagatcatcttttaacatggacacgcttctcaaactgcgttgacactgacaccccctgccatgcagctgttccctgtggatgactgtgtatccctgcttgggctttttctccccacactagttcactctcctctgtgggcacccttgtcacaattgggttctgacaccctatgttagattactctagacagtgtgggcgctcttctcgcactggttgcactttgagtccccatattgtgcaagccctcctatgtggatgccatccttacctactctggactactgtggctacttctcaccaagtatggacgtgtacctcgacttaaggattaaattgtcaattaggaagagaaagtaaagtctaatttcttgatcttttcctatgtttttttctcccttgttatccaattcattgccattgacttagttctggccttccttattctttcttggattactgccacttaattggttttctttatttttgagacggagttttgctcttgttgcccaggctggagtgcaatggcgcgatctcggctcaatgcaacctccgcctcccgggttcaagcgattttcctgcctcagcctcccgagtagctgggattacaggcatgtgccaccatgcctgactaattttctatttttagcagaggtggggtttctccatgttggtcaggctggtcttgaactcccgacctcaggtgatccgcctgcctcagcctcacaaagtgctgggattacaggtgtgagccgccgcacctggacacttaattggtttccttagctggagtcttatcccttccaaccccttttcttctgtcctgctgtcat

SEQ ID NO: 135069 - DNA, 1015 bp, Homo sapiens
ttccttttataaagaaaatgtcaggtttatactgttagtaagtgctaacaaaggtgcacatactgtatggtaggtggatgttcagatacagtatctagaggttcctttttgctatgcattcttcctggattggttctcaagaaccttagggctatgtttgccttctagctctgtgaactacacatgactattttagtatgttattatttttgtatggatttttttggtatgcatttttgtatgctattataatccctggcataatctttcctccttttattttccctttgtccttacaccctcggtttacatgtgtatttttaatcttttaactataagtatttttgtaagtcatttcaaattgtttatggaatgtggtggatgataaattctccaagtaagatctcagtcacacttggtttctcctattgcctacagactgatcatttctcagcttgtgtctttggccctgacttccgagtgccagacctgggtcctcagctctctgtccgtagctgtttctccatcctacatgggcatctcaaattgaatttaacctcctcccctcgaccaaccttttacccccactgccagtcacctagcaaaacaaaatggaaacgccgatcctaatcctaaactgttccttctatccacggtcttgttgaagggcatttgtacccactcacttactaatgctagaagcctgaaagtcaccctagactctcaccctacatccaattaaatctgagtattttttaaagatttaaaaaaagctttagaaagattttaaacaatatcaaagttacagaaaagttgtaattgcactgcaaataattttttcttctgcacaatttgggaataagttactgatctcaacctcgactacgtcagtcgactatgtcgactactgcaaacaaggtgattctcctgcacaaccacaatgtggtatcaaagtgaggaaattaacattgataccgtactaccatctaattctcagttttggcacttgtcccag

SEQ ID NO: 135070 - DNA, 1063 bp, Homo sapiens
taattcaacctatatatttttttcttccacttatgtgtcacagtttaacaagaacccagtgatcaatcctcagctaccagagtttttatttaaactgtctacttgtgagaaagagccagatgctgagaaaataagctaggattagaaatgtattaaaacaacccatttctggaatatggtctaaagtttgtgtgtatttagcccagttttctgtcctcgcagtaatgatcctgatactcagaatgatagaattgacttcttgaacataaagcacattttccattggtttgttaggttgtgcttaccatgaaaggaaaagtgacaaaagtatttgggaaagattttatacacagaccaaaatgaaaaatattttcatcatggccgtccaggaagtagaaaatcagctaagtgctaagtggaacattcatttcctctttctagtattttggttaacggaaatacatccccccaaaatgcccccaaaatatagttagagaaatttggtttagaggatggtttctagagtcaggtcatgtgggtcaaaattctggctcccctacttaggacatatccctgtgtaattttgggcaaattacttaatttccttccttgttttagttccctatgctgtaaaatggggataaatggggatgatgataatatctcatattatcatcacatttgaggattcagaaacacagtatttaaagaattaagcacagggcatggcacagagtttctctcagtttgaactatcatgaagaaaaacatgaaatttgttttgatccttcaaactggaaattgaggatcatcaggagtctgccctggggggacatcccctgatcctgtcctcctcattctgagccttctcattctgcacacatggtggaggggccctgggaccagtcctaaggcagttccaggcccagggccttgggaatgctgctttaggtttctttcttacctctaacagccccagcaagtccagtttaggctttaaaaaagttcttaatccctggggtggaccctggaacaagctgacctaatttctcttgtttttgct

SEQ ID NO: 135071 - DNA, 1101 bp, Homo sapiens
gagtgtgttgggggagcagggggagaactgggggagctgttcaggaccacctggatcctatagcctgagaatggggcagggtggttcctcagaggaaaatctggtgctattactggaggaagggagaacggatgctgggccgccaaaacagatgtctactgcagccatcaagaaaatgtttgattcaaaatattctttccaaaaaagcagtgagataataatgaagcttggaaacatttataactaaaatgatttaaatcaagttttaatgcttaaaaataccgatcttcaggtttcttgaaaactgccatgtaagactgatttccccaggagtctacatgcccgaggtcttattatcacacttctaaatcattaatcacctattctttgagtgttcactttagactgtgctagactctgtagagagtggaacgttcaccctataaaacaggaactagacctcatgttttaaatgcttagaagactttttttaaaaaaacctttaggaagttacattctagcttttgaacttctgttggtattatttcacaacacattttgcatttccttctttatgttacattgaaaacatgcagtccgctcaaaggctttctttagaaaaagaaagctttactgaagatatcactgtgagcttgctttgcccagcagaagactttaataagttgctcaatttaaagacagttttcttacctttaatatgttcttagacattagaattttctgctatcacgaagccttatttgaggagaagatagatgcagataaattgctgtctagattataacaatgtccttaattatctttgaataatttgtaataaaaacagtataatggccagtctgtagactttgaaatcaaacagacttaggttcagatttcttttgccactcattaattgtttgactttgggaaagctatttaaactaaattctggtttgcccattgtttaagtgggacttctatctacttggcaggttgttttgtaaattagagataatatgtactaaaatgctcagcacaggaagtggtacaaaccagcattcttgtggtgatgtaatttaacgtcacccttaaattaaa

SEQ ID NO: 135072 - DNA, 1047 bp, Homo sapiens
gtaataatgattatttctttaaactggaggtgagcctaatgagagctcattataataaaattcttgcccaccacctaatgaagtaagaaatattattctaattatataggtaagaaaaagagggctccatgagcgcagagattatgtcttgcttgcacttgtatgctttggtagctagaagagtgcctggcatacattaggccctcaagtatttaatgattaaatcttagagctaggaagcaacttgtccaaagaacagagtgacagagttgggatttgaattctagtgtgactgtattctttaaagaaatttatgaaagctatcacacaaattatataatgcatatgtatgtatacagtttaaagaataaatgaaaatgcacatatccaccactcaacttagaaaacagaacattttgtatctttgagtactccatttatgcctctctcaatttgcctttctctactgagatcacattttgaattttacgttaattgtatatccctgcttgaagcttgtgctttttatatactatggtgatgctctaaattggttatatagaatgagtttgaattgctgttcttaggaagtaacaaagtgagccatatattttcttttcttaatgcttagttatttgaagcagatcccagatttcttctttttcctaaagtgcgcaatttaggggccatctgggtataaattatgatataggggagccttagaatttttgctttattcatgacactgtggttcttcttgctgtgttagtggttcacagtattaggcctcaggccttctatggtggaccgggaattcattgatttactaaactttgaaatccttttgagcagtgagtttgttgaatttttaaaattccctccacatgccaatctcagagcctcattttctcaactctaaaatggggcactaatagtacctgttttagttgaaagattaaatgggagtgcaccatgcatgggacatggaaagttctttataaatgggagctgttattttaacttacttttgtttaaagcaagagttta

SEQ ID NO: 135073 - DNA, 2514 bp, Homo sapiens
tattggatgattaatattcagaaaagttaacctctaaatttgattcctcatcggtgatttttaaaaattgggaaactaaataaaacttatttactacaatatgctatgtctgtacttaaaacattttataaagtgatcaggtacttcaaaccatacctaaaacattacctaatgataaaaagatgtgaggtgataaagggtaaactttgaggacagttcttttttccattgattgcttttaatgtctacactagtgaagtcatgtattgtaaactgtccctcatgtgttctgtgctctgaagagcatctcatgacatctgtggaagggcatgtgatctgtcagttctacttagaaattgcattaagacccctaacactgaattggaacactttccaaagattgtacaaataaaatttgagtacacaagctgaactccatattttaggaattcataagattttctagttactagttaccagtgaataaactgtcacttaatatttgatttcaggtacctttgtcggtttctacagctttatttgtttttaatacaacttatgtttgcctttttctaatatttaatgcattatttttgccattttagatgattacaaagaatctgctttaagattagtctttgttcctaggatctgcatctctgatctgtgccaaagtatctgaaaaacttagatataaaccttacgctgtacagtactagtgtctgggcataatcttccctttgaagtttgtttgcatccccctagagggattaattccctgctgtgagaaggtgggttagaaagcactgaaactactttatgggtctttaattggaggatttagtatacattttgttctataaacttctgtgggagtttcattcttacaatttttcttatactgtggtatgttatattttcattgtaaattaaagtacatatactcaaatttttcttgttatttagtgcatactgacagattatcctggtgtgtgtgtttttttccatttgtctttaaatttttaatagcttgttttctgattagttcttgagtatgtaaaattttaaacttcttggaaaatgatgaacaagagaaaaattatcactcaataactactgttaatgtttcagtatatttacttccttattgtcttcttttgtgtgtgtgaatgtgtgtgtaaataaaatataaaaactttttttctgaactctcagctatatgtgttttcctcactctctccaattattcattaagctttccctaaaattattaatgttgatttgcagaaatcattttagttgctatgaattattacatcatgtttatgttctacatttacttataacggaatcttcaggttgtttccaaagttctcttgttataaatgatgtagtgaacatctttgtgtataatgcttgtcagtttatgtatgtaatttaaatgcttaaaaaaagtcatatcattttgaggagatctttgatctactttgttcttaatttttgtatgcttatttttttttgccacacttcattttgtgactccaattggtgtattggtttaagaacctacctttacatagggatcccagaaaatcaagacagttagctcaaattgcaaaaactctgaagtctgaattcagtctgtgcgaccaaaggtctcggaagagggtgctcttgtaagagagatcagcctgcaaggtcccatgatcagatgacactggccacacaaaaactctggaatgcatttcaaacacaagtgtctcattacagctggcatcttagcctgcagcgggcactcttcttgggcagatgcttagcactgggagactggcagcatcaggttcttcagaaatgcttggcagaccagcttcctcctgtgtctaccccacatccccctaccccaacccccagcattttcagtgcattagcccaatggccactttttaaaaagaatggggtggttaggttgagaaactgtcggggaactctgaaaggcatgcctaagacatggtgctttggttgctgagtttctcagatacgtgggtgttaagcagcaacataaaaaaaaatctttgcttagaatctcttaactaactatacacatttctatattagcagtatcatgaagaaaactgagtttttgctgacttaaaatattgagagccagatttgttattctgaagtttaactttcattttacaggactgtaaattgtggtctaggagcttcacctgaatatctgtgatcacaatggatactcaaaattattagacatttttaaaaagctgatttaaaaaacatgatgctggctgggtgtagtgtctcacgcctgtaatcctagcactttgggaggctgaggcaggtggattgctggagctcaggagtttaagaccagcctgggcaacatgatgaaaccctgtctttactaaacatacaaaaacatagctgggtatggtggtgcatgcctgtggtcctagctactcagaaggctgaggtgtgagatcacttgagtcc

SEQ ID NO: 135074 - DNA, 1034 bp, Homo sapiens
tcacttggagactaaacccttccatcctagaccatgctttgagcacccagcatctcagaacttcttgcccaaatggccttgagcttgtttctggagcctgtgtgagtctctcccctggggtctgtcctcctgggagtggactatgctactggtgtatacatccctaggtctaagggtggcctaaggatagctgtcagtggggaatagggtatgggatagagcttgcagtacaggatggagagggggctgtgggcagtgagccaatggccaatttgccctgcaccactgcttttctccatggaatgcaaaatacaaaaacacaatatgaacctggccttctagtcagttgtaaaggtatatttattatggcaggaggatagaaaatatttaatagtttgtatgcttgttttaaaacttttaaatatttaaatattcagatgtatggtctgtaggtctctatttgaacccttgcctaagccctgtaaatgttacaggtgggtttgcccagcaccccagaggcccctccctccctgccttcagaggtaactactatcctgacttttatgataatcatctctttgtttttcttcatagttttgctacataagtatacctcattgaaaaaatataattgaattgtgccgccttctgaattttatagaaatggaattattctgtatgtagctctgctgcttttttgctcaattatgtttgaaagggtcttccgtgttgtgtgtaactgcagtcatagattttcattgctgtgtagtgtactatagaattatttcagaatttagttatccattctactgttgacctttgaagttgttcgcagtttttggctactataagccatgctactgtgacctttcctacgtatgaatcctggcacatgtaaacatacatttccatatagaacatacttgattactgaatcatgccatacttttacaaaatggattgtgccagtctgtactcccacctgcagtgtttggtagtctacacttactgctctacaacttcatcagcccttg

SEQ ID NO: 135075 - DNA, 1005 bp, Homo sapiens
tacccattaagtaatttcttatccctcagcccctcccacccttctgagtctccagtgcctattattccacactctatgaccacgtgtacacatcatttagttcccacttataggtgagaacatgctgtatttgactttctatttcacttaaaagaatggcctccagttccatccatggaactgcaaaagacattatttcattcttttttatggctgagtagtattccacattttctttatccaattgcccattggtggacacttatattgattctgtatctttgctattgtaaatagtgcttctataaaaatatgaatgcagttatctttttaatatgatttattttcctttgggtatatactcggtaatgggattgctggatcgaatgaattgttttgagactattttaagagttacaaggacagtccagtgcgtatgctctttccttagatttgtcaattgttattattttgctgcatttgctttatcacccccccaatacatacacagcacatatgtgtgcatgtgagtatacacacacagaattattgctggatcatttaagagtgagttgcagacattatgacccttcacccctgcatatccaggagatattctggatatatctcctaagaataaagacatattcttatatacccctagtataatggttgaaatcagaaaatttaatattgatataatgtcagttgtccatatttaaatttaatcaattgttatatcatgtcctttacagcattttccctatgacccagaatccaatccggaatcatgcagtccatttagttttcatgtcagtttacttcctttcagcctagaataatttttacagcctttctttgtcttttttgacatgtttttgaagaatttgggtctgttgttttgtagaaagttcctggatttgtatctgtctgattggatcttcatgattagatgcaggttattggtttttggtaaaagtatctcaaaagtgttatgtatttttc

SEQ ID NO: 135076 - DNA, 1533 bp, Homo sapiens
aatgtggagaattacagttaggtgatagagtgtgtgttggggaaggtctttctgaggaggccaaatataagctgagttttcaatgccaagaaggaccacctgtgtgaagatcaatataaaggactgtaagatgggacttctctttggtgtgtttgaggagcagaaagaaggtcattgtggctggagttcagtgggcaaggggagagaggtataaaatgaagttggacaggtaggcagaggccagatcatgtaggactttgtaggcattgctaaggactgccaccttctttttctgttttgtttgtttaaattgtggtaaatttcacataagacttcccatcttaaccacgttcaagtgtacagttcaaaggtattatgtgtattcatattgtggggcaacaattgtcaatgtgcagctccaggactacaactttgacttgactttgagtggtgtggggagcttttaggagatttgagcaaagaagtgacataacctgaacttcagaataaaaggattactgtctgttaatgttgtgatctgactctatagaggggcaaggaagaaagcagggagacccatcaggagggtgctgcagtaatcgaggtgatatgatagtgatctatcaaggatggttgtatttgggggtgctgagaaacgttgagattctggatgtattttgatggtagaatcagtagaattttctgattggttgactgtggcatatgaaacgggagtcgaggatgacattaagttttgttagtctcagcaactagtagagttcaggagatgcaggtttgagggagaaaaatatgatatgttaaattagaaatgcttcttagatgcccaaatgggattttttttttttttttttgaaacaaggttttgctatgttgctcaggctggtctcaaactcctggcctcaaacaatcctcctgcgttggcctctccagtagctgggcatcccccaccatgcctggcccagtggggatgttgagtaggcagctgggtaagggagtctggagtcagggaagaagtagtcaggttggagatgtgactggggcttgtatgcatggtaatgaaagcccagagactgaatgagatcatctaagcaatgagtggagacagggacagtaggagagctaacctgagaaggaattcgcaaaggagtagccagtgaggtaggaagaggatcaacagagagcaacgtcctggaagccaagaaaagaaagacattcaaggaggagggcagatggatgaactatcaaatgctattgacaggccgagtaagatgagcactgagaattgagcatttaaatacattttagcaatgcagaggtctgtggttaccttgaccaagttgtttcagtggtgtcgtgggttcagaagcctggttggagtatgttagagaaaggaagaagcagcagaaacaatgagtatatacattaggccatttttcacttagatagcagggctgtacaaaacaccctgtggtacaggataatgtgttggtgtccccgtgttttaaagtttgg

SEQ ID NO: 135077 - DNA, 1049 bp, Homo sapiens
tacaggtatgagccaccacgcccggcctcttttgatttttatacattgcatttattcagtattttttttcctctgtagaggagagactttttcttcagttttggtaaaatgagaatttctttctgactgcacaatccatcccttgttcttaaaatccctttatttattgcctagactaatgtttctattcggatagttccctattttctggattgcttttagtgacggtatttgaaagcctaatggttttgagtctttgaaatacacagtaatatgtggattacttataaagcctattattggtaaggtgaagccattttatttttatatgatacgtgataataccctttacattagtttaacatcttttagtttacaaagcactttctcatttttctctcatttgatccctgaaacaacttttgagatgagcagggcaggtatatatcttgacagaggaggaagccgaaaggttaaatggcttgtcctaatcccataacaagtaagggatctacctgggatttgaacccaagcctcctgatgtttagtttggggttctttccatagaaccacatgtcattcctgtgagaaagtcttggtaaaaggaaggtcagagaaattggtatttaatgaatgattttaaaaaaatatttttccaggaactagaatcttatagaaaagttggcagtacagtgtaaagaacttaaaatacacacacacacacacacacacacacacacacacacacacacacacacacagtttaaagcacggtattgacctgatgcatcatcacccttgaatgtttcagtgtgcttctcctacaaacaaggttattctcccctctaacgcaatgcaaacatcaaaatcagcaagttaatggcaatttgttactacgtctaatcctaagactgcattcaggtttcactagtggtcccaataacatcctttacagcaaaagaatcacacattgcatttagttgtcatttctctttagtttcctttagtctggaagagattttcagcctttccttgattttcatgacgtt

SEQ ID NO: 135078 - DNA, 1059 bp, Homo sapiens
ttattataatttatggatatttatcagatgtatgctcacttttttactgataggaagaatgcatggaaaaaaatgggaggccactggattgtggaactgtgtaaatagtttttactgctgaagatcaaggtccagagcaaggttttggcagtgtaaagaaaaggaatgacaggccgggcgtggtggctcatgcctgtaatgccagcactttgggaggccaaggagggtggatggcttgagtccaggaagttgagaccagcatgggcaacatgatgaaactctgtctttacaaaaaaatacaacaattagccaggtgtggtggcatgtatctgtggtcccagctacttgggaggctgaggtgggaggatcacttgagctcccacagagctcaggagacggaggttgcagtgagtcaagatcacgccactgcattccagcctgggtgacagagtgagaccctgtctcaaaaagaaaaaagaaaaaaaaaaaaaaggatggctttgagagattttaagtagaaatgacaagacttggtgacaaattacacgtaagaggcaaaagaagaatcaaagatgacttgccaaggttagcagagttatgttacaaatggagtatttgtgaggtgaggactggttatatgtttgcttttctgaggaaaagtgaaaagttataattgggataaggcattttagtctgcattgagaatggaaggaatctttgagggatccatagtgaatgtgtgtgctttattgaatgagtaagacttgaagtgggctggactaaattgctgaaggcaaatctgttcatggtagatttagagagggggaaaagaaaaaccaccttttgaattcactttagccacaggaaaggtttgagggtgttgcattgatctcgcataggctgtatgaataaatggaaggaaggaaaccaatctagagaagatactgtttgactccacgctggcagttcttgaactccggggtgtgagaggagccaggggtatgtgagcattggagtactgagttcccagaactatacattctccctctgagttctaaa

SEQ ID NO: 135079 - DNA, 1025 bp, Homo sapiens
gagacgggtttctcccgtgttggtcaggctggtcttgaactcccagcctcaggtgatctgcctgccttggcctcccaaagtgctgggattacaggtgtgatgtgagccaccgtgcccagcctcatgtttattttaataaaggaacattgtcttgcctcaaatcaacatttaatggacaaaaaaagagaaggtcaccagtatgcaggtagcaccctggaaacctaaatgttacatctgtatggacatttatctagaagaataaaaggagcagtggtaactgacaatcttcaacaggtatttttaaatcttatttagtgtttgaatgatcccagtggactggaatgtggttaatatgaagcaatttaactgataatgcagacacacagcaggaaactatgtggcagtttaatattgcttgtggtgacatcctagaaattgcttccaggcaccaagtgcaggaagtgggctgtaagtaatcgaaggaagttttctaagtgagtttgaagaaacgtgacatttatggactcagagaaaagcatactctaagacttgaggcataggaacagggcagggcaactaatttggccttgtggtggtgattattctacattagcctgtatacctgtcttctgtccctgtcaaactgtgacctctgtgaggttagtgaccaagaaatttatccatttattcatccatttacctactgtagaactaagaagattaagcacatattaaacaataaatgttagccattattatcataattagtggcaatactgtgcctggcagtgtgctaagtactggggacacaaagatgaacaaatatttttctttaaggctttctaaagtagtggacacaaatgtaaaacaaaaacaatcccttccagactccctccccaccaaaacaaaacaaaacaacaaaaaaaacaaaacacaagtataatacagtataagttaattgcaatggtggagatgccgctggtgacgaataggtgagtaagtgaaggagagactgtcttctgggg

SEQ ID NO: 135080 - DNA, 2009 bp, Homo sapiens
caagcgtcagtctcctcagctattacatcgagatcatagaagtgcttgccttatagggttgtggtgaggatgaaatgagatcatccatggggcctgacatgtaatatgtggcccttcaaaagctgggagctcccatgatgttgggtatgaagtaaaccactgacatttgcagctgaggcaggatagcctagtggttaagagcataaggtttggagctggaaagttcatacctcaaaccccagcaggtaccatgttctggttctgtgacagcctccttctctctctaagactctggtagtaaaaaagatacaatacatataaggaactccagaatgaacagtggctgcgatcacagcaagcctgcccaaccagatcatccctctaatagccgttggagtaattgatttctgcttctagggcaaatgcacacagacaccatcgagtgttcttcttgaggcagagcacgtgtgctccagggcagctaaagccaaactgtctgccctgacttctcctgctggttatgtggccaatgacagcttaatggactctttacccttgaatgctaaggggaaaataactcacagcattataacatatgaatgtgatgtaggttttttttcttgagcaatgcagagagcgagccagaaacatatgtagaattgaacctcccttttcctggccctgtctgtataggagacagatttagccattgcaattacccatatcattcatggttgtaaaatatagccacatccatccgtgtgtgtgtgtgtgtatgtgtgtgtgtgtgtgtgttttcctgaatgatctgaggctaacaaaacagagtatgtagtcatcttattatgtgaggactgtgaatgcctctaaattattgattttccagggacaagccgttcctcttggaataaacggatggctgtgcacacacacacatacacacacgtgcacccacccacacacacacacacacacagactttgttgttatgaggaagctagtcaaagatctacctgtgcaacttttagaaagccatacaggcgcagtggctcacacctgtaatcccagcattctgggaggccgaggcatgtggatcacttgaggtcagaagtttgagaccagcctggccaacatggggaaaccttgtctctaccaaaaatacaaaaaaagttggccagacgtggtgacgtgtgcttgtggccccagatactcaggaggctaaggcatgagaatctcttcagcccaggaggcggaggttgcagtgagccaagattgtaccactgcactccagcctgggcaataaagggagactctgtgtcaaaaaaaaaaaaaaaaaaaaaaagacagacagaaagaaagaaagaaagaaagctgtgctgtcctgaccagatagtcagggaatctcctctgtgggaagctaaaaatgtcctcagctgcacagtctgagggaggagacagtcagtggcagccacggaggcctccttgaggctgagaggggagggtgaggcaggggacaagggcaaggggggtgtgggacactggtgagaccatagacttgagaaatcaggctggactgacctgggctcaaatccaccatcctgacttggggcaagcatcttccttatcttggagcctcagtttccccagctgtgacatgtactttgtatggtgctatgaggattgatgataaaccaggctcaggccaggcaagacgtgaggcacagtgccaggcccagggcggtgccgggtacaaagtggctcttcccctttgggaggagattcaggccaggcagaaggcttgcagcgtcccaggtcccaggcagtgccaggaatgtccgctgcagccacccagagcctcccggaataggaagtgtgtggaagcgcgcggctctccatctggttaatgttcgcttgtgtttcctgctggagagcatcacttttttcacctcacctggtttgtttacccaaacaagctgctcattaacaacacgaattgcattttctgcaat

SEQ ID NO: 135081 - DNA, 1021 bp, Homo sapiens
tcgccgtgttgcccacgctggtcttggactcctgacctcaggtgatccacccacctcggcctcccaaagtgctgggattacaggcgcgagtcactgtgcccagctgcccccccccaccagagtttttcatttattccattcaacgctaatctcaccaatcaattccttgttttgtagatggggaaataaaggcccagagcttagcacttggtccaagtcaaacacccagtccatttccaaagcagagattcaaactcagctctgcctgaatctgaagccctcacattctccatgatgccaggtcagggaggctggcagaacaggatcagcctgggacatcttccatttccaaggaagcaatcaacagggtccccatgcccagaggggtctgtgccttgctcaaggtcacagctcatcagcagcagagctggtgctagaacttgacccttaaaacatccctgagtttttcctgagctaacaggaggcctcagtgccactctagggggaggactcaaagccagggaagctcagggaagctcaggtcaccagtgtctccacctcccactgatttgatcccactcatacatctgagcattggcctcagtttccccactcaaaaggctctctagagccccttggctgagcctctcttcctgacccaccttgccagcccctctcccaagagaatggagcctgagcctggacccctagtaagagctctgccccatgtagatgtcgtggacctgggagaggaggcgtgtccagaccctgaaaactctcactgcagtgcctgttcaactgggtcaccagtgtggagtgccacatcagagaagtcctaaccgtgtctcccaaatgtagtggcattcgagaccctctctgctctcatgccccaccttcccccaacacatcttatgctccagccgtggtttttcctgtcaccaggattgagcacgtagtgctccctttgcctggggtgccctttcttcccacttgtcgaaagaactcttattcatccgccagc

SEQ ID NO: 135082 - DNA, 1018 bp, Homo sapiens
acctcagaagcttcgggggaggaagtaagtgaaataatgcatttcagatgctcagcgccttttaagtgcttgatgctcattccccaagattacatgagagacatggaaaatctttaatgaccaaggacccacccagggtcactcagccgggacccttggtccgtggcccagagtgtctccagtgcccctgcattgaggccctaaacaaggccagaagcaggtgccggggacccctctggattccaccagagcaccttcctaggatcatggctcccaaaacggaagggaaggagacagcgcagtttgcaaagaggcaggatttaagcaccagggtggccctgtggcgcctcaggaaaatgtttgcctgtcagtatctgctctcgttcccacctgtccccacaaagcgaggccataagtcctcggcgtggcattggagggtctctgaaggccctgagagctgtgtcagccacggtgtgttatgaagcaaggcagatgttttgttaattatttacacagcgtcggccccgcagaggactgcgctgacaggagcggctgtcacaggcctggccgtggggcagaagtgagcagccgtcttcccctggcagtcctcctgaaaaggtctgcatggcaaggcctgagggagtcctgcacattttatgcccccgccccccaaagccatttgggtttcccttaaactggcttgttttcctgagccggtggagagatccttgtcctccggaagtggctatcgctctggggcggcttctctgccagctcgtcacaccctagacccagctgtagtctgtgtggtgggagagggtgtcaccaggctctggaggtccactcctctgtagtcacctcatgcaaggagggcttcacaggggcccagcctctactccctcatccggaaaacgggccagtaacaccaggcaccagccccgtgatcctcaggcacccttgggggtgatctgccttagaaattcaactttaggattagaattctgctaagaggtaccat

SEQ ID NO: 135083 - DNA, 1046 bp, Homo sapiens
tactaaaaatacaaaaattagctgggcgtggtggcgtgtgcctgtaatcccagctactcaggaggctgaggcaggagaatcacttgaacccaggaggcggaggttgcagtgagccgagatggcgccactgcactccagcttgggcaatagagtgagactccgtctcaaaaaaaaaaagacaagtttgtcttgctttaaaaaaaaaaatacctctccttttacagatggcgacactgaggcccagagagacatcatgaccagcctcaggtcccacatgcagcctgctgctctgtagcctaaatcagatcactgtcccagctttcaggtcaaggctctggttgtgacacctgggcctggactgcgggtgaaaagttttgatgcaaaaacacagaccgtccattgtcctatgggctaagtggactcccttctgctaaccagagatgcttgtgctggctggtgtgtggcacgttatctcattctttcatgacgtatgtccggatggaagtcctgggtcaggcattgtgctgggagcccacacgaagaccctctaatggccccacccattggcctctcaccacctggtggggacagaggctgtcacaaccccttcttaggtgctcttgatcaatttgcaggtggcattttttgggatgtagtctctggggaagtaggagagcttccggcagtgaggggtgtttgaacccacctggagggagacgtggggtttgccagagggctgagagggctggggtgaagggcaggtagaccccaaggtggagaggcaggtggggccggtgggtgagaggtggggctgtggaacttcctcctgcttctttggcctttgctcctgtcggtagatggccttaccaggcacttactgtgggccatgttctaatctaacccttaacctgagggaactcacttcatcctcccagtgatgccgtgatgtgggtatcgttctgcccattttatagatgaggaaacagagacccagagagtccaggatctgtggtgcttgacgagcatcagcctgagtgctgtgagga

SEQ ID NO: 135084 - DNA, 1041 bp, Homo sapiens
cttatttaaaccagggccatttcatccacgtcactaacttgccggatgtctttgagtcatggtttcacctgcctgagcctcggtttcctcatcttcactcccagcactgtggaggggtgacctggttgatgacggtcatggagcccagaacccatgggtaacggggtcagcattcagaagtgtcagctccagctgcctgcccccgcctgccgggccctgtcctctgccaggcggagctcctggttctctgggtctgtaatgctttccttctcacttctcagacatcactgcttctggggagtctcctctgacctcagcacactgcttagaaacccctgcttggtgcctccatagccccttctgcatcttccccaacatggccccccaccctgtgaggcccactaatggccagtcccctgccccaggatcccctccagggctaggactgagccactttcctctgtggtcccagtgctcagcccagggcctggcctggcaaaggcctcggtgacggtaatgaggggagggagcaatgcacccttcgtttgttcctcaggcctgtggccatggggacagctgagatgctgagaccactgtgtccaaagcccaggccttttctggggacagataggtcagcgggacggatggaaccagctctgtgactcacatacccattgtgcctgctgcggtgatcctttaaacgacagttaggtttgatcctgcgggaggtgggtgtttggaaaggttttgagcaggggagtggcccccctgaagcagagtgtggcccgtggaggctggggggctgggaggcggctgtgaacttcaggagagaggagggggaacggggctgtcctggggagagtggggagaagtggggagcagcctggaacagtgccgggcacctggtgtccacagcctgagctcctacctggagacccctggatcagggagtaaagaattctgggctgcaagtcagaagaaatgctccccaggggcttcagtggctccagagtctcaggaatcatctctggatgggtgact

SEQ ID NO: 135085 - DNA, 1051 bp, Homo sapiens
ccaaggaatttgctgcatgatctgatctgatggccccagtgactctttgaaacccggccccttattggcaccacccagtcactccctggctgcgtttccctcaaggcacgtatcgctgtctgaaatgaccatgtctgttcactctcatgtctgtgtctacctcccaaccacgcaaaacctgtgggaggggaaggccttctctctcttgtccactcctgtgtccccaacccctcggacagcacatggcttcacaagcttctcaagaaatgcttggcaaatgatggcagagtgggttaaccctggtgttctcaaaaagggaatggaggcccacagagggcaggcccatccctgggtcacactgccagggcaggattggagcccctgcctgtccagggtcagctggggcctctctcactgaccagctttgagcctggaattccaggtgtgcctggctgtgtccttgcaggttcacaccgcccaaagaaacttccagtccacacttgtggctttggatcagctcagaaaaagtgtgtcctgtgactgctcgaggaatctgggcatttagcccagaaaagagtgtgtttcctggcttcctgagaactggggcccaccctgcccctggtctaggcgtgcagaacaggagggaggggagttgaaatcggggcctggaagggtacggcgtcagaccttatcatctgagtgaggcttgccgctcacgctgagactgtcccagccgagcactccaggagagggtatccccaccattggagcgtccttagagatggcagcagcgcctggagttgctggagaagaaacattcctcacgctcatgcgaatgtttccctgggctgctgtcccagcactgggtaccgtggggcagacatgggtgtgacgttttccaagcacgaggtgaccagtgtccattgggtcatcaggcctccagggccacatgtttggaaagctattcctggagcaccaggcatctggcacctcgctctgtggctaggcacgggtttatgaggggaccctgcagagagctggggtcctcagc

SEQ ID NO: 135086 - DNA, 1104 bp, Homo sapiens
gtaggtgccacggagtagtggcacgtgattttgtggctgttagtgtgagtattccttactttagagagcagaggaaaacacatcagcagattgtttaagccaaaaaatgtctgttgtttgaagaatttcgttttggaaggcaagcccaggttttgggtcagaaccgtattccctcaggcacggcacggttgaacgtcgaggcatattttacaggcttggtgaccgctcaagcctttgagccctccatgcgggtgctctgaggtcagacttttcgggaagccctcacacagctggtctgcttgtcgcgttggtagcaccgtttccacagagcaggctctgtttggctatgaatagatgtttttctcactcttttcttggatgcctgaatggcaggctcccctcctgcagtctcagaggccgacctgcatgtaaaactccaagcggacatcagagtgggttcgtctgttcctgcttggacttgaggctctcagcaaggctcaaagagctgggtcgatggccaccatgacccagggagcctcccgagagtctcccaggctatagtttctgaaggctactgagtgaactgaagaaatcagagttcatggaagaggcagcagatccgagcaacagccgagattgaggaggatggttcaggatctccaaacacaggcccgctggctccactgtgtccaagccgcagatgcaaagcctgttaggacagaaaggacacgagatagcagccagggccggccgcaggcaggagggccgggccaccagcagttaggagtgtgggttctggagccacacaaccggggttcagatcccagttttcccacctctattgggcagcatactgtaagcctcagttttccccttctgtaaaacggagataataatttacctgtctcacaaggctgttatgaggattaaagtaagttaacatcactcaagtgcatagaacgatgctgggtacatactaaataaatacagataaactgaggcccagagagggcaagggacttcgctgtggtcactcagcaagtcattggggcagccaaggctgaaactcatgactcctagtctcgtgaacggttcccccctccc

SEQ ID NO: 135087 - DNA, 1081 bp, Homo sapiens
ttttttttttttgagactgaatttcgctctgttgcccaagctggaatgcagtggtgcgatctcggctcactacaaccttcacctcccgggttcaagagattctcctgtcttgccctcccaagtagctgggagtacaggcgcgtgccaccacacccggctgattttttaaatttttagtagagatggggtttcaccatgttagccaggatggtctcgatctcctgacctcgtgatccacccgccttggcctcccaaagtgctgggattacaggcgtgagccaccacgcccggcccaagtccattcttgatagacatggtctactggctgtttctgaatacttcctgggacaggcaactaactccctgcctcctgatgggcccactcctgcaaggtcccagcagggtcaaggctcagttaatcttagttggaggtgggcaggtggctggctggatggatgggtgatggacagactgatggatgaatgaatgggggttggatggatggatggatggacgatagacaattatggatggttggacagttgggtggatgatggatggatggcaatttgcaacactagcatcttagaagaaagctccaaattgcatttggatgtttgccttttctccgtacaccagtggaaatggggtaagcagagagagcagtgaggtggcagaggaatgaggtgaagagaggaggggacggagggctggtgcccccaatctctctctgcccacgtgcccaggctttcaatataaagccaggctgagacagggatctgtcggcctgccttggagctccagcagagggaggaggtggtgacagaacaaagggacaaacctaacgtttgggtcctgctgagcagccggctctccctggccaggggaggggaccttaaaggagcccgcaaggtggcaaagggaacagcacgtgcaaaggcacagaggcgagtggaaaagcgggctggggctggggctggagtagccgctgtgggaggacccgggctgagggccaggcactccaagcccttgctttccgatggtcctggccaaggcagcgccaggccacaccccggcccca

SEQ ID NO: 135088 - DNA, 1163 bp, Homo sapiens
ccctggtaaccacattaacacaccggcgattctgttcatcctttattatgggtcaggcccggtgcagggcacctggggtcaggagaggagtcagacttgcctcatgcccctgaatcactctccactgacaggtggccaccccctccaggcccagaaatgtgggtctccctaaagaccaccacctctcccctgagctgttaaatggagctaggggatggccacttccagacctggtggcctgcctggacaaagggacaggaacatttctgagtttcagtgagcccagacgtgagacaataagaataaatggaagccccccacccattttgtccagccacactggggccccaggtgatgagaggtgtggggagcatgagccactcttggccatgaagctcttgcagccaccggcaggagggaggcctaagttctccggtgtccaggttggcagccacacaagctccccactgtccctagaccaccaaaggctgggtggctccgggattccatccacctggctgagcccctccgcatctataagatgggaacaggaccacctgtcttgcattgtcctcagtcctgataaatgacagacaggaaagggctctggaaacccccccaggctgttagacaccaagcccggcttggttttacagttggaaccctgactgtttttctgctttccctggagctgacttgagcagatgtggggtctggcttggagctgacacactgaaagaacttcagtctcagctgctgtggccggtgacagtccacagcagtgatgctcaggacagcgtgtccagggcctgcctcgagtgctgcgcagttgtccacagagcctgattgctctgtccccttgggactgtcgactctgaggctgacctcacagcccttgtgcatgaacttgagggctacgctgcccaccgctgggccacgtgggacccgcggccgctctcgtggccagggggtcttgtggccagggtcttttggtggtgagatttcccctccccacattacagattgagactatgagttcaaaactctgatctgtttgcagggtttaaacttcacagcatctttcttttgtttttttgagacagagtctcactcttgtcgcccgggctggagggcagtggcgcaatctcggctcactgcggcct

SEQ ID NO: 135089 - DNA, 1025 bp, Homo sapiens
gaagctgtgcaactggagctggtgacaactctgtgctttggctgtcagtctagaaatgggagtcgccctctctacttcagtgatgaggctgaaatgaacattgaagcccctgtcccaagtcagccctttcctggccacgagcccccactccccggagcactggctctcgccgggccccatgcttaggagtgagaggtggtgctcaggagcccccagcacaccctattttaaagttatatcgctgcttagaaatgaaaataagacacttttattatttttctcttgaattctgaaaacttcaaacatgcacttattgacaactgtgcgtttacttcataaattagttcgggtcacagacacttcacctgaatctggttttcttgggtattttaacctgtcagaggccaaccacaggtaccttcccccgaatattgtaaggttcagaaaacagctgtcttgtccacaggcgacttcagactccgggagtggcctagcaggctgcaggccctgtgtcacctgggcttctcggttgtaaggcatgcacgcaggtgcgaggggataccctaaggctctgtggcccagggagaaaatgccccatcagctgagaggagccctagtctacaggaagcccaggccccatccctcagcctaacgggcctgcgcagcagtagcccccgggcctccagaacgtcccgtgggcccttcccagtccctgagtgagtgtggccactgagaccaccagagccccctctggttcaggaccacccagcttcctgctgctgctgctgcttcggctgctgtggcctgcggggctgaccacccctccagcagcaggtatttaaatggaaaccaatggctgtgagcccgtgatgcagggtaagatgtaggcattttaaggtcattattttaattaccattaaaataattggcactccggctatcagaagaatggaggcgatcagaggcgcaaggcgcccctcccccacctcggggcgggagcagccttcagtgtctgtataattaaa

SEQ ID NO: 135090 - DNA, 1021 bp, Homo sapiens
gccttcatgcagacagactgtggagtgcggagcctcagtaagactgctttcttgagaataacacaccattctctcccctgcagttacgagaactggtcagcatgtgcatctgccctgacccccaccagagacctgacatcggatacgtgcaccaggtggccaagcagatgcacatctggatgtccagcacctgagcgtggatgcaccgtgccttatcaaagccagcaccactttgccttacttgagtcgtcttctcttcgagtggccacctggtagcctagaacagctaagaccacagggttcagcaggttccccaaaaggctgcccagccttacagcagatgctgaaggcagagcagctgagggaggggcgctggccacatgtcactgatggtcagattccaaagtcctttctttatactgttgtggacaatctcagctgggtcaataagggcaggtggttcagcgagccacggcagccccctgtatctggattgtaatgtgaatctttagggtaattcctccagtgacctgtcaaggcttatgctaacaggagacttgcaggagaccgtgtgatttgtgtagtgagcctttgaaaatggttagtaccgggttcagtttagttcttagtatcttttcaatcaagctgtgtgcttaatttactctgttgtaaagggataaagtggaaatcatttttttccgtggagtggtgattctgctaacatttttatctacgttttataacttggtgagtgacgatgagagccctgcacctggccagagtgtcacaggcaaaaggcatcgggaagcaggagcatcttcttggcagccaggctgggccatcttctcctggacacctgctgtgtaccaggaacttcgtcacctccttgaatgctggcggttcatttcatgatcagtgttaagcattttcctccatgggaaggaagcatgggatatagaaaagcgaagggctgtcctttacaaattctggttctgcaacttcctagcgtgactttgggctt

SEQ ID NO: 135091 - DNA, 1101 bp, Homo sapiens
agtctggctgcacattttttttacactgtttatgcttccagatgtttgtgcagtgtctaaggtaacagttaagtcattcttgttgctgcacggaagagcaatcatgcccttctcttgtgtaatgatgggatttgcttcctgctgtccctgaacagtattgtagggaggttgaagattgatgtcaagggaccaagtgcttcccagcacttgtggggatggtggggtggggggagagtcacgtgtccaccaagggccaggtgccgtgttcactaatgacactctttgcctcccaggcacccccattttgcagcacttgagaactgaggaagttgaatcccccaagatcacagagctgggatcgggagagccaagattccagtccagcctgctcactgcgttgcctgaatatttattttcactgtcttctgccctctggcaccttgaggagaatcctaactctgtgcttttgtttttctcttactaggcttggccggtacaggtgtgagaaagggactactgcagtcctcactgagaaaatcactcctctggagattgaggtgctggaagaaacagtccaaacaatggacacttcctgaatggcatcagtgggtggctggccgcggttctggaaggtggtgagcattgaggcccagtaagacactcatgtggctagtgtttgccgaatgaaactcaactcaataaaaaacaaaaaccaaattgggcagctgaggtctgggcactgtgtggtgtttttgggggcagtagggggctgctaaggccattggcctggcccttcagggtgctgatcctccttgagcactggcctaggctcagaggagagcgtaggagccatgcgcccctcctgaggacagataggttctgtctgctgtcagaagtcagagtggactcccttgaggcttcaggtgaccatcgatacctaccctttttgctggctgaatttgtttggggtggcctcaggtttggtttggttttgaaatggggtgataagtgcagcacaccctccacctcagcagccaagtaggaaaaaaatggcaaagccaaagctgtgttctcaagcccagctcagttctgagaaccaag

SEQ ID NO: 135092 - DNA, 1001 bp, Homo sapiens
ctaacctggccgttttgcaggagttttgcatcatttgaaatttgcctcattttggccatctttaaacttcctagaacaagagcactctgtacttccttggatctccttctggttctgcctgggccttgtcaggctgtggaagaaggatcatgtcatataacacagtgcctgtgatagccttcccacatgtgcccagcatctagcagtggttttgtcctatccagatgttggaggtgggaacgcggctcttctgctggtctcagaccctgatttcagtctctgcttctgacaggactggatttctgtcattgcttactctccttatcctgagaaattctagtgctggctgctgctttgttgtgacccatgaaacagattcacttcatttctctgtgttttcaggtgatagccctttccgtggctccaggagtttattgccagagttatcacgggccgcgttgtttttgcagagagagagaaatgtgatgaggatcttattagtatctgccacagcctggttttcgttttgaggattgttgagcatatttctcacttttctttaaacccaggctttctttttttttttttttttctctgattacatttgattcagtgtagccttggaaatatatatttgtatacacatatgctgtgaacattgatttcttctccttgtggaaagcaatatgttcttgtctcttttggttcttttccctctggaagcttaggtatttttccttccattcactgtcacggattccagcaaaaccacttgcccgccacagattttcctaatggtgggataggaagacaggctttggtggtgccaggcactaatctggcatgcatccccgactctcctgcttgtacacagccttgtgcctttgagtgcatcagccaacctttctgagagccccagtttcctcatctgtaccagcagttgggaattcaataaataacgcaagtgtttggctcagacccgggggtgtggcaggtgcctg

SEQ ID NO: 135093 - DNA, 1294 bp, Homo sapiens
cagcctatatcaagtgtaggttttgctagctgaagtaaaaacagttctaaaaatagccaaatgattatggtcggaacaaatataccctggataccttctgctattgtgaaagctttaaaaaaaaaaaaaaaaggtgctctttctcaaaaactcctaaggcacatcaaaactggcaaaggcagagtgtaataggggaagtttcttggcatctgcgccaccagaagagatctgtgttgccactggagttgccattaagccctctgtaaactgttgatagacggtggtccttcagacatgtgaagggtgggcttgcatgccattcaccttgagttttgttgatcaggcctgtgcctggttttaagacatggtccctttcttagtgactttacaacctagagaggggtgcacaggcccacaagcagggactatgtcatgaaaagtcgagaacggtacccatacagtgggcagtaggggtacggcggaagaggagccgatggactctatctgggagactataaagccacctcaaattgcatgtgactcctcacatgaattgtttttggtcttggggtgtgaggaaaggtgggacagggaggcagaagagaaggagaccattccggacaggaatgttaagtccagaggcacgggggcccctgctctgcctctcagtcgtgcagtcctggaagttgggacagctgggaagggaaatggcagacagtgtctaaagttgtctgggcggtcatttcccgagtcagtgtggccttttaattagcatccgctcttcaatgtgagataaggccggagcttagcatccctgtccctgcatgtgaatatttagtttagaaagctgccacgttccattagaggtgcttgtgttgcagcagtgggtgcaggagctgtgtagacttttcagatgtcctttgagatttatgttgcagtgtaattgggagatgctggtacttagtgtgttgtgcatggcggaatgtgagattacctgctgtaatgagaccccagcagcatacctcaggaaggtagttaaagttttaaccttaacagataatgttacttgtgggtgtctgttaggtaatttatactaccctcccctcaccctgaaattgtgcagaaaccaagaaatgataggaagttgtactaaatagatattttaaaattccacctagtggtacagatttttaaaaatatttgcagtgaatattttatctgtagaatgtggtcattctcgccgtcattgtcaccctgtcatgttagaatgtagtttttctagaatcagaacctt

SEQ ID NO: 135094 - DNA, 1066 bp, Homo sapiens
agcctcccaagtagctggaatacaggagggtgctaccgtgctcagctaattaaaaaaaaatttttagataagcggtctcactatgctgtccaggctagtcttgaactcctggcctccagtgatctgactgtctcagcctcctcagtagctgaaattacaggcacaagccatggtactggtgtcttagctttaaaaaaaattaatattaaagtgtgagtttattgattgacttgtaactaatcagatgttttgactacttttttaggtctactgttctaaaagtgtgggatacctagttctattactatgtaataacagcttcattgataattcacacctatgcagttcacctgttctaactgtgtagttcagtggtttttagtgtattcacagagatgtacagctattaccacagtcaatcttaggacatttccagcaccttaaaaaaataataactccattcttattggccatcactccccattttcccccaaccttcccagccctgggcaataactaatccactatctctgtacacttgcctattctggacatttcatgtaaatgtaatcatataatatgtggtcttttgtgcctagcttctttcactttgtgtaatatttcacccgtgttgtagcatatatcagtattttatttctttttgatggtcaaatagtattctgttgtatggacataccacattttacttattcattagttggacatttggattgttttcactatttgactatatttataatgctgctgtgagcattggtgtacaagtttttgtatggacatatgttatgatttctcttgggaagagaaattctaggagcaagattgccaggtcatatagttactctatgtttaaccttttgtggaactaccagagttttccaaagcgtctgtgccactagcagtgtgtgaaggtttcgatttctatatgtcctcctttccatatatccttccatatatcctctatccttgattgtcaccaagacttatcatcctttggattgtagtcatcctggtgggtgtgtgtgacttggtatcttattgtggt

SEQ ID NO: 135095 - DNA, 1007 bp, Homo sapiens
cttagccaatttttgcaggtttctagagctctggctctctgccttttgaagatgagttgctgaagcttctaccactgcctgaggcgtgctaacaccagcaggatcttttttttcccctagtcttagtgtgtcttcagttttaagtagcacatgcttagtcaatgccaactgtgatggtcctttctctggttgcaataccgagggatgagctcctaccctatacccttcagagagaagctatgaagataggtggtgacgtatacaagcgccacttcagccgtctgatttatggagtcatatctcatcactcggcaagtgttggcctctagagaagcccttatagattgctaaagatgtgagcagctatcgccctaaaggcttgtggttacctcacaagcgtgatgccaaacacctagctactgaggaaacagaattaatctgtcattgcaggcagctatagatccactttaaataatgagagttgataccaatatggttttctgacagcaaatcttagaagtaactgtgtgtgtgttttttttgtaagtccagtattaggaagacactgagttgcaggttcatttgtgctttgcagatggacagtagtgtgagagatctgcattattttgattaaaaaattgtgctatttggcatatagaatggtcccaaaagagaacatagtatgagttcaatatggttgcatggaaaggggcatggggcttgggagctagaggattgcgctgcaggtctgtttcctctgtccttacagcaggactctgggaagaggggcatccttgtctgtgcgatcggaacagagacctgcctgcacgttgctgtgagcgttagatgcggcctgtaaaaacaccttagatggtggctcacacaaaattggctctaaaatatggcagctggttttatttttttagttattcaatagtaggatacaaacatcgcatagcaacgagtaatgtgattatttgtgctggcatcaggcttggtgaatttat

SEQ ID NO: 135096 - DNA, 1036 bp, Homo sapiens
gtcattttgtctattcagctgttactcttcaaagtacaaactaaaaataatagctccaaataaatgccacataataaagtgttttacagttgtagctggaataacctggtggctgctgctcgcagtcctattaccattgctggtgcggtagtttcttccctgcgtgtcaaggtgactctaccagggccagctcattaaaacaatcttttctttggaactggcttggtatttagcgctatacccagcagcctgccaaggcacaatatggagcactagactcacagcatagaacacgggaaattatgtggcagtcactgtttgaacaaaatccaaattctccataacctcattttcatgcttcagcattttattgtgaataatttacaattatacctgtcagtggtggaagtaggaccagttgcagatttaccttagatagtggtaagtgtgactccaggcttttgaagagcactgtttttacctggtttatgtggccctgtagaattaatatttacactgtacttgaatgagacactgggcatgttttgctgtttttcttgcccctaggtaaacttgagatggataagctgggatatcataaaatacactaaaagtgcacctttttcttgcaggttctggctccttggcagcaatggctgtatttgaagataagtttaggccagacatggaggtatgtaagtccctgcagttttattctttttcaaagatttttctggttttatcttgaacatttacaaattgattgctgattcctcccgagcttgtacagcactgttgttagttggaatgttctttggcacagatggtctgtttgccgaagagaccagcttccttttgtagtggcccagctgtgcccttccttgggcttgaggcaccagcgctatccagctttttgctctgggctttgggctgtctaggaatcttcttgactgtaaatgcggtggtaacgtggaatgttttcttgcgcaccaagctttctgtgtcacgatatctcaaaatgacaggtttttctgtt

SEQ ID NO: 135097 - DNA, 1681 bp, Homo sapiens
caccatgctcggctaatgttttgtatttttagtagagacagggtttcactgtgctagccaggatggtctcaatctcctcaccttgtgatccgcccacctcggcctcccaaagttctgggattacaggcgtgagccaccgcgcccggccaggaaaaaggttttaaagaaataattatttggggagggaaatatttttcatttcttaaattattgagtgaagctgagcagaaggaaatatatgtgcctaggaaaaagaatagagcaaaaaaaaaaaaatttactgtgcaactgccaaggaaaggaatggccccggaggaaaaaacagctagtgatttttaaggaaaaatgcctttaaggtaagcttgtttttcttttttaacaattcattacagttttccacaagttgttagctcctagctaaatacctgtcttctccctgtccttttttaaatgtttatttctggcctctggttgattacccttgtgttcttcgtggagatattcttggactttgttggaagagaccagtctgctcatcagtgctgtgcaggattggtctatatctgggagtattttttcctgagattcttcatttgcagttgcctcgttcgttcatggcagctgtctttcgctttccacacaaaaccagcttgcttttactagtaagtctgagactggttctcacctgggcctgaaaacagcaacttaggttaactttcccccttgacccctgaatctcagagtaaatatgtgactcacagaacattggtggagtttgaccctgtttccacatcttcaaggacatgtttactttgaaattcagaggtttgttttgctgaatttgctctcacatatgtgctagttttatctgagtttactagttttatatctgtttaatttctatctccttttcagagggcttttaatgtccctttagatcaccattttagttttttttttttttttaaggagaaaaaaattgtgaggaggggaaaatcgggttgccttttgctcccaaagcctaaatgaatagtcattgcttgtaatgctggtttacacttgacgcttcctatggctttagatgtgatgtatccggtactgtgaaggtaatgatcctcaaccgcagcaatattccctaacaggagtatctgtcatattcatcgggattaccatgttcattgatttgtgtctgtaaatctgctgtttctaccctttaaatttgatctataattggacctccttaaatggttcagataaggtagtctgtattttctcaatgcggcgttgctgtcagcttctcctttttcattatacattcagcagacttgataaaatcagcaggacacctcatttgaaactgtttaatcgctgcctttttcctttgctaaaccattgaggtggtcaagcgatgtacacaaatcattttaaatagaaaatatggttttctctgtgacccagctaaatagatagtgttatgcaaaacaagttaaaaagtaataaatgccaaaaaaatcttctaattggagtaaaaaattgtgggcaactctatcctctctccaaaagtggagtatcctgaaatattgccaggacctgtaaagacaagatgatgattttctaaagattctctggtttttgaacaaagcaaatttaaattttcaaggagtgcttagctgccttttgc

SEQ ID NO: 135098 - DNA, 3383 bp, Homo sapiens
aatggcatatgtttaatcatttaaaacatttaactaaattccagtctcatttgaatttccaagcaaaacaacacaaattaactatatccagatgtgtgtggtaatcgagctgaaatctaaagaagaagcaagtttgaaagcatgcttttttggggtggggagctaagaaaagatagctccatctcccaggcttacttgctaatcttgatttcaagcatttggctttgctatttaagaggcaaacgtggtggaatggaaagaacatcgcacactttaaattcagaaagatctggcttcagaatcccagatttgcttatcactggctgtgtgatctgggcacgttccttatctttgagctttattctccttttgtaaaatgggactactactacttgccatgcctgaagagcaaacaaaactgatgtgactgtgctgtgaaagttcttaagtaccgtgtgcatctgttgtagtttgttcagtgctgtgtttgccaagagtacacttctggataagtggggtctagccccatgctgaaacgctcagaggacttcattattaagatgattgtacctctaagacggtcctaaggaagccctcctaaggacgttaggcaggagagacatggtgtatttgtttgtgatgattgattgctgttgttctttgggtctgttgactcatgcatggattgacctttaggcccttgtatacaaatgtaaggaataagctgcctgctgctgctgttacacggagactgtgacagctagcaaagtcttggtcttttgcttgttttttccatcccctcacaatgttggattttcttcaattttttataccttaaaaaattgctattaatgcctgcactttgaagaaaaatttaaaaatacaagtaaaaagaaaatagcaccacccagaaataagcttaatattttgatttatatgcttccaggtttgtataatatatagtgcataagcatgtctgttaattttgctttagaacatgtttttcccccactaaatactatagcatggatctcttcccattgccaaaaaaatgtacttctactttgtcatgtttaatgtctgtgtgtatagtattttattgtttattttccctggctcctgattgttgaacctttacatttacttccaggtattttttttttcccctttaatctaaacaatgatcttttaagatacgtgacttgggtacttgtccatgtgtttctttagaataagtccctaagagatttgctggtttggtgggtatgtatagctgtatgatttccaatcgatgtttctacattgcccattagaagagttctatccatttctgcttctccaagtgtgtcaaagtacccatttgatcacacctttgtcagcactattattctttttaatctttgctaattaaaaaggcaaaaggtagttattttacttcaattcatatttctttgattgctagtgaacttgatcagtgttgcttaatgtatataggcctctaccttttctctttcgtaaactactgtcttctctcttggagtcttgatgtagttatctgtgagctctttttagttattaatgttctgcatgttgcatgtatttttcggagtttcagggcttttattttacattcttaaaggagctagtaattttgtttataagctagtgggcctgctattataagatgtttcattgtaacagactggctggaggtgtggtccttgtggaactggtgcttgggactccttctcctggggcgcagcagatgtgggtgacaagagggtctgtgggtgagtccggccctgacagagctgggaagcaggccaggtgctctttccaggactccacagggcattggttgcaggaggagctttgaatgaggacctagctggagcagctgtggagtgtctgcagtggatgggggagtgccctgcaggtgaaagggaaagagacatttgtcctccctgcctccctgtctctccacagcccggcttcttggtgggttggggtggcgggtgttgaacagggtgtgtaggtgggcttgggggagggcagtggatgcaggaggtcagtctgaggggactaggtagccatcatagtgtcctcacttacattcacctaagtgctggtcactgaattgcaccttgtttttctgttttaaagagctttgttctggaagcagtactgggtactcagtaaccgtgggtgtgctgaaaggcaggcttggggaaggttgctaaggagcagcttcatggaaactactgatgagaccgagagcgtcagtagtattaatatagtgcagaaatccaggaaaggccattcactcctgtgatatcacagtggtttggactggactaggacatataacaggacttggttttgtggtttttaaggccctttttcctttttgaaaattgaactggctctacacttgagtttgtcttatattcagcctagtatggtaaactaggcgataaatattgctttacaccttatccaggcatttactgctatcctcacaccttcaggggcagcttagagttttttttggctccctcatttgggtagttggcctcacttttagtgcagcttcattcaataagcgtctctcctaatgctgccatgtgtcagagactgttggggatggaggctgcagatatgaaaggatggacaagttgcagagatgagagtgataaaccctgtggaggggagtgaccaaggaagggttctaggaagaagtgatctctcagctggagtttgaagggtgactgggagttctgtggactgccatgtgctctgtgagataggcttgaactggcacgggcatttaggaaatcatgggcagcgtggtgttggtggagtatcaggggtgtgtatgggggatgggagggagccgaaggaggtagaaacctggtcatggaaggtcttgcgtgtcctctctcaactgtattgtagcatataggactttttgtatgagagcgcgacatagggtcaacagctgagacaggaatcccacccctgtgcttgtttcctgtagtcctagacaaggagctttctcacattagtgggttgctatgaggatgatgaaatgacctaaaataggccgcatggcacctggcgggtgcttagcagaaggcccttgttcttctctttggcttccttctcctcctgactggagtaagttctctgaggcctcacccttgctcatggagcatagcctgcatttgtggagggcacgtcctctctgacctgcctttccttcactggcatactcgagtgtacagcagaggcccagtcctggccacgctgtcccctggcttttctgtgtatctgttctttaatgggaaaccagacagttctgatgtctaagatgtctctgcttt

SEQ ID NO: 135099 - DNA, 1050 bp, Homo sapiens
aaatgtaatactcagtgcttactcaggagtgaaaacatcaaattaaactgtttatgctgacaaaggacaaatctggatttcagcaagcgatgcaagattgtctgattgcttggcttgcctcgccgggaagcttttggccaggacttataatgaaatgcatgcatacaattaaaccatttaaagcctgcgtctgttttaccgagcagtgagaggtgctccactgctctctagtggctggatatggtcccctggtgcccgccttattttatattcatcaatcagctctgcacacattggcattgttggcctccagagcaagcaccagtactaggagatgaggccttggaggcaggaatggagtgaaaaatgatcccagtctgtgggtctgtggaaagcaccaaattttacccaggatgagtggccagttgactaacaatgagcaagtgtgagtaagcgctctgtcagggagagctgacactgatggattagaaagtcctgtgtgtgactctgttatcgccgcatacatcttacaccttggcaggccatggtggcaaacaggtccttggctgcttaaaatggaccgctctttagcagaaggagcagctttttttcctgagacgatctggttaaattgatttggggaaaagcagtagaaatccatttcctgctgcctctcataacttcatgactttgagaaagaaattctgaagacctctatttccatgaaagctgccaaccctgggacttgctgagagtgattgtataaaatagctgcctggaggaccaggagcttgtcggagaggaatttcatcagccagcttttcttgaacttttagtgtccccagcattttgctttacacgtgccatcttgtgtaaccctcagagccaccctttgaggaaggcacctcctgtcccctgccctcttgtgcggggaaggaacctagttcagtagggctgctgtgcccctcggtttccggttgcatcattcacgctgtgcttgatgcagttgcttgtgcctcctggagcaactttggcagctttgcagagctc

SEQ ID NO: 135100 - DNA, 1233 bp, Homo sapiens
ttcctgagagtttatttgggagactaatatatcagactcctggtggtgtggcccctggacagtttctgccctaaaaccttctttgtgaacatcacattgactacaatgagagcagcgttcatccagctgtagcacctacacctgttgtgggatgctttactgatacaatctttgcaccactgtgaggtgggtgccatcatccctgtcttaaagatgaggaaactgaggctcagagaggttacttgaaccacaagtaaggaagtatgtgagtgagaatgggaacctcagtttctgactttttcctgttggtacatggcatgtggcttattctccaaaaagaaaaaggatcccgtcggtttcatttacttcttttttaagagagtaatttggaagaggctactggtgatcgattcatttgattgttaaaagctaggcaagattttttgactttattaggaaagggaaagcattttagttatgtttttatagacataatgtgggttcttttaattctcagattaattagcttattctttgaacttgccagcttttctttattaggcaagctgaagtagtgtcagaagaagcttggggaccatcttttgctattagcttggcagtgttccttgtagcagcattggcaaggtatataaaatttttgtttttgcctgcttatccacatagagaattaacatgaataaaatttcaagcatgacattcctgaaaatgaggtccttggacaatttaggaatactgacttaaggaataaacattgctatgcaccattaggaaagacttggggtcactgccagggccatccaggtagaattctctctccagataaactggttatacagtttcctaattactggaatgcacctactaagtcccagtttacagggcctctgagcagtgagaaagatgtgggacagagtagtaagcatgctggatgtctcaccttgtgggcagaagaatcttacaattaagtgagaacttaggaacatggatagggagttcagatttgccatcgttacgctaaagtacagccttttctgtatttttacactaaagtacaaccttttctgtatttttatgctaaagtacaaccttttctgtatttttatactcaagtacaacctttgtatagatattttgatacctccacatgacttgattttgaaagttgtcctgcacaggatcaaattagtgcactttaagatggcaaatgtttcg

SEQ ID NO: 135101 - DNA, 1036 bp, Homo sapiens
atggggagggtggaagagggatggatgttgggagtttggagcagaggcaaggctggaaagcaggcctcgggggtccagacgctgcaggcagagctgttttgattttgtcctggaggtctcctgctctttcaagccagggaatgagaggattaggttcgcttgttagaaggagcagctgacagctgtggggagcagtggcgtgagaggcctggggcagggagggagcttgcatcctggccagaaatgttgagggtgaggacgaatccagtggtggtggcggtagggatggccactgtcattacagagacctctcagacagcagctaacccctgggccacatcctgggtttctgtcgtcattctctcctggcgttcctcagcgccagctccttgcggctcttggctgcagtgttgcagtcacgccttcatttggggccatctcccttttcagttgggctctaggccctttttctcatctcatttcctgttcttccttcccttgtgccctgggcttcagtggcagcagccccctcgccctcctctgaagagagcctaacagctgttgctgcctcctttcagaaacacattttctgcctggagtgttcctcctcctcatcctgagtgtggcccagaagccattccctcctggctgcccctggcggagttagcaagtccctgccaggagtgaagcaggatcccaggactcccgccttggccccactttgcttcccctaggcattgtccctcctgcccctgcacaattctagacctctgagagcagcttctgtgcctcactctcagggtctcacggagccctgtgcaactcagtgaatatttgatggtgaattaattttctgattctccaacttgtttgtgctaaagaatgtctgaaacttagtgttagaaaccttagccgctgttcattgtttgtgaactagcagtttgcagcacccctggaatgcagttggtttagattgtgttccatttgtgtggtcccagtttagctgtaaagtgttgtaaatgtgacaggtcctttt

SEQ ID NO: 135102 - DNA, 4829 bp, Homo sapiens
aaaaaatacaaaaattagccaggtgtggtggtgcacacctgtagtcccagctacttaggaggctgaggtgggaggattgcttgagcctggggaggttgaggctgcagtgagccgtgataataccactgtactgcagcctgggtgacagagtgagaccctgtctcaaaaaaataataataatgggggctgtgaggctgagctgaaatcaggtgtgtggagtgcctcacataatttatagtttatactggctgacagtagatgttcatctaatgttcccttcccttttttgttcccatcaaaacaataaccccttaatgaaacagtcttaaggaaaactttttgttacctgacttctcatgcaacttttggctaagttacagtgatgctttgtggactcatgttttttttcttatgcatactctgatcaccaggtatcaaggttacattggtgcagccctagttttagggggagtagatgttactggacctcacctctacagcatctatcctcatggatcaactgataagttgccttatgtcaccatgggtgagtgtaacgttttcctgatgtttaagagtactcttacttaccacgatggtctcttgaagagctggtctgttttctcttagaagaggaggtgcaatacaatgctttgattcattcagcaaatatatactgagttcctactatagattaggccgtgttctaggtgcttgctatatagcagtcaacacaattctgatagtgattcctgctctcgaggattttgtattttagtgagggtaaatagacaataaacaactgtgagaagtatatttataatacacaggtattctaaattaatacacaggtattataaatatatataaatatacacaggttatacaacctgtgtattatgaatatatttttatagtctgaaatctgaaaagctccaaaatcctaaagtttttgagtgctaacatgatactcattgtaacatttttatttttattatttttttcttttttgagatggagttttgctctgttgcccaggctggagtgcagtggcatgatctcggctcactgcaacctctgtctcccgggttcaagtgattcttctgcctcagcctcccaagtagctggagtgataggcacacgccaccatgcccggctaattttttgtagttttagtagagatggggtttcaccatgttggccaggctggtgtcaaactcctgacttcaagtaatctgcccacctcggcctcccaaaatgcttggatggattataggcatgagccactctgcccagcctcattggagcatttttgattctggatttttggattagggatgctgaattgggtgagttataatgtagatattccaaaacctgaaatctgaaacacttctggtccctggcattttggataagggctactcagcctgtattagaaagtgatactaagaaaaaaagtaatacagatgatattgtactatagttacacaagatactatctttgagagaaactgagtcaacttcatatggaaatgctctattttttacatctgcatatgaatttgcaatgatcataaaacaaaaaattaaattcacacatgataaggggacttgggagttgtgggcaggggctggggtggaggcagatggcagtgttaaatagaaagatcagggccaggcacggtggctcatgcctgtaatctagtgctttaggagcctgaggtgggagggttgcttgaggccaggagtttaagaccagcctaggcaacatagcaagacccggtctgtgccacatatatatataagctgagtgtggtggtgtgtgcctgtagtcccagttgcttgggagcctgaggcagaagcattgtatgagcccaggagtttgaggttgcaatgagctgtgatcaagccattgtactacatcttgggcaacagagtgagaccctgtctgtttaaaaaaaaaaaaaaaaaaaatgtcaggacaggtcttatgaagaaggtgagatttgagtagaattctagagtagaagccttacattgaaacttggcaggtacattttgacctagaggagtgattgtggtccttctttactacttaatctctgagggattggggtatttgatttctatctgaacctcaatttccttacctgtgaagtggtattggtaatacctaccacaccaagttgtaatggttggaaataacgtatataaagcatgtgctccaatgcctggcctgtaaatagtagttatttttttgccccctctcttcctcatttgctaaccagctttttgcatttatgttttagctctagctgctagattaggagattttttgacaggctctcactctgctgcacaggctggagtacagtggtgcaatcacagctcactgccacctcgacttccccgggctcaggtgatccacccaccgcagcctcctgagtagctgtgactacagccatattctgccacacccatctaatttttgtattttttgtagagatgggattttgccatgttgcccaggttggtctcgaactcctgggctcaggtgatctgcctgctccagcctcccaaagtgctgggattacaggtggctgataatttttttttttttaatgactgcaaaaaatagtgataaaattatatttagaagaattgggattttcaagttctaacatttacattattgcttctgggtcaaattgcataggtccagaaattcgaacaggttgtgtgtatcgtgtagctggtgtttttccagctgtcatttacctcttaatattttctgtcttggtgtcttggctccacatctaggaaaactgctgccttgagtagtttggaaattgccagtttgagactttgctatgccattgtgttgttatctagcctcttacaaggtttttatataacagatgttcactgtttgttggggagaatgatttatccccagataccatacggatgaatctttgcagttattctaaaatgaagatacttatggtaattttagaattgttctgaattgctttattcaaaggtattaggtatctccatcaaagtattgcttttatttctccccatctgatacctttaaatggtggtaaaggtggaataaccttttctattaagtagtttttattttttcttttttttacttaaatttcagacttgcagaaaagtaacagtaacgttcaacaaacactgatctgtcctttactcagatgtgtcagttgttagcattttgacacatgtgttctgcctctcacacacacattgttattcctatcattgtttcgtgtgcgtggggaaccatttgagggtaaatagcaggcaccacagcctttcacctctgaatccttcaagatgttctcttctgtcaccttgataaagtcatcaaatttaagaagtttgacattgatacaaagcagcttcatttgtaaaatgggaaaattggtttctcttgccagtgaactgtggtaatttgtgtcatgagcataaagctgaattaggaaaagttgttgaaagtgagtaggtaaacagctttgtgtctgcccattttacttctgccgcccaactttgtgctttttcctggccaagagtgacctcctgtctgtccaagtctcatttgagttccgggtgatgggtccacagctcttgagtttatagaataattctatttagaaaccactgactccacacagactggttttgctgccctaaaatgccagattaaggagaatgagacatcagtaacatctgattttaatacccaagtaaattgttactttgaggtcttgtttgttcctccactcatttatcagcttttttttttttttgagactgagtctcgcactgtcacccggtctggtgtgcagtggcatgatctctgctcgctgcaacccctgcttcccgggttcaagtgattctcctgcctcagcctcccgagtagctgggactataggcatgcaccaccatgctcagctaatttttgtatttttagtagagaggggatttcactgtgttggccaggctgatacggaactcctgacctcgtgatctgccggcctctgcctcccaaagtgctaggattacaggtgtgagccactgcacccggcctcatcagctctttagtgagtgccttctgtgtaaaggcactatagcaggcagcacagatagaagtgaatatcagggtctttgtcctcagatactcagtctaatgggggagacagatgtacctactgacgagggcaggaggggacccaagggagaaaaggtcacttccaagctgggataattcaggaagaacttcacttgagccgagtcttagaaggaggattggatctcttcattcatttgtctgatgtgtattaagcatcactagtgcggagcactttgctaggagctgggaagattagtggttaacacagcgtctgcctcagagcctatagtcttgtgagggagacaggtattagacaggtaaattcacatgaacctagaagaatgcattgtgataagtgccccagaggaaaagaacagtcattagagaggataataggaaggagtgtgtggctggtgggtgtttgtgtagtcctttctgagcaagtgacattcaagcattttctactgaacataatttatgaacatgacagaacattcaagtgggacaaagaactataagaaaagtctccttcacatccctccagagtaaccactgttaagaattgtttgtatttttttccagaaaatgtgttatgataaactttcacgtatctccttctctgtcatctagttacccctttaaaaaaaacacacaaatgagc

SEQ ID NO: 135103 - DNA, 1615 bp, Homo sapiens
tgggagagatgcggtcacactatgttgccctggctgatcttgatcttctggcctcaagtgatcctcccgcctgggtctcacatagtgctgggattacaggcatgagccatcatgcccagcctgaaaccttttcttaatgatcagaatcaattaccttctcctccggtttcccgtaggattttgtacctatgctattactgtgtattaaattatgtgttataatttttgtcttcttgtgtatcttacactcaactttgagcacaaggcctctcatattttctttattcccagtgcttagtgtaattactggtatctgatagtaaatacttggtagatgttgaattgcaagagttaacacacctggcacttctgtacaacttggatatatttgtagcattaatggaatgcacacactgttatcacagaaaccaataatttcatgtgttccattgggccatagataatgtatttgcatataactagatgcatattctcaattttctgtttatttaaggttgactaaacagagaagttacagcatagatatactcaaaaacatctctctgtacctgaacttcatggaagttatccaagaacccattacttctaattgagccctctggtaattggatttcagctaagtttctaattggatttttcagttgttgtggtgctgggacagctgcagacacagacatgacaacccagctcatttcttccaacctggagctccactccctctccactggccgtcttcccagagttgtgacagccaatcggatgctgaagcagatgcttttcaggtaagtttccagaatggggattcctactagtatcttcttctcatatcttagatttttttcagccaagagaagcctggaaagtagcaaaaacacattcagaaatacacattttgttccggaaatcagttgttatattaaagagccattttaaatggtttttgatggtgcatttgaatttctggggcctgatttttttcatgagtaaatcacatgtcaccagttgagtcatttcctggagcatagggatattactggataagagaaacttttttgttcacggtaagaaagttatagctggaggaactatcaagttgtcttgtgaaactactctctcctccccataaacacaaacccaaatgattgtctctccttccccccaccccctccctttaggggcaaaataacagtgaatgaaaagtgatatttataattggctgtcagtgggtatgataatattaatattaaccaacctttatctacctcttactctgttccaggacctatgctaaagcgctttatgcacgatttcatccttttaactctgagatagggactattagcgtctcctatttgtaagtgaagaaattgaggtttaaagaggtgcagtagcttgcctgacctgaccttcattctctgctgactcacagctcatattagtagttttgtttctctttctcctttaataattgcgtcattactttatgtttgtatgggtcttggcagttttcaaagtgtgttttctcatttgcttctcataagagaggcagtgattttaggagaagtagcctgggcatttagtcttgggttggaat

SEQ ID NO: 135104 - DNA, 1969 bp, Homo sapiens
ggctgtgtcggtgtatgctccaccagttggaggcttctcttttgataactgccgcaggtgccgccttgcttggggcttggttcagggagggagaagagtgcggtgctcgggtgggagctgggccaaggtgtgatacgagaattctgagggaagaattcatggcggggcctgtggcccgcggctagtgtgactcaggggaatcagggcctgggcgtgggtttctcctgaagccgggtctgctctcccaccttcccagcgcactcggccaccgtttatctccgtctcctaaggcacgtcacggcccctttgtaagactgtcttcgttggaaaacgggagaacagtgctgatggtgggaggattcattaaacagatgggcgtgaaaacaagtagcagctttcctgagttctctgttaggcacttttcatgccagtgctgtgcgatgtggtcctgcccttcaacacttgattctctcatttgctcttaggaatgccgtcttggaagccgattttgcaaagaggggatacaagcttccaaaggtccggaaaactggcacgaccatcgctggggtggtctataaggtaagccgggttaggctaagagcagcagtgactgaaccggcaacaggaatcagaacacttggcttccggtgtctctcccggctcggtctggaaaggcaaatgctatagaatacatcaggagaccgtctttcaggagcgactgcttttgtcaggttttgtgtgcttcttaacagtttatgttctttcctcactttgctgaggttttttctttctttcttttttttttttttaaacaggtcagttagcttcttaattactagtttaggaagctgaagtatgtgatgggagatcacgagatttggggtcagacaggtctgtctcacctttgaactctatagtgctgattccaacttctggcagctcactttccttctcacagggacaccttcagatgcatcaaatggagataactcctgccttaaattgttggaaacgtcaaaagggataatgattacctgtgcaacatgttttaaagaaaagcaacatgttttaaaaggaaattgatagtgatggctaatttaatggaaagattcctgagtcttaatccaggttttttccagattagctctgatttacaaggaatttacccgacacctgagcctcacttgaaaatgggaataattcttacctactcaggattcaattagtagcatttactaagaaaccttttcttaaatcctgaaagtgtagcacaatatttttgctatgagttttggctggcgttttgagattaggggagcatgtggtatggccaacatagtattccctaaagtagaatagagagttgcggttggcttatatttgtaaaattgtttaaaaacttttttttttaataggatggcatagttcttggagcagatacaagagcaactgaagggatggttgttgctgacaagaactgttcaaaaatacacttcatatctcctaatatttagtaagtattgattcgtttgaataactcttatattttcaaacatgtcagggctaaaaattgaccttcctgtgctccttactaaaacctgtttttcaacctgtattttctgtctcccttaaatggcatttccagccacctgttacctaagccagtaacttcaagtcctctctttgcttcagtctccaattgaattggtggccagttttgccctctctgtgcctcttgaatccattccctcctatcctttcctttgctaaggctctagtttgggttcttttttctttttctttttttcaaacattaacttgaaccatagaggttcttttttcttagctggactattgcagttaccatttaattggcctctcttaggcatcctattgttcactcttctgccatactggattttgtaaaacatagatctgatggcatccctttcttaaaaagcttttcaag

SEQ ID NO: 135105 - DNA, 1031 bp, Homo sapiens
acatgtttctgtcgggaaagaagccccgcctgccctggggtgttggtgtttttgtctgtgttgccatcccaggtctgccataggggctggtggctgcattgtgatgtctgggctgtgtctggggattccttcccacctacccagccagggactagtcacccccctgaagaggcctccatttccttcctgtgctccagggcatagggagcaccactcccacagacaccacctttaagggctctagtggcacacacatccacgagcctacccccaggttacctgccctaggtccacctccacccacagtcctgtgtgtaggaatcgaggaaacgggatgtccctgagcccttgtctccaaagggccggccaagggctgcccgccagcctgactccatcaaccctccatgaccaaatgatagctggcgggctctgcaggctacccaggccctctgctacctcccaccctgccagctggcaagggatgggccctgttctgtgaattgactacctgtggaaatgtgaccaattagtgtgaaatgcatgtttagcaagtgttaggtactgtatttgaaccaataaatgtgaatccttctgcacatggcatctgtctgtgaagcttgtctggggttctggggagggatgatggcgtgtcctgaggcgccggcttgtgccttcagacctgtgtctcttgctcatagctgacacccacctcaattctgttgctgaggctctggcagaaggtggtgtctcggaactgcctgaatcaatgaaccagcactgactgaagtgcccaacttgtgtgccaggcaccatattgaacttcaaggattattctgttttataagtgaagaaactacagttgagtgaggtgaaaagactctcccaaggtgagtggcacaaccagagaagtgagcctagtggagaggcagatacagacttttgcagtgcaggggggatgaggttgtcattagggatgtatgtggggttgtaagggcctggagaaggagtggcttgttctatggaggatagtc

SEQ ID NO: 135106 - DNA, 1030 bp, Homo sapiens
cacgtcgtgtgcatactgggtagtccatgtctgattgtaattgtttctttctggtgaaatgttacgggtaccagcagagtgatgattttggcccttgatggatctaaaactcggaacattactcctcaatgccgtttccccagttgctctgagaaggaagagacatgttcctcaggaaaagctccagctagcatgtttttcacgtcagtgggaagattcttgtgtgttcgtgtgtatctgtttatttctaagttcacgatacttgttcccctgaattttatttaaccaactagatcacattctttggccacaggtcagactctgagctgctttcctccagatcgggaaggagacacatatcacagatgccttctctaagacagctcctgtgtacagcatcgttctttgctgaggcctctatctgtccaattattatttttgaaattgcttttcaaattaaacattttacccgttgtgttgggtgtcaaaagaaattgctctctgatgaggcaagaacatgtctctccaacaacgtagtattgaacagagcaagttgttaatttgtggagtaggggaaaggttctgcaagttgccattgtacaaatccagttttacaaatgtttgcagcagattccacagaacaaagagcccattcattgccgagagccctgcagaatctcagagcaaagtggctgtgtgttccgagccggagcctgacctgtggaccgtctttaatgtcttctgcaccagtccttttatgacgtgggctttttttaaacagggtaaagtgaatgtgttgcattgcaaactcaggtattatgaggagaaggtaggagtgtagctagcagcgtggagacattaggtcagccactagatgtatttgtgaatttggtttgaaggacacggagaaaggttggaggggaggtttggtgtgtttgttttttgctttcttccccataatgtttggttaacaggtagcctttttgcgagtggaaggagagaaaagttgtgcatgttttctctaatttct

SEQ ID NO: 135107 - DNA, 1743 bp, Homo sapiens
cctccaccagcccaaggaggctgacttgcctgtccactagagtgaccactgctaactcttcttctccccccttgttcccaggaaagatggtgaatgtgcccctggagcagctgcccctcctctttaaggtggtgctgcattcctgcaagaccagtgtgggcaaggaatgacctgttccaggcgccctcctcaggccaaccacagcgtcttgggtgggcaggacaggctctggagggaaaagccagagagaccaagatggaggctgtggagcagcatttcccgttgcctccatagcaagaagagtttttgtttgtttgtctgtttttttaacctcatttttctatatatttatttcacgacagagttgaatgtatggccttcaacatgatgcacatgcttttgtgtgaatgcagccaatgcattttcttacagtttacagaatgtgaagatgtttaatgttacagtgttgtcattgtttagaaatagttcttttgtattttgagggagagggtgggatggggctaagatgactatttccataatgttgacaaagatgactacctcaatggaaatggggggtgtggccatccctactttttccacattttctcagcagactcatacatttgtctgtcagagagcaaattgccttttttagccacagaattgccagataaaacggcacactgtaagggggcaaagtgttgttaggagattcactaagcaaggttggtgagacggcaacagggtaggaggtgaggattgagccacgtcctttccttggaaagcgtgaaaattaagagagtagggcacagtgaccatatttaaggcaggtgtccttccacccaacaagtcctaagggcagaagaatttctgttctcacaccttgctgccccccttacccctgcaccaccatcattgtctaccactgcgaactttccatctaggcaaagtcctggcaatcacttgatccacaggactcgcctcccagctccctcggggcccccagctacctagtttccttacctggatctcctgaggcccaccttcctccttcccactcccttacacatttgacttcctattggccctttgaaaaaccagctgagcagaatgccatgttctgaagcctggtgcccactactgatttattctcctttcaccttgttttcttcaaagggtagtagggcaaggccagactgcaaaaagaatagacactccccttttgaaatctgttcctctcccctccccttcctaccgcaccctcaggtctaaatccgaaaacttcaggcttttttaaacaatgagaaggaccattcacctgtctgctgaccagaaatgttgcccctaagttcttctccaagttctccttttctctccagagtgagaccagttttcctcagggacccaggacacaaagcccaaggcccagagtggctcagctgccccttacttcagcagtggactggccagccaaggcctggagggctggagccagaagcacctggaagggaaggggggctttaaactacctcaggttcctaatggcccggctgctacctctgcagacatggcctggactccttgacctctcactacctgccccaccttatcccaggacgtgttccttaccctcttgactttggccagcgctacaccaggtctgtctttgaactctttcaggtgcttgtcctgcctacacccaggtatctttcacagccagtgtggcaagcagaccactta

SEQ ID NO: 135108 - DNA, 1049 bp, Homo sapiens
cctgtgtctgttcctcagatttagtgatgaagggatggaggtgatcgagcggctcatctacctctatcacaagttccatcagctaaaggtcagcaacgaggagtatgcttgcatgaaagcaattaacttcctaaatcaaggtgagtggctggggtgggaaaagggacgtttgcagtgcgggaggcaggcagtgagcatttgccctcctgtttcacccctccttaccctcaggactatcacacagaatccatcacaccatctgggtttcaatccaggaagacttgtgcacccccttgtcatcaccctgacccttatagtacagggaatgcgagaatgctttggatttttttttttcttcaaactgaaatgccacaatctctataactcatagaggaaggaagaggattcgctttgtttagtcagttttaatgcatttgcacacagacaccaaggacagtacatgcgtcattttaaatatgtaccaagtttaccagtgactgaagaagagcagagtgactgatgaaactgttggagataaggcctctgtgacaggctggcagtggttctgacagccccttcagggcagagcaggggtgcacaaacacacacacacacacacacacacacacatacacacatacacacaatcaagcatggcttttaattaaaagaatgccagatgtgatttatgtggtatcttacctgcaaaggggcacttggcagctgctggtaaaaccagtatagggaggagggttgtattctcttttttccaaaatagctaatgtgtactctgctcctatagtggcactgggctgttctgctgcctgtggcattgcaagtgccctcgtcctgtgtcccatttccagtccagagctcctctcctcttggcctactcacccctacattggccaaacctcttcctgcttttacaccattcatgcatttatctggtgttctgcatgcttccctttggccaagccctgtgctgagcattaaagacattgagaaaacttagactcaggtctctggtctcaagaagtatacattct

SEQ ID NO: 135109 - DNA, 2307 bp, Homo sapiens
tctcaaatattgaatcaaatttatggtgcccatattccttaatcacaccgttatcagacagtgaaccgggtgaatttgatttaaagcagattgtagcaccagccagtgactgctcctggccctaatcaagactcctctcaggagaagatgccttgagctagatgggctttaatgggtacctctatctcatgagcaccagctccatttctgctagatctctggaaagttgcctcccagcttccctgcctaactataaggctcaggaaacaggcttttatttttgctacaataatgggagagagatgatgatgctatttgtaatgataacagctaacaattatgccaaattctatcttaagtgccttacatacattatttgttgaattcttactgctaccttgtgtgactggcactaatattatccctgttctagagatgaggagcatgaggttgagaggtgaaaattaaaggctacaaagatagagatggagctaagtttatcacctgtatctgttgtgctccaatgcccagcctctttaacattgccttatactaaattcttattttcccagagcattttcaaaaggtttgactttctggaatttgtcctgaaactagtcttagttttcgtcttggagtctttacatgggtgctgagatggcagtttctctaaggttgtggctgatggccactcctgggggtaggtgcatttagatcaatgaaaaagagacaactgagtttctcagcccccttaatgggacataacttacatagtgtcagtttcaattgctgactgaatggtccagtggtttgggggatcctggcaggaatgttttccttgtcccagcatgcttgtgtaatgggaacctagaagaagaatgggtgtgtttgtccaactttctggctttgaatgctgataatttgtagacagtgaatacaggggcattaaaactggagtgggcagatgtggaggaggcacggctgcaggcaaaggcaggcccgtggaacagagaacaactttgtttatcaaggggtgggatgcggggtgtggaggaaagctttgcagtcaggctgtggagactgagtgggggctgctaggctggctgccagcccccatcactgctgggggtccacggtggctgcctgttggaggaattttggaaaagaaggatgtgctgtccgcaagagaaagggcagatctagggtgtatggacaggccaggcacttgggaactcctttgtgtccctcaggtcaagagtcagccaggaacaggtttggcactcctggctaggggtctggctgatagccacacacctgcagggtctggagtgccagagtgaacacttggggcaaggggttgctgattaaaggacagagcattatctttgcttgctacatactaggccaccagacagatgctgacactgcctctcccgttgtgtcctccttttttgtgccctaccccatttcatccccacccctccagtcagatactgaaagaaattggcagtaaagaactttttttcccactcccaagaacataaatatccaacacagtgctatgatgaggagtggtcttcactcccaggcacaccgcctcctgcaagtcttagcatcctggaggcacttgcagtggcagttctgtgcactgtagcagacctgacatcctcccaaggttgggccctgctctgagttgctgtggggacacaactcctgaggtcccctgtggtagtatgtggttagccttttccaggtagcagctaagaacaagacaggatcaagggtaggcagtgtagtgctgagaaaagtccatatgcttggaattagaaaacctaggtttgaacattggcctcaccaccactaccatttacttcccgtgcaaccttggggtagccatctctttttctgcttcctcatccctaacatggaagtgatacttactatgtatccttccaggttatcaggaaggtaaagtgtaagaatgcatatgaaaaggcctaatacataatagagactcagtaaataactccctgagccttcatttccacatgtaaacaaagggggttatgatttgtatccattctgtgaatttattgggaatatcaataagattaaatgtagaatacttaatgtgcctcgcaggtagcagacactcaacaaatggtagagtggtagaaacggtattatagattggtggttattgtggttattcaatatgaatgtatcggccaggctgggaatgtatcagtaaagttgtaaaagccattgggccaggtagagagaaactgagtcagccatagtagctca

SEQ ID NO: 135110 - DNA, 1030 bp, Homo sapiens
agcctgggcgacagagcgagactccgtctcaaaaaaaaaaaaggtgcccctatccatgaaagttggagaggggaaagtagcagcccttacactttcttcacagaactgggatccatctccccctcccacccagttgtggcataaagacaagccaagactcaggaagagcacagtgctccaagacctgcaagggccctttgcacagctaggggagggaggagtcagcttgctgactctctctacttgttttctaatatttccttattaatgatgcttactggcttcagggtgatctgtaaatgacagagttttgaacccagctgacactctgtctggtaaatagagctatctgattttgcagttgacctaaccccttgtccagagactctaattcattgtttccatcaaattcctgtctcctgctccataactctgctccataggggtgtttggatagcagtcagcctgctctgatgctgtcagggtttgcagagctggcccaaggatcccagcctctctgggtgcctggaatctaccagttcggcctgggactacaggatcagcctttggactccacttccaagtaatgggtttgcccaggccctctgcaggcaggcaggggtcactggcagtacagggttctctggctttgagcttcataatgcatcccatctcactgtagccagtcccttaagccccaagaccaaggcagaagtcagtaacagcagaagtagtgaggaaacttttccttccttggtaggaatttttctcatcaaggaggatctaaagctgtaccgtccactacagtagccactagcctcatttggcttttaaaatgtaaatttattaaaattagaaatttagttctcatttgcaccagccacatttcaagtgctcagtagccacgtggcgagtggctactagtacaaataaagatcatttttatcatcacataaagttttattgagcgttgctgtctttagaacatgtgttgctgctgagctgtcaagtggcttctgagaataggaat

SEQ ID NO: 135111 - DNA, 1054 bp, Homo sapiens
ttcttttttttttttttttagacagagtcttgctctgtcacccaggctgaagtgcattagcgcaatctcagctcactgcaatctccgcctctcaggttcaagtgattcttctgcctctgcctcagcctcccgagtagctgggattacaggcatgtgctaccacgcccggctaatttttgtatttttagtagagatggggtttcaccatgttggccaggctggtctcgaactcctgaactcaagtggcctccaagtgctgggattacagtcatgagccattgcacccagccaattgcacacatttctaagtctcctttccccttagcagcctttcctcaccagacccgcctctccagccctgaacttgctgctggcctcagccttccccctttatcagaaaatcacactgaatggaactggagacccgtgggcatggagcaaggagcccattgccagggtccctttgtgcccttgggactaccttctctctgtacccttatcctcaccctctgaccaatggaagtgactttcccctgtccctgcccctcagatacgctgtgacacaggcagaactatttgccctgctttgccgcctggccgacgagctgctctttaggcagattgcctggatcaagaaactgcctttcttctgcgagctctcaatcaaggattacacgtgcctcttgagctctacgtggcaggagctaatcctgctgtcttccctcaccgtttacagcaagcagatctttggggaactggctgatgtcactgccaagtactcgccctccgatgaagaactacacaggtgaggcctcctggctggggaggaaataccaaacaaccaaacaattgtcatccctgtaaggcagagttgcctggcccttcagaggataggcactacacctcataggcctggatttgaatcctcactctgccactgactagatttgtgaccttggccaagtctctgatcctcaggttctgaactggtaaaatggggtgataacacaatttccccagtaagatggttgttaggaatacattttatgcattc

SEQ ID NO: 135112 - DNA, 1052 bp, Homo sapiens
aagtaggagattgtcattgaggagtggtgtttcagggttaggaaagaatagcctcaaggacaaaaaggagttgaaagaaccttgaggcttcacggcttgagagtagtgtaaatgagcaggaggaaggccacgaagggccatggtgccagtaggaaggaagccacgccgtcctaagattagtgagaggcccggaatatggggatggaggagagggaacctaggtttctgggaaatcctatgagatttaaataagctctcagtcctgaagaaagagcaagtgtcctgagcacccatctaacatgtctcaattccttgtcaaagatatcggaagaagaaatcgaaaggatcatgtctgggcaggagtttgaggaagaggccaatcactggagcaaccatggtgatagtgaccacagttcccctgggaacagggcttcggagagcaaccagccctcaccaggctccacactgtcttccaggtgagctttaaggcaaacccatggtcatcatctagggatcccccaccaaagggagagctacagaaaacctctggctgagtatccctgccaggctgtctcagccattgtactgttgctccctcagactcttggagtaggggtcaggaagattaaaaacagtgtttcccagccccttttatgctaaagaccttgaaaatgtcagtggtctcttctgcagactgataaagtgctatagcttctatccatgcccgtgcattcttcacctaacagaataacattttaaatgttgccattttccctcatttattttatcactgaaataaacctttttgacagttttgaattaaactgtaatttctctgcctcacaagagtcaatgtttttcactttataaattttaagaaacattgaaggctttttaagccagtcaaatttgctgctatcagagaatacaaacttagaaactcttggttcaagcatatctttagttagttgtcgagtgtgaaatagatccttcagctattagggaagctttcctttccccagaaacctttcttataggatatggattgacaa

SEQ ID NO: 135113 - DNA, 1025 bp, Homo sapiens
aggaaaagtctttgttgggccagcctgcaccacttgttcttacccgttgttcttacttgccagcagaagagcttcatgagggtagaaaattggatatatctctgcccatcaggtgaatcccttggcacattagtaggcagagagcatgccttaggaattactagtggccaggagcagtggcacacgcctgtaatcccagcactttgggtggctgaggcaggaagatcgcttgaggccaggagttcaagacgagcctgggcgacatagcaagacagaccctgtctctaccaaaaaatcaaataaaattttaaaaaactattattgttactggtatgagccaagaggcaaccactaaaaggttttatttagatttgcattttaggaagatcattctagcaggtagaaatggtttgtgaggagtgaggtgagggtgagtaaaactgagggagagagaaagcagttagaaggttttcacagaagtacaggcaagagatacagataatagtttgaagcagagcaatggcagtgcagatagaggggagagaatagactcaagagatatttactgggtaaatttataggatttagccagttaaatgtgagggaatgaaagaaaggtgttcggagttgtcttaagacatacactgatgatgtttgggggatttcttatcatatgagcacagcgtacattcaatcaggctgtgtgattcccaactctgctgtgtttattctttttttctaaaacatttttattctcgttattcaagtcatatatatgtcttacaaattctttttgtttcttggtctggactaatagctgctcttttttattatggcagaagtaaaaaccatataacatgaaatctaccttttgaacaaaattttaattatacagtacagtgttgttaactatatacacactctgatacagcaaatctttagaacttttccatcttacatgactgaaacactatactcattagacagcagttcctcattttcctctccctttgcccatggcagcc

SEQ ID NO: 135114 - DNA, 1167 bp, Homo sapiens
cacagggcctggacacagaatagatactctgctagagtgtaagcttcaccaggggcttctgttcactgctgtatttgtgccttacagcagttcccaggatagaagagttgcacagtaaatatttattggctggatgtctggctgaccggcttagctcggtatggttagaactcaattacagctgtcatttattggctgtatatcatgtgttaggcccttacatatatggtaagtaatccttaccgtgctcctacagggtagaattgatgggttatagatgagcagggtaagggtgatagaggagtcaaagattctttctaggtttcagtcttagatactgatccaagtgttgatgaaacccaggaggaagagtttaggtagactgtgttgtggtatctgcaaccacagatacagggactactcttgggacaaggatccgaagatgggccccctgtttgccctttagcctggagatagtggtggtcttaatctacccagagcagagttgctcactttaggaactgtaggcttaaagccattatttccactgtgttctaacttgaacatgatcagtttctgtttcagatgatcgggctgaacaacgaacctgtctcatttgtggggaccgcgctacaggcttgcactatgggatcatctcctgtgagggctgcaaagggtttttcaagcggagcatttgcaacaaacgggtatatcgatgcagtcgtgacaagaactgtgtcatgtctcggaagcagaggaacaggtgccagtactgccgcctgctcaaatgcctccagatggggatgaaccggaagggtgagtggtgctgatggctctgatggcccatccttcattcaaaactttacctttagtgtcagctgtttagttacttattcctcaagcttgcactacatatcaggccttatagtttgtactcataaccaaaaatgaaccattcttgcctataagaccttcctaaactaggtggggggaagaaaactagtgagatgttaaggtgggaatgagtgcacaggccctgtgtgaccaagaacccacttaacaatcaggtcttaactgggattaatatacttcactagttatttcaggaatgatgacagaagtagaaatttttggatgaaaaggcatgaggtaggagattgctgaatg

SEQ ID NO: 135115 - DNA, 2096 bp, Homo sapiens
cttcatgtgttctcaattcgtatgaccttgggtaatcatttccctgtgattcagtttcctcacttgcaaaatggaggttctctcatcaaacatattggaaagaatagtctctagcagttgttcctacctttttcttgacattttgaaatctacctccttccctccatgttcttgaagttgtctttagatgattagtgacaagattagtatgattgccataccaggccattattggagccttgaggcaaaaggaaaattctagtgatagtcatctgtttaaaactttttcttgcattaattttgtattttgatttttaaagtttgtattaaaatatttatatcgattgagtgttttggcacctgcctaaattttgcacagaggcagtagtcccagctctgccttttgcctcgtccctcagcctgttctcagttcatagcctcagtttctccatactgttgactgctctctgtttagtacagctctttgtttccttgacttccctggcattgtactgtccatattttcctttgctcctagggtaccttttttctatctcttcttgttcttcctgatctctaaatataggcaggctttcattaaggtctgtcatagtcaattttttttttttatggtaagtaagagaaactcatcaaacttaactagctcaagccctgaatggaagttattggaaagaaactgggttagagcatggaacacagagaaacatggaagagttgggattcaggagggatggcaggagtcatcaggagccacaggaactactctcagcccctctgaagccatgaagcatagtacctctgctttacttcatcccctaaccctcatgatcaccactaccacctagacaaatatcctttgcttttcaggaacaaagccatctcactagtcacctcacagctcactctcatccgaagttagcaagccctgtgaaatcttggcaatagagagaattgcattaaaccagtgcctttttccagtcccgtcagcagtggccattatctgtccctggtccagtcaacttgtctagcagtgtaaacatagtgccccacaggcagggcagtggctgctctcaaagaaaagattggtgtgggctgagcagacagccagaaagatatctactgcagattccagtctctcttcatatcctgtcctctgcaatcgcatccatgcccacagcctccctacagaaggactcctcaggtcaatctaactccagaattgcatgtttgtgttcattgtggctctcctcatctcccactacctcaactaacccactcctaagacacagttaaatacccacagccagcaagcccttttgtctgtactcttccctctggctgaaattctttttgacatacttctactctaaggctcagttcaggtgatacctcttctagataatctttccttctgcctccccatctatctccagaatgactcattcactcttcagtgtccactacatcgtctcttgctagtttagtattgactgctctgtatttaaattatgggattgatgtccatctcctccactgccatgagatacataaagggcatagaggggctctcaaatatttattcagtgagtaaatgttgcaatgatttgagacaagaagtaagaattttaaataatcaatgtctgctttatacttccaacttcaaaaatacttatttgtttagatacagtgcatggatccaagctatctatgaatgaaatgcctgtatattttttccactgagaacgatttatatttttgccttagattcaagcaactgtttccctgcccccccaccccccaccaagtaaacaaggaatccttaaaagtttccagtgacataagacaaataatagatttctccaactagaaaacctaagtttgctatgaaaatgaaaaccttgtattacaaataacagcttagtttctaattcagagatccccacatagaggagataagaagggaattaaggactgtcttctgaatttttgttttcttgccctcacctacagttgagaagtcagatgatggagtagcctttttcctggattcatttcagttcattgtagtttgtttc

SEQ ID NO: 135116 - DNA, 1013 bp, Homo sapiens
tatctcaaacttaacagccaaacggaactctagattctattcctacctcccatatcaacatgtttcttgggaaaagttgtatcttagtaaataaaaccaaaatccattagttattaaatactaaaatctaggagtcattcctaattcctttactttcttttacatttcatcatccaaaccataaggaaaccctatcaattctccctccaaaacagatctaaaatctattctcaatctccactactaaaagccctggcttatgccaccatcatctctcatttcatgaccatttagtctactaagtagtctccttccttctcttagactccctacaattcattttccaatctattctataatgtagtcaaatggatccttaaaaattcttctgttcaaaacactctacttcctctagaagatgaaataaaacctagggcctacatatagccctatatcatgaggctctagcctaaatctctggcccaatttaatcctacccttcccccactcactatgccacatactggaaataatcctttctcattgctaaaagggcaatttatatctagggagaggattataggggactagatcataatatatcaattcaattgcttaccattcctaaatcccacaaggtgctatagaattgtgagaaactgccaggtgccagtggctcacacctgtaatcccggcactttgggagtctgagacaggtggattgcttgagcccaggagttcaagaccagcctgggcaacatagggagactccatctctactgataattcaaaaagttagccaggcatggtggcatgcacctgtggtcccagctacctgggaggcttaggtggaggattgcctgagctcaagagtttgagactagccctggctacatagcaagatcctgtccctacaaaaaatttaaaacttagccaagtgtggtggcatgcacctgtggtcccagctacatgggaggcttaggtggaggattgcctgagctcaagagtttgag

SEQ ID NO: 135117 - DNA, 1099 bp, Homo sapiens
tattctaatgtttgctttaccctgttggttttggaggcatcattaagggaatgaaaaaactaagatttggttaggatttgagtaacacatgtgcgaaatccctccccgaacagctggtattggctctcgaaacttcaactgagctaaacagatgttcctagtgtgttattttgagataatttaaaccagacttatagtcaagaactctacaaaaattgtagatttgatttttaaatgcactaaagttgtgatatcgtgccacatcttaatacatgttatatgggtgttaagcaaaaacacctgagcttgggaaagtgagcagttccgccaatgaaattgtgatatttaaaacactaccaagtttgttattcttttactccagcccagattttcatttttcagattcccctttcccaaaccctgtaacattcctgttttactgtatccttttccagaggactaaggcattaattcattaggtactttcttgatgcaaattctttatggcatttggaaagagtaatggagtcattgccacctttcttctactaaacttccaaagtactggtgacaactgactggtaacagctgagaaaaatggaatcctaaacagccttaaatagtcttctcccaacttgaaatcttccaggaataaatgcataaatgaactgggggtccataatgtggcttgcagacagacaaatggaataaggggaggcggggagacctgcgcttgaaattagcaagtttagtttattctaggcttcttgagttgaaaactgacataatctggacaattttgaggctaggaaaaatatctggatgcctcacatcatctggatatttttaacccatctctaatcggtacccttttgctggggaaaatgatgtacaggaagaaaatctgatttaatcaccgcaaacagtacctccttgacacaattgattctgcccctctgatatattgtaattctccattaatatttaaaccaaagaatcgattattttaatggacattttccatggacatacaaatattactaacaaaacttggaaattcagttaccatttccgttgtgttaaaatggggtatgaaacc

SEQ ID NO: 135118 - DNA, 1058 bp, Homo sapiens
agcaatctgcccaccttggccttcaaaagtggtggtattataggtgtgagccaccacaccaggccttaattttaattttaattttaattttattttagagacagggttgctctcttgcccatgctggagtgcagtagcaccttcttagctcactgcagcatcaaacttctgggcttaattggtccttccgtgtcagctcccaaatagatgggactacaggtatgtgccaccacatccagctaaattttaaattttttgtagagatagggtctcaccatgttggccaggctggtctcaaactcccggcctcaagcgatccttcctcttcagcctcccaaaggctgggattacaggtataagccaccactcctggctttgaattttaaaatttatttagctactatatacagtactgccatgaatatcttctcactcctgcacaagtacttctgtaaggtacattcctagaattagaactgctatattaaatggcatgggcattttaaagcatgggcttggctttaataaataatgccaaaaataacctctcaaaatgttgtaccaatttgtataatggttgtgtgatggaagatgtgaaagaaagaaagaaaagaaagaaagaaagaaagaaagaaaagaaagaaagaaaaacccaaactactactttgcattgacattgataggatatatgggggtttaccttacccacagtacaagagttgtaactgaaattggatcatttttaagggtataattccttggcaggcaaattcttagattggtgtgatttgcaactggcccatctgctaacccagttaagtaactgagaagaggggagtatctatgaggttcctttgcatagtgctcagatgtgagctccccctgcttatgttcctggtactcttccctttaggtgcagtgctattttaagtcctgaagagatgctggggtatctgtccaagcaggcttgtcaagaagggatgcttgaagaagtcccaggaaagcattttctagaagtcattggtctcctctcagtcctggaactgtttttttctctg

SEQ ID NO: 135119 - DNA, 1051 bp, Homo sapiens
ctgtaatcccagctttgtgaggctgaggcaggcagatcacctgaggtcaggagttcaagaccagcctgaccaacatggtcatggaggttgcagtgagcggagattgtgccactgcactgcagcctgggctacagagcgagactctgtctcaaaataaataaataaataaataaataaaacctaagattgtacaagtactaagtggcaaagtttttctggctccaaacattctagctactgctcattttaattgtctgaattccaggaacatgtaaattttaacctataatcagtcttctcttgttcagctctttgacaaaagccttgtgactcagtgtctgcttaccaagttttgtatcattctgggaaaaaaaaaaaggcaaaaacccttatatttcacaaggatttgttaggtgctttgtgggggaatggagaaagttggaaggttgggataattaggattacgaaatagttgaaataaatattgtgttgctactgattataataacctttgctagtttccagtgtttgacctctatagaattcaccatatacacatgcaggattttaaaggtgctatatgggcctttaagagaccaggattttacttctcagttttgtacctggtgcccacgctggaaccccaactatatgtgcctactccagtttcctctcagaggcctattatcattttgctgagtgttgattttcaaatcattatgactagttgtgaaacacttactgtaaaaagcatcctacccattttgcttaatttatctttctaattagggcattgtaatgatggaattacattctatgcagtttttaatgcattagcctggaagttcagcaatttctttttatgctgcattcatctgagcattctcaaagttacatgataaagaatctaagctctccaactttgtattaacttgatctgaatagaaacattcagtggaatccaactatcttatttgtgtgaaaagtgaacctcaccaggactgagtaaacaccattaaaagagcaataccaggctttgaatccagttata

SEQ ID NO: 135120 - DNA, 1049 bp, Homo sapiens
cagctagtgagtggtagagctacaacttgcccaggtcctataacttcaaaccctggcattttgtccttggctatactctctgtgacatctggggaattctggaaatagttatgagtgccttgtggcttttcttataactactatcatactgctctttggaaccattttgtgctagaaagttatccaaatatatattggcagaacctaaagattttgttttcagatgactctaatgatgccctgaggttggtagaaaaaaaaaaaaaaaaacaagctagcaacagaaaaagtaatgtcaaaaagtaattagagcaggacaaatggattgtgctgccatgttcaaggctgttatttttgttggcagtgaggaggaagggcactaatgcaatgtgacagatctggagcaaaacccagagcactgcgcaagctgcagagcctccaccaatggcaagctcaaatcacaaagtctgactgaataatatttgatatctcaaagagctgtttcatgttttttagaaacactaattgttttaggggacctattttcttgatttcagcttttgggaaatagcctcatggtcctatgaaagtagtcagtgtgtcctaggataactcccgtcccagcgttctgtctctgcacattctcaggctaagcagggacatgatgccaacagagattttaagaaaagatacctaatatgaaactaattggagtggctggatattacccattcagagggagaatgaaatagaaaaggtgtcttttcagtattcagcttagtattcgaaaattgacctgaagaagttcagatggtaacattctcatctgtctgaggacaggatgctttggtttgctagcctagcttacccacggctgtgatcccactgctgccaccatgtaccgggaaactgccacagccctcaagaacgatagaacttatcatcatttgcctggaaggaaatctttgcaaagagaagagtacattaactcttgcccctgtgagtcaccatacctttgaagtcttggtaattactaattgttgccacca

SEQ ID NO: 135121 - DNA, 1022 bp, Homo sapiens
tcaatctaaatgcccaccaatgataggctaggtaaagaaaatgtacatatacatcatggaatactatgcagccataagaaaaaaatacaagatcatgtcttttgcagggacatacatggagctggaggccattatccttagtaaactagtgcaggaacagaaagccaaataccgcatgttctcacttataagtaggagctaaatgatgagaacacacggccacatagaggggaacaacacatactggggcttaccagagggcagagggtgggaggagggagaggatcaggaaaaataactaatggatactaggcttaatacctgggtgatgaaatgatctgtacaacaaacttccatgagacatgtttacctgtgtaacaaaccagcacattctgcacaggtacccctgaacttaaaagttaaaaaaaaaatgcaggtagctgctggaattgaatagattttagttttttgtctttgtgggagcaaatgccagaagagttccagtggtgtttggggaaagattcttggccccattctccctacaatgtatatgtctgacagctggcctatcattctatttttagacataatctgtgagattacagagtggtttcatttaaagctatgctgcagaaatgcaagctgtgtagaaaatgttttctctttgtagcaatttgggtaccattttgtatatagattaaaaagaaaatcattttatttaattaccaatgatccttgtatcttaatatttcaccttaaagtcatcttccagttgtggccatattctatgtaattcagggagaaacaaacgctaaaatgcagaaattctagaagtataaataaatcttcactacttaatgtcatatcactgatcttcatttccctctcgctggtcatgggaggtacagcacgcatattccttatagggcttttaaaactgttcataacaaacatctattgagtacttattggtatttattgaacatcatttatatcccagaaactgagcttgcctgaaatat

SEQ ID NO: 135122 - DNA, 1047 bp, Homo sapiens
tttcatcgatttctgctctaatttttattatttcttttcttctgcctactttgggtttaattttgtctttttctagcttcctaaggtggaagcttggttttaggttgtcttttctaacatatgcattcagtgctgtaactttcctccaagcactactttcattgcatcccacaaattttgatgaattatatttttatttttatttagttcaaaatatttttctcttgagatgacttctttgacccatgtttttatttagaattgtattgtttaatctttatgtatttgagatgttccagatatctttctgttatgctagtttaattccattgtggtctgagagcaaacattgtacgatttctattattctaaatttgttaagatgtggtttatgggccagaatgtggtctgttttggtaaatgtttcatgtcaacttgagaagaatgtgaaatctgctgctattgaattggatgaagtattctataggtgtcagttatatccaaaagattggtagtgctgttgagttcaacatgtttttaatgaatttctgccttctggatctgtccatttttgatagagggtggatttatctgtttttttcttgtagttctatcaggttttgcttcaggtattttgacattctgttactaggtgcatacacattaggattgttatgtcttcttagagtattgactcctttatcattagtaatgcccctctttctcctgataactttcctcactctaaagtctgctctgtctgaaattagcatagctgcttccactttctttcagttggtgttaggatggtatgtatttctccatcccttcatttttattctttatgtgtctttctacttaaagtaggtttcttgtagacaacatatagttgggtcttgtttcctgattcactctaacaatctgccttttaattggtacatttaaaccattgatgttcaaagtgattactgatgtagttgattaatacctgctatatatttattgttttttgttgtccttgttctctttttctcttctacacatttc

SEQ ID NO: 135123 - DNA, 1038 bp, Homo sapiens
ggggctagttttttagtcttcatgcagtcgcttttcaataaaaaacaggaggttagtcttctgctggtttccttttttaactagctcagatttgtttgtttttttcctttattctgccgttacttggacatcgttttcttctcctttggacttaaattagattggctgtcaagcttttgggcctctttgtttcttgggagaggcagaaatggtcaggtgccaatgtctacttgggaagaggatcaaattgtgtgggtaggattggggtggaggcacagatcttaaactattactctatggctgccaggaaaatgcatattttctttgcaaaagagactagtccggtgttaatgctttgattgtataattaaagccatggattttggataatttctttagatatgtaatgaggcctattttagtgtaaaccgtatatatagtagaacttcgtatttttactttgtatttttgtccccagttttatcatctgggcaaagatggcaaagtagattgggcaaaaagaaagggagaagggaaccactgtggggccaacccctatggtaggtactttgtaaaattgttactttgaattcttacagcattcttattaagttggtattgtcatttcctcttccataagtatttggaaattgagatgtgacatggttaactaacttctccaaggttcataagacaaagccagtaatcaaattcaatttttggctgagataaaagattagtaagacagagccagtggctgggcgcagtggctcatgcctgtaattccagcactttgggaggccgaggtggacggatcacttgagcccagcagtttgagaccagcctgggcgacgtggcaaaaccccatctctaaaaaaaaaatacaaaaattaaccaggcatagtggcacacacttgtagtcctagctacttgggaggctgaggcagggggatcacttgtgcctgggaagctggaggttgcagtgagctgagatggaaccactgcactccagtgtgggcagcagagtgagactctgtc

SEQ ID NO: 135124 - DNA, 1418 bp, Homo sapiens
aaaaaataaatttgcctggcttgatgatatgtgcctgtagttctagttacttgtgagggtgaggagagagggtcacttgagtgcaggagttcaaggctgcagtgagctatgatgatgccaccatactccaggatggtgacagagactctgtctcttaaaaaacaacaacaaaacaaacctctgacaaatacagaaaataacagcatacacctgatagtcccattttataggcaagtgacatctagtattttcatagtaaaatatcatgtagtgtcatctgatactttcttctttttactaaaaaaaaaaaaaagttacttgcaagctactcagttgatttcacagcttactgaaggggcagccagaactttggaaagcacaaaaggtgagaaaactgaggctctggtggttaaatgacttgtccagtgtcacatagcaaggaagaggcagagctgagacttgaaccagagcttgattccaaagttcttgctcgtactatgttatatagattctctattaatgaaactgaagggaaaaaaaagcacaaataacctttaataatgattatacaaaatgtaaatttcccaaagcagaggctgtaggaaggggcagaaatattcttcctctgatcattgcctcagcatttttcagagttgttggccatctggagttgttggtccctctctggggcagaatacaactgacgctactcattagttatgctgggaatggacagattcccagagcacttacatctcattactcacctagccttgagctaatcttggctttttaaagtaatagctgggtgtgagacctagcttctgcgtgagtgtgtggcctctcaaaagtgtgctgttgcaatgtgacttggagttcatgctcagatatgggaagggctgtatctagagtctggctccagccctggcatttctgacctggtcatggtactgagttaattttatggaaagaaggaatgatgtccctttttcttcttggaggataaggctgtgtcaaagggaaaggaaggaaattaattcccgttgttgtctgctatgagccatgcactgtactaggcacatttgacattggtttttgaattaattctcataacagtgctgtcaggggaacagtattatcctcattttgcagagaagtaatattgaggctcagagagaggaaatgattcataagcagtcacacagccaggtagtaatgagattaggagagaaacttcattacaccttaattttaaaagtcatacccttctccttagagctgggttgtaaccccaagctgataagacagttgaggaggggacattcctaggccttggaaataataggttatatcagaggaagcccatgaaaatccaacagtgtggaaatagagctgcttctttactcttgtgcattgag

SEQ ID NO: 135125 - DNA, 1720 bp, Homo sapiens
ctctgtctatgcttgcctctacccccaccgccccaggcggcacaagtgtttggccacacaaaactagagatagaaaaggtggtaaaaacttcaaacttttctaaattctccaacagtttatttcttgtgaatttcttccttctttaaatactccattttaagaaaacaaaaaaattaattatctaaaggcaaagaatggaaagcaacctttgtgttccttataataactgacttcataactctctccagctgcgttatgggatgtgtataaaaagcttctgttctgagaacaaaggagcacgtgcagaaatgagacgaaaaaatccactgacagtattccattacacaaattacttaaaagattttagtcaagcccctcaacagattcaattttaaaatggcttttagttaaaaaaaaaaaattgaaagtgcttacccagtaaaagaaccgaagtagtcctgaactgttacgtaagactttttacagttggatctttgtcaaaaggggatgggggtgatgggagaaagcagcaacgacaatcaaaaaagttcgagctgctgtggctagaggacaacttctgtgtttccagataggattcttgctgtagaaatggaacttccagccagcacagcatcctgtcccagtagagaaatgagtttgtcagttaaaacaaaaaaaaaattagatactggaacccaggctagacgaggtattgaaccgcgccagatttccttgcagccctgtctgctcagctcgcattgaactatatatgacccagatgatggacagaagcacatttagtcatgtgcacactggaagaaagcggatttgctggtccctggcagtgcaggggtttgtcttctgattgggctgtgccctgatcggtgaaatgtgaagccctcaccattcagaggccgtaattcaggactggcagtttgagtgtctggctgcctctagtcactgagagactttgaaggtgttgcttttgtttggtggcattacccacccagaggttgcttacacctctctacttgtgtcagaagaaatactagtctttctgaaatacaaataggcagccgatttttcctgaatcctaaatcaccctattgttgataaacttggctctaactgaaaccaattatttgatttgaaaatttattgtgatcctaaccaagcttcatatccagaccaacccttggtcttgattttataggtttgataaggtaaaaataaaagtggcatatttgactttgaagcctctatatgatataaattgctcttaatgaaaattggatagatggacaacagagaagtgaagttttagattctggagtgtttggatgtatgaggaagaagctttatgtctttttatcccctttgtgagactgtcactcttgtcccagtcctagtcacattaggggttgctgggggggggaagctatgaaagcatggaccctactgagctgtgacatagcctttaatcatgcaagacagccacggtctgctctcttcagtctgtctgaactagggtccttggggtttattttccatctttctgagccactgggaaaccaggtcattatacaggactgtcatttgtgacatttttgtttagtacatggcagttgctttgtttatttaatgcaagttgacacttctttaaagtttcaaaacagtaaagttgttttgtgagaccttgactctgatatatgaaatcta

SEQ ID NO: 135126 - DNA, 1068 bp, Homo sapiens
ttattacatgtcacttgtgttactaagcgtatttttttcctgacattttatttataaaatgctctcctttctaccagagtgtacagctaatcaactctggatgcttttgatatttcttactgtgccaagggcattgaatgaagttccctgtagtgagaaaagcgagcacatgggactcgtgactttatgtactccaacaatagagcttttatgacattggaggtggttaaaaaagctagaagtagctcttaaacatggcatctctgtgttgccttttttttttttttttttttgtattctcagagctgccaggagtgcatcgagcctgtaatttcctgttctctgaatcccccatctttctgcagctccaagctttgtgtcccacagcctgtgactctgtgctaacaaatcgctattgtccagtggggcgaatggtggctggaactaaagaattgctgtctggtttctattcaaatccaggtagcgagatatatgaatggacttttcgaatcgtcatgtgaataacgtctgctcggcatgaaggctcagagccatgctaggaaggattaactcgtaggctgaccactaacatcctttgtggtacgagggagaaacattcccaagtatcattttattcacacttaattttctatcccatacccccaaaataaggctagctatttaattagttggctgcttttctcttaatttttagtgtttctgttgataatgtgtaagtttgggaaaatgctaagtagcttttcacttagaacactgttattttctctttaaagttttctaccttacatttattatagcatagttatctttatagcatagatgcagaaagtaagagagagcttgttttttcaagaaaacaaccctttaaaatactttccaacccatgaagggaaaaatcctccttttttcccccaagtgcattctacttattactttgcatttttctcccaaagtccaaatttatgcaaagaaaatagaaacaagttcaaatgcaatgcattaaccaaataaaacaagtctgcttcaaattaggaaccaacctaagca

SEQ ID NO: 135127 - DNA, 1052 bp, Homo sapiens
atctaaaatctaaccctacatccctaagtataagactgaacacaagagaacatgctgattatgtaagccaaatatgacatgagattttttttgacaaagcagcctgcatgggacagcatggtcacacatcggctggtaaagcaatctcctgtccaaatgtttcattttattccagttgaattgctgacatggccagcattaatattttaggatacttgtttatgaaggcttgccttgtgttttgaatagtatctatctgatagtctacaaggagtcacattgtgagtatttaaggggaaaaatgtaataataatagctactcttttttggaatctctaccatgtgcctggcaccttactagatactttacatacttcactgcgagccgttctatataaatcctgcagggtgtctatttccccattttgcaggtaaggatactaagtttcagaggggtaaattaatttgcctaatatcatctagctagcaaagttgatactcataaacctactcaagaccaagtgacttctaggtcctggttttttgttacacatattgtccattgctgtgataccatgaaactattgaattaattgtctcatatgtttaggaagaagtttttgacactaaattagtaccattctggagcatttcacgtactctggccatgactacctgtcttccagtactatctaatattctttgtaacttcttcattgcaaccaagggggaaaaaaatggacctggacctcttttctcatccttggtttcaaatgctttttttttttttaaaggtatttctcaagtattatggcactagctatcttgtcatacttgtcattgtattttttacttaaattttttcatgtccagctggatgtgtagttgaagatgggtatgctggatataagcatagcccagatcagcactgtccagtagaactttctgcagtgatagaaatgtcttatatctgggctatcccatatgatagtcacatgaggctattgagtgcttgaaatgtggtgtgtataactaaagaactgagttttctg

SEQ ID NO: 135128 - DNA, 1062 bp, Homo sapiens
tcctccaaaaggttatgtggtatatccagcatttttcacttatttggcatcattaagaaacactgatttctcattcctgctggattattatcaactttaaaatgaatccacagatgtagtaggaaaataccttgcccaggaattccttcttaaatctttgattttaagacatgaattttctgtgttttcaaattattttaatttctcattcttggacagtattttaggactttgatgttgttgttttaatcaccaagaggaggtcgtagaaatcttactcagaagagtctctaggaaatattaattcttattttaagaaaagggttctttttttttatacttaatggtactaactttgtatcagcattaaattataccttacattattgaagtctgacattccacctcacttttcaaataatactttttctgtattcattcagttcattcaatatttatgtttctaagatttcaagttatttgtgcagtgttgacagtttttacattcatatgtttgttttaatttaaaatttaaatggagaatggcctgtgctatgaaccagcctggaacccttctatttccattctttgtggtctcagacgatgaacagaacctcaagcccttactgagtgttcacagaattggcatttccagagtgttttccatgtaccagaaacactggtcagtgtttatatacatatccttgactctgaaaacagcctggcaggaagggattgatatttgtattttatgaatgaagagtctgagacaaagaggggaagtgacttgtacaagatcctgtagtaaataaggggcagagccaggattccagcccctgttcacttgaccctaagactcatgtttcttgcaccaagcaggcataagataggctgagaatggcatccgaatttaagaatctcacatgcatgtttatcacgtccaatttatttgatggtagatttgggggttaagacgtggtcatcatagaagtcctttggctttctaaatttttttttaaaaccacagaagcttgtgggtagtaccatttgttgcactcggtc

SEQ ID NO: 135129 - DNA, 1047 bp, Homo sapiens
agtgcagctgccaaagctcataatgtttaatttcagcactgtctgtttgccagagtttgcagctcaatatttttttctgtatggatcaaattataatcacatatatttatcttattggggtaggagaagtaaagagttattgtttgataaatttgccgttttcctagggaatggtgctgttttgcctgtcacatgcttctgagcattattcccccactgattcctaagaacttattctcctgggtgaattcttctaacttgtgacacagaggggcaattcacaccttgcctgtttatattttgcaagaaaacccttctcttagcgtgggtatctattcaggcagttccatgtgctacattccatccatttgccaagtcttggactcttatccaaagtacaatatttgagtatacaattacacctacacgtaccggcaagagcgtactttttcctagcctctcttggagaacgcttgaagccagaggagcaaatccagatgttctggattgagtttggcaccttcaattgagaattctagatggaaagatttcatttggaagtgtaccaggcttgcccagcagttgcttcctgttgctaaccatcatatttttatgaccaaagattctagactgcctcctttgttgagcagaaagaattacacactagggccacatgggaagtggcttctcatcatttgagagaaatatcagcaggcatgcagaagagggtagccttgctattgggaataaatctgggttgagagcaggtacaactacagctgcagctctttagccagacctggctttatttaaatttcaaacagaaatctttgacatcaacctaagtgaaccattattggctgtctgccacctaacagtaccttgtacaaggaggaggtgctctctgactgtattcagtcaacacttattgaacaccttctgtgtgtgccaggcaatgtgctagatgctggtgatgaataaagtattttttcgagaagttacagtctggtaggaggcacagactcttagacagataaattacaattc

SEQ ID NO: 135130 - DNA, 1080 bp, Homo sapiens
tgtccccagaagtgcttggtttgcatgagcatatcaacagtggtgcacattgctaaatatgtcacatcagctaggttgtgtcatttgattgaaatactaagttctacagttaacgaagggtgatgatatgtacattattcagacttaggacgttactccaagagaaagtggtgattagggttctcttttaatttgtatgtatatactggggctaagaccgtgtaggaatctagctcttttaggaaggttgtcagcctctaggcatgggagcatggccttaagatggttgtgaactttaaggaaaatgcaattggaatgggatttactcagatacctactgacagccaataaaaacatttaggtttaaatattcagccaaatattctctcaaaactgatttagaaatctatactcattacaggcttttttcaagaaacagtctagtgtattttctttaggatttaagtcaaaatgaattccatgtttccctttgttctcttttacggtagcattctgagtcttctgtccctttaaaaatgttgggaagcttgtatgcattctaaattgtaaggtcttttgcatgttacatagactttctctgtttcatggggtcactgtagccaaaatacttatgattgaaatagacattggcaaactataaagaaaacaggaaagtaaaggctggatttgattattagtggtgaaaggaatactatctgagattagaatgataagtatgttttggagagaaaggtcacgagggaatcctgtgggctgcaataaatgtgtgctcatattttgatctggatagtagttaacatatataatacatatgagaaaactttatcagacttaagatttgtttaccttaccatatgtaaattatatctcaaaaggtaaaataaggctgggcatagtggctcatgcttgtaatcctagcactttgggaggctgaagcaagcagatagatggcttgagctcaggagtttgagactagcctgggcaacatgatgaaaccccgtctctacaaaaaaatacaaaaattagctagtatggtggtgcccacctgtagtcccagct

SEQ ID NO: 135131 - DNA, 1317 bp, Homo sapiens
attgaaatctttgactacatgtatgtgtgtttatcataattataccactctgtctcttcatcatgaaaaagaatttttttttttttgcagaagtttcctattggccatctgcaagatagatgatatagccttcaagtcaaaatctgcctgatgagtcaaacatcttagcctcagggatgcacccaaaactattgtaaatggaccattgacttggatttgggaggctttcctgaagcatttaactaagtaagcagtactgagtggtgttgggttaaaatccgtccatggtatgaaatgagaaatagctgtaaagtgatctaaactctgtgatggtcctccagggtctgacatttatcagctgctgctacactttaccgcttttctttaatcaaagatgactaccactggatggaagaggctcgaggaacccctggctgctctctggggaggaatttattttaattgccagtaagaaggtaggaatgattttaataaagatcaagaacctcctaatccacttcagcttgggctcctggccaagtgtccatcctcaggagagagttggtgtcagctgctgccttgtgtcttgaaggtatttcagaaaagccaaaggcattacagaagcctttcctgagttgacaggcaagagtggcaccaggaatcaagggctgacacatgtcatcagcctggaaaaagtggagcttggacattaatgatggctcttgtgaacactcagtgtgataaagccaagaggacttggcttggggtttagtttgcataggcagggagttagagcttagagaacacctgccaagagttttcactgtcccggctgttggtgatgcatccttcatccttgacttctgtcactcctttttagtgggtgatggtagaaatgctggatgggtaaggaagagaggcagcttggtcatacctagcacatctccctatttgcttgttttcttgctgttgtctgtgtagaactaaatttgtatggcgatactcgaggctagtgttttgttctgtctatatttgaaggcacactgggcaagagtcataggtgctctgtttccaaaaatgccactttgctagtatccacacaaatgttttgattggcagttgtgagacttttttgctaatacatctattagaagtattgttttcaaatcctggttctgccatttagtagccgtgtgacttttggcaagtggtttaacctcaggttttcatctgtaaaatgaaggttagtgagtaattgtatttatttatatttttttatttttgagatggagtttcactcttgttgcccaagctgga

SEQ ID NO: 135132 - DNA, 1367 bp, Homo sapiens
atggggatgtaaatgttttcatagtcttcctgggacttcttgatatacttggaagaaataagcataaactcaataaaacaatgtatctggatgattagtagcatgtttgcttcagcagcacataactaaaattgagtgattagtagctaatagaagaggagtcatcgtctcaggtgccgtctgcctaggtgtttcccaagcaccatgcaggaagcatcactataagtgtttgggggtaatgctgctagccgtgaggataaattcttaagttatgaagataacaacagcatgtcagtgtgaattcatgtttctttttgccaaactgtgctagttttctgattcatccttttactgattcggcagtagaatcctagggattgtttttcctgtatataaaacccttgccatcctggagcccactatctgactagggagctacacgtaaatataactgatgacaaagaggatgcctggtggattggtgtgaactatattaagggagaacagagaaaagaggggttaattctgcctacaagtgccaggaaaggtatatctaagtaggttaacctggtttgagctttaaaaggttagttgaatttttactagacagagaaagggggctaattccaatggaaaaccatgtacaggaaatcttagaggcagaaatgtttaggtaatggtgagtagtgagattaatgtctcagagtgtcagttaactcatctttaaaatgtgagacaaatagcacttgcccttcctgcacacacagccatgaaaatccaataaggttatgtatctgaaagagcatgcaaatgtaattgcttctcttgtctcccattgcttttgtttcatatgtgcgagaatagaataaatgaaataccttattataataaacttttccaaattggatgattctttggccttcttgctttttttccctttaaaatgaccatagttaaaaaatttcatgtattaaatgtttggagaagcagtatttacagcatagtaaagagcagattttggagccagaatcgtgactttgaattttactagctatgtgatctttgacaaattacttaacctctccatttctttgcttccttatctataaaatggagatttatatgttattttaaaggtatttaagttgttaagataatttacaactattatttctatgttaataaataaaattgcttgttttccccagtatttggcttccaggccatatatgctaataaaaaacctgttcttttatagttaaaacaatctctgactagctgttgtattgtatgtgtacatatatgtgttttaaggacatatttggaattaatgctctaccacttttttggtaaggttttcatttccc

SEQ ID NO: 135133 - DNA, 1602 bp, Homo sapiens
ctgatttttaaaatgtgatgtgatatccagatatgtatttaattcttcctataaaatatcatttccttaaatctagactattgaaaaaggagaaaagtactaggaatttagagaacttactccatgttagaaccaaggagaacaagaaaagctttagctagtgttttggaaatagtagcagctcccactcacagcagtagctgctgcactcaggcgactctctgcacatgcttttgcttcctttgggttgtttggtccgcagtttgcattcattgatcagtgagttgattcagactcaaacccaccgacagcaatgaatgttgagtgcagccatcagtgttttcagttggtggggttgcctttgccctccctggctgactcctggctcttcttttccatctcagttctttgaagtctgtgtgtctggcttctcccttagtaaccagccatctgcatgattgagggcccacacaggtgtccataacattgacattggagctgggaggttattgcagatgaggaagctgtggttcagagaaggaaggagtgcttggagaacctcacaggtagcactgcgccacacaggcagtgcttgcatattagtacctgtaaaccacagctgagggacctgcttttcctctttgttttgaactgagaagtatgagtgcttttttgaggtaaattagcagattatgttggagtttaataataacagcttacatatattgagcatttgctgtgggctagtaatggtacaaagcaccttatatattatctcattgagtctcaaaactccatgataggtactcttagcctctgttttatatgtgagaaaactgagacacttgcttagggggtcaaataactagttaagggcttgagccaagattcatcccagatctgactgactccagggctaagtttttgcttgaatttagcaaacatttaaataagcatatgtggggatatgtgggcactagtaaggcaatagctcatgctctaactgggatatcaaaaattaaccatattaactataattcaaagtgaaatgtgataagaactgtcacaattggataattttgtgctatttttgcttattaaatcctccccttgcccctaattaaaaattttgagaggatgtgggagaaatgggagtaattatttaactggattttattccaaaacaaaatacgtatttttaataaatttttacttgctacgtcctgtttctcaccagaatggtgcatatctaggagacatgtaggtacattagatatcatcatggactgctccttaccttgttgaaatgaaacactttttttgtaaaaacaaacaaataataataaaacacacaacagaaagcaaggaacagtgagcagtaggaataaaattcactggaccacatttgggggattgcaggaccatttctggtgaactcatgtgacatgtgaaggtacagcttgctcttttgcttcaggaaatgtagtgtcgtctgtaaggaccccaaggtacagtcaacggtcagtggttttttcaaatcccaaactcaccgacagcgttgaatgttccttggagtcctctgaaggctggcctgatagccct

SEQ ID NO: 135134 - DNA, 1113 bp, Homo sapiens
tgtctaccagtctcacaaaaaactcttctataaagaccccctcgggccgggcgcggtgactcatgcctataatcccagcaatttgggcggccgaggcgggcggatcacttgaggtcaggagtctgagaccagcctggccaacatggctctactaaaaacacatttcttctaaaaacacaaaaattgactgggtgtggtggcgggccagctacttgagaggctgaggcacgagaatcacttgaacccaggaagcagaggttgcagtgagccgagatcgcatcactgtactccagcctgggaaacagagcaagactgtctcaaaaaaacaaacaaacgaaagaaaaacacacacaaaaaaaccttttggtaatttctttgggtaggttttagttttttagatagcgtaaatccaaatccattcatttccataaaacatcagacacaatttgatgtatatttggccaccaaacatggtgcaaaattttatgtagtctggagatacttaaaagcagcacaaatgtgactctacctgtctgcactcagcagaatagtggcgatttcaggtggtgacacaaaaggttgggcaatagttgaaaagtggatgacatgaaatgtggtggtgggatgggggcaggaagccgatgttaagctagtgaactttatttactttgcttccagcttccagtgacccaaaatcacctcgtctagagtagggctcaggaatttgccattttaaaagcaactctagatgattctggtgtacaagaagtttgggaaacactggcttgaacctgatattttctctgaactctcatagttttctttagatttttcttttggctttgatttctctttctggttcttgtctcattaccccatcacttctccttcctaatttgacaggaaagccttgtcaaattaaggcttgcttaattgtcaaggctaatttgacaagactcttctcttactgtcttatttgacttttgctatgagaatctgcttcttcttagacttaagtgtatgataaattattcatgaccaagggccttgtttttctttctttaacatgggatttagtggcttatctcatgttacaggatttagagagttgat

SEQ ID NO: 135135 - DNA, 1046 bp, Homo sapiens
tctccgaatatcctgggttggagtatttatgcacatcagacacctgtgtgagcccagactaccacacatccctgaccaatgcaaagatgtgtgggaaagccaagcaaaaagtaactggaacagacgtgaaggcctgaagtgtgagtgtgctccccttatcctgaccatagttgcagcagcaggtagtgaaagagctcaaggtggttgattaccatctctgactaatctttaatggagtaggaagctatacagttagaggggtatctcctgcaagtcaggcttcaaaataaaaaggtggggggaaaaaccggagccatcaggaactacacattgcagaggagacagacttggtggtttagtgcaggaaagttagtaaacaaaacaaaaaacaactcatcatcaccaccaaccttagtgggggaaaagtcagaatccagagttgccaaaagcacattgttttaaatgtttagtatcacaacaaaaattaaaagacatgtagagaaacaaagtttgacccatactaaggaaagaaaaaaaaaaaaacagtagaaactgtctctgagtgatcctaaatgttggatctagcacacataagacttcaatgcaactattacagatattccagagaaataaagggacaacttttaaagaattaaaagaggaagtgtgatgacagtgatctagtacatagagaatttcaatagagaaattataagaaaataaaaatggaagcactggactggagttgaaaagtataactaaaatgaaaagtagggactcagcagccggtttgaggtgatgaaagaattggtgaacttgtagatagatgaattaaaaatattcaatatgaagaacagagaaaaaagattgaggaaaaaggaacagaacctctgagatctgtgggacatcaagtgtgtatgtaatgagactcatgggaggagaagaatgagagaaaggggcaggaaaatattagaagaaataatggcaaaaactttctgaatctgatgataaacattaatctacagatttaagcctaataaacgcca

SEQ ID NO: 135136 - DNA, 1072 bp, Homo sapiens
attcaacttggcttcactgtaatcttggttaaattacttaaactctctgccttccttttctcatctatgaaatgaggacagtaaaatgtatttttattttattgggttgctgtgaggattaagtgaatgtaatatatttaaagtttggaatagtgcttgacaaatggtaaatactattaagtgtatactgttctaggctatgtagtataatgttgaaattctcagtctttctgcactaatgggctgttgaaactgttttattcaattaagctggcctgtgtttcttaatgacacaaaggtgttggcaggtgtaagttactgcttcaagtaaatagttcagatgagattgggcgtgttcagagtgtatgaccatagactcaattaaatagttcagtcacaggaatagaagagctcatatgctgctgactcttttggtcgggacttctttaccatctcagtgactgttagggtgttttggtcctcttccccagccaatagcaggtaacctcccaaatgaccatctgccaacacatttaacctcttaggagactgaacatgttaaccttctgcttatttaaaacagatactcgaattacacactttctttttggtcaatagcaaggtcttacagaaagcatactgaagaaaaagtttgtagaatttaaaatctgactattaccatggattcctgtttactcagactttaaaaaataaagtatattctaatgatcaaggacctatataaatgatatagcatatatataatgtgtataataaatagtatgtattaatatatagtatatgtcactatatgtaatatagtgtgtatgtatatatatttatatgagtattttaaaagagacttgaaagttaagtgctgggtgtggtgggtcacacctgtaatcctagcactttgggaggccaaggtggacagattattttgagcctaggagtttgagaccagcctggacaacatgatgaaaccccgactctaggcgtgtacctgtagtcccagttacttgggaggctgaggtgggaggatcacctgaggccctggaggttgaggctgcac

SEQ ID NO: 135137 - DNA, 1019 bp, Homo sapiens
aattagcagtgttaaatagaatatgacaggtattaaatgaattgtaattttcctgtgaatttttattccaacggacattgccatgataactcataattacttgtgctgttgtatattgagctcctactgtgtggcaaggcctatggtaagcattttattttggtaacttgtttaatcctcattacaattctgtggtaaatgctattatctgtttttatattgaagggatgaaatggaggctcagagggatatgtagtagctaaatgttagagctaggattgaaacccaaattgacttctgagtatagatttccccccaactgtatgatacttcatatttggagtcagcttgaagtaattcacaaattgtaattttttttcctattgttttctctttaggtttctgtcaggatgaattggcagagcttgacccaggcactagtaagttctcaatgttacccaatattctttggtaagaaaaggatgtgtgtgtacacttttaagtgaataacttaaggtgtcattgataagccttactttattgactctcagattttatttcactttaatttgtaattataggaagggcactctgtcttttctagttatgctttcttctgatattattcagtggccaggatctatctgtttaatagaaagttggtttgctgaaaatttctgtttaacaccagtctccttgctttgttctccatccttccatgaaaccaacaaaaataaaaattgtactttgaagccaggcgtggtggctgacgcctgtaatcccagcactttgggaggctgaggcgggtggatcacctgaagtcagaagttcaagaccagcttggccaacatagtgaaaccctgtctctaccaaaaatacaaaaatcagccgggcgtggtggcgggtgcctgtagtcccagctactcgggaggctgaggctgaagaatcgcttgaacccgggaagtagaggttgcagtgagccaagaacatgccattgcactccagcctgggtgacaaga

SEQ ID NO: 135138 - DNA, 1035 bp, Homo sapiens
gctaatttttttttttgtatttttaatagagacggggtttcaccgtgttagccaggatggtctcgatctcctgacctcgtgatctgcctgcctcggcctcccaaagtgctgggattacaggcttgagccactgcgcccggcttaagttaagttcttttgttcccatttttagatcggggaaatgcctatgggaccacaattagtgtttaaatcacaggaatcctacaaatgttattccctttaaacaatttctcctttctgtaaaatgggggctacagtgggatggaagagattaggaatgatttatagtttatccttctagttttttttaaaaaatctaagaatcttgataaccccttaagggttcctcaagtgttagcattgtatgatttgtaccccctattatacacaactgcaacttttgataaactcatggactttagagctgaaaaatgatgctaagaaaattgatctttcactgaggagaaaatctaagtacagagggagtagatcacttagccttatacaaatggcttattaatactgaagcaaggcatcttgcctagtatatcactttattgatatcttaatattagaaacttgctttaacatcaaagttggtatatttgcatctctgtataaagagagtttgcaaataggaatttaggtgttatccttttcaagctttggggtgtttcgaggaaataaggttgcaaaaagtagcttttcaattgttggatttgtttatttctgtaatttggtgctattaatgtatgctaaaaagttgaaaaggggaatcaaacaggatttttgagtggattaggaaattaaattccaggaagagagaggagcagtcataatagtctaggattatagggtgattagatgccttgagcttgatctagggatatttgagagagaatgaaaatgtcctggtgattgactatattattcgaggggactgttgggaagggtggtaaagtgggagcccaggaggagtctttggggatctctggcttgggggatgagagttgg

SEQ ID NO: 135139 - DNA, 2044 bp, Homo sapiens
tgaaatcgtgtgagcaataaggttgttcagggtaaataaaatgagatctctgaaatactcttttgcctgaaatatttccacggtaatgtgactcaacctctgaaaagcagatctttgcagaaaggagttactgtagtaatggtagacaaacttcagcagtgggagggcaggggttaaaaattatttcagcaaattggtaggatgtagtgataactaggtgcattagagcctgagctttaacgttagacttgggtttaaatcctgtctattcttgtgattttttaatgtatttttttgacagttgagtggaaggggggtggagatactgggtggagggtggtaaaaggatgtggaatcaccacattgattattggagaatgaaatgaggtagtttatggaaaacctggaatgtagctgtattactttacaaaagtttctgagttaatttccttatctgtaagtaatgttaatatcatcgatctcataggtacagcagaccagtttaccacaatccaagtcattgaaaaccagtttcccagatgttcagtttacccagtattccattcaataaaagacagtttgctgaatctaatctgtagaccttacagaacccgttgttcatctcgtttttcttaaatgctccccaccatttttttcctttttgtttttcccgtttcctatacatcatttctcccccatgccctgcagcccagacaaggatgtatatttctaccagcagaggtcctctctgcttcagctctctccagctgcagtgtagagacaaattgaacatcttaaaaatgctggtattccaacggtcagttctgacttggcagaaatccttaaaaggtaattaactgtctcatcaatatgaatttttataaactgtccaaatatttaaaacaaatttttgacaaatttagagaattggctatttggagatttggcaatttggtcagttgacttggaattatctcatataggtttggaaaaatttggcaatatatgtaaaataaagtgcctattactcacaatggtgggactgtagtaagtactcagttggtgttccttttcttgaagcattcctactctgagttggaactcctcctcccaaggtttttctcccctgtgggctctagtttgacaatatcaggtgataaaggctggttatgaaccacctagtgactttcttttccattacagagttgttgaatttgcccaaatgaaatactttattttggcttggacttgttataaaatggtccttccttccttggtgccctttagggtttgacttctcagtgatttaagatatgtgccccttttctgtagcactttattcccagtcttgcttgtaagtagaattatgagccttaggagagtagactgcagctttatcagggtaaaagcaaggctaggtccctggaggttcttagtgggaagtattagaaccagagcaaatgctcctgtctctgatatacaggaagcccagcatccccatcccctacccaaagtctctctctggaggtctctaaaaaggttttctggtaatatccttaaaagggaagggaacaagtagttgttgaacactcagcactaggcacagagctaaactaactcatgtaatcctttccataacttttctttggataggtggtgatattcccttattatagatgagtaaactgaggcttagagttgaaaataaccttctactaaccactactctgctaaaccagtatttttaaatcttcagtttttcctgtatcaccacatgatttttgtcattttctaatatattgcttatttaattttttaaatattgaatagttaacattctgcaacccaacatttattttaaaatgaatttttttattagcttaaatgaaaaattatttgccacaagtagaaagtaacaatgaaaaaaatttaatgaaaatagaattgtgttaaattctaaatgctattgtctgccaaggtctctgaccaggcctttgatagagagattagtaagcactagagaggcactagaaaaactaacacc

SEQ ID NO: 135140 - DNA, 2369 bp, Homo sapiens
ggaatgaaggcgttttgagttactcaaggcaggagtacaatgtcttttatctgtatcctaagcactgagaattggtgttccatgaatattgaatgaatgaaagaggcaagtcaggaatatgagccttttgcttatctcagagtcccttgctggtagtcagagtaagtctacaaaatataagggaaaggaatgtgcttttcagctacttgaggaaattggggccaatatctaagtcaagcagtgtgtttaagctaaatccaaggtttgataggccctcctggaactagaatgtagtttctgtttggaaacatggttctcctgtaatttaaagtgactagatatcccagattaagacgagatggccaataaactagtggctgtttgcttgactgtattcgggaatgcagtttaggaaaaggtggcctttgtcccatgtacctttttaaaattctgtctcacaaaagaaatataagagctaggtgtccaaaatttataaaatacagaaggtgatttcctaatgaaaagagagatagtgagaaagatgtaaaagaggataggcagtgtgggttaatagattatgttagcaaagtagtttgaataggaaaagactttagagaggagcccaaacattgaggagttatgaggcccaggagatactttatgcctaggatctgattctagctctgtctcaaatgcatgtctctgtgggtccacctataaaaatggaggagctaaattagataatccctgaaaggattttccaggtttatgatggaatgaattgggcaaaacaggaagttgcaatttagaaaagttctgcctaaagcaaatagctgtggtactgactgcccacattctctgggatgattttgatgtcagatactgttcaatcatccctctgagaatatttacatttaccaaactgtttccctgttctgctttagaacccttggctgctttaaagtctgtgagatcccataatttatctgtaaatttcattctttgagtctgccttatagaaatgtttacagttacagttctgatgttatgataatttgtaatgtaaatttgaaataaattatggagtatttttgttgtttaaacaagatcacttttttcatttataacccctccatgccacactttctcttttttgagtacagtttcatttgctgagtcaaactcatagttaattttagagtttttcctcattccttgtaatgggatatttatctgcaaaactcattcagcattgagaagagtgctgtcttcctaagattaaatgcgcttcatttgagaacgttgattcattaagggaaattgcaaaacagaagggaaacttccttaaatgctgctggtctgtaaaaagggaacccagcaggaaaggggagaggtgcatgggggaggggtgaagtgaagagtgtagcagggtagctgcagttgaaatattcatcaatcattttactggcaccaggaaaccaatcagccttttagggagagaacttaatcaatcacctaatgtgggaaaatacaattgctttcccacaaaaaaatattccctttcttggtgacagatcgaatctgagagatactttggttccctggaattcagaactgactgcaagcagttgctgaaagtactgctgtgaagaagtgcatttaacatttggagataaaatttcctatctgctgcgagccttttcaaaatatttcaaaataagtttgcttttcgtacagtgtgcccatcaaaaaataaatactgagcaagccgaagtgtgtgaaacactgtaaatttattctccaaagctagtttcagagcatagataaggactcctggctggagaatacccgatgtttcaaatgccttgtttggaaagcagggttaaagcgttgtctaaggaacataccctgggaaacacagttggaagtgcttgcatataaataaaagcaggaaagatacagctgcatcgtatatttaggttttaaatacttgtgatttctgagggtctgtctgtgcttgaattgcctgtggcccttaggtcctttggttcttaagatgtgagctgcttaagaatccagtgtttttaaaattaatgcatggttactgaagagaatatggaaaacgaagggaaaataacctataatcctaccactaagcaactttcattaacattttcttctagacctcaaatccaaggttttttttttttttttgcatttttttagtcatacagtatatactattacgttttctgctttttgtttaattttaaatgttttttctcctgttataaacttcactcattgaacatcaagttatttgaaactttcgatagctgtatgacagcccattgtttttcattgctggc

SEQ ID NO: 135141 - DNA, 1026 bp, Homo sapiens
catgcacttgtatttttcaaaaagacttttccacttaatgtcatccttgatgaagcagtaaaaatgatgattaaatcttgacccttgagtacatgtacttttgatattctgtgtgacaaaatggaaaagtacatgccaagcacttctggtgcaaactaaaatggttgttttaagacaaagtgcttgtgtgattatgttgtgatctgagccagctacttttgttcatggaatacttgaaataattaaactatacttgattcagccttgggcatttggcagactatttttttcttaaacgaacagtgagtctgtcatatcaaggaaaactgacagtattggttgccagtaaataaaatttgagctttcaagcaacaattagttttggaaaacttgtacttgccactaagagcttgacagcttcccaatgattaatgtcttctgatgagatggatgatgaaataaatatgattttcgatgttatgaaatgtgtcaacattttgaaaatctgaatatctcagtaattcagtattttccaaaagatctatgtgtgatattacaggatcctacacagctaagagatctgttcaaaatgccagattgatcaatggattttaatgtaacggattacacatagttcattgatatggttttaaactcacactgaactaacctttaagaaagtaccacttaattgagttttggtgtagtatcaaagaagactatccacaattactttaaaaagcaaatacttcttccttttccgattataaatctgtggggccagattttctgcctgtgcttcaacaacaacaaaaaatcacaatatactgaatgggtaaacagataggagatctagctgctaggattaagccagatattaaggagattagcaaaatgtaaaacaatgccactcttctaatttttatgttttattggacaattttatttttcataaaaatgttatttgtactaacgtgaatttattaaatttaaatggattatcaaatattttaaatttttcatagg

SEQ ID NO: 135142 - DNA, 1020 bp, Homo sapiens
agtggttgtcatttgagaaagcaaactgagagaaaatacgttgtgaaaatagcctactttgaaacttcatttgcattttggaatttttgttcttaaaaaaattataggaataattgaactcccaaatttttatcttgacagaagcaaactggccaaattcttacgtctaaatagaaaattcctggatttcctaaaatttttttgctttaaaaatttcgggggctgttttaatattgacagtcacgatttcaaaagagaaatgattctaattataaattcacaggagggcttcaagtgttctgagtttctttaaggagtgtgtgtttgggacaaataaagttatgcaatggagtagttttcattcagggtagtttgtggtttctccatcagcattatataatctcaaatacagaatcacggattcttacgtcttatactaaataaaccatacaattcgttacattaagaattaactttaaaaaagtgtctttaaatgatgaggcctttggattctaattgtaaactctacacccttcaatttgtttacaccagagaagctattcaagcataaaccacagatggcagtagcagtatatttttctgtttctggactgattcttgcctttaagttggtgtcagttctatgggccctgctgataagtcagctggcaggtgtaatgtttctaaaaccaattccctgggcagcaacatgtaatgtattcagggaaacaaatccaggcatttgatttgaagatatactctgtgggtggtttgacccagaatagtgactttgcactcactgcccaagtgagaaattattttaaaaatttggtaatagtgattaagggagttgttagagtaatagctatagcacattggaattgtagtggtattattagcagagaatgtatctaacagatatttgcttgaacaactatttgcattgtaaacaatttataactcattaaaaatatactcaagattcatattttgagagagaaatgcacaactaaattcttc

SEQ ID NO: 135143 - DNA, 1110 bp, Homo sapiens
tataagtaattaaaagcatattttatgtaattacactttagaggaaatggggagaagttcactgaatagcacggtgcctttttcttctgctataaccatgccgtccaaatgtttatgctggaaaataaattggcaaatatttcccatgatgatttaacttttcagttctgtgatttaaaaaattaagttaattctgagttgccccagaattttttcctactcccattagaaaaaaacaaaaccaaaaacatgctgtagtactgttgtttcttagtacatacagcacgcaggtttttcttttttttttttttttctttttttgtagcttctgtgacctccaaagacggctagggtagaagaaaggcgacagtgagcaaattcactggtgattttgcatagctgaggtgggagatgaccacatttacagtctccagtgtacaagccaccaaatcattcagcagttctgattcatgtaaccaaaatatgatgacatgattcctaatctataattcattctgacttccgtagcaaaaaggtgtatgcaaggcacatgtgttagtacatgaaagggagttggatggggagctaatgaaaaaaataactgctggtaaatttccaaaaatatgtccaaatcatgcatttccatattttatttagaattttctggtttctcattccctacttttttcctagggttttggggcaaaggtggaaaatagagtttagattaaaataccacattttagaatagtagaggatggtaggtagaaatgccaactgttgctgtaacattggtagaggaagtttcttataccacccctagtgtttgttgtgcaagttggctttaaattgctaatgatgcttgcatgttttggagcttggagctgtgtttcatttgtgttagtgggaagatttaccacttcatttttataattgggtagatattatttattggttatgttgaaaaattggtttgttaatgaattgtgttcagatggcaacttctagcttaagaattgcataaagccaggatagattctcccacattaggagacttcattgtcagcaaattcatcgagatctttggggctggtcataatctttgcttct

SEQ ID NO: 135144 - DNA, 1049 bp, Homo sapiens
tttattgagtctctatcatgtaccaagaatcggacttatattagaccattgaggacaggggagcagggagagggatagatggattggggttggggagggcagagaggggccctgtcctggggctgtatagggaagtgtgtgtggcaggagatgacacagatggagtagaaggaacccggctgtgcatctgcgcacaccctgcactaccatgctctggctctgtgacctcggataggtcgcataccctttcacaactcagcatcttctgttacgtggcggacagccatgctggcttcctagattccgtgggagcctcatgggctaacatcagcatcactgggcacacagcaagtgtcctggacatgcagctcgggtctgcagatagagcggcagcatgggattgtgggaggagcttgggtgtgagggccgtgtagacagcttagttttgtgaccttgcgcaggtaatttctgttctctgagcctcaattccattgcctttaaaatgagataatgattattgtcacaaggatttttggaatgagatggcgtgtgaaagcacctggcacaggatccgagaccttgtggcgatttaaaagtatgagttcctttccccttcagtgaagcagcttctatacttctggatcagggctctgtccagagcagtggttgtgagcgattttgcacccttcccctccacccccaggaaactggagacattttgatggttacagcttggggatgccactggaatccagtgggcagaggcctatgacacacagctaagatcccacgtcagagaatcctgggtccacagtgtcagttgtgccgtgattgaggaagatctagaggagatcaagggctgggcaggattccctcagcaccacagcctgttctctgaaaaggcctaaagccagccaagtatgacagccggcttcacaaatgataggtgacttcagggaggtcctccctgcgccccacatctcccaactgctgaaggccctcacccatcaatgggccgagtgattgctggacgcgtggtgctgagttaa

SEQ ID NO: 135145 - DNA, 1004 bp, Homo sapiens
gcaactgtcctggaggggtaacttgatgtaaaattggattgtgctcacttgcacctgcttggtgctgagcactgtatctcccctactggatcctcacagcacccgtacatgtgaactggaggtcgttctcatcttctcattctaaaaaagcggaaaatgtaggtacaaagggagacctcctaactcttcatcaatgctcttcatcaattaaactattaaggaaattaagatgtgctagaacttctaagatctatcgggatcaatgaggtcccaactgttacctggaaagagtttatcaatctaacagaagcttttgccaacaatgagccagtctccacccttaccccccaacctcagttgcaatcctgacaacacattctttgctgagttctgaatacccagcatgcaaaagaaaattacaatctgggttaggtccccaaaggtgacacctattttaaactgaattacatcagccaactttcatttcctcgtatgaaacactggcttcagccaaaaagcttcaaaaatagaacaaggaatggcttctgcccaatcgggtctctactcctcttcatgcagtgatacccacgtgcagacaggaagggccttcggagcagagctgaatctcctggcttccccagtatgagatccatcttgagtgagctgggtctgcgccaccaggcaagccactcccagcgctggttccccagctccctgcttggctctgatccaccttccacactcaagaggcagtccagtccctctgtctttcagttctggagttccttttccccatccaaacaaggccagcctgatatcagccactgataacctctactttgtaactcctttttttttttgagacggagtctcgctctgtcgcccaggctggagtgcagtggcgcaatattgcctcactgcaagctccgcctcccaggttcatgccattctcctgcctcagcctcctgagtagctgggacgacaggcgcccgccagcacgccca

SEQ ID NO: 135146 - DNA, 1281 bp, Homo sapiens
aggaatcctctttcgaggatctgtgacgggatctaggtcagggaatgtcccccctgtctctggcaagccaggctccccttggccagccaggtctcatctgacacgttttcttttcctgcccccacaggccttagcagtaggaggactaggctccattataagagttcttacagcaagaaagactgtttaaaaaaaataaaaagactcatgttaccttgagaagaattctggatgcccaggctggtgaagaagggattgacaatggaccatcttcctaggaactcccaagtaaactatttcaggacatgtatctgctgaaatgtattttattttcaaggtggaggggaaaatcgtctgtttcctaaatcctgtttaggatctgatagtctatgcctttgtctccgagtactgcagaactgacattttgacggtctaccagcgtggcggctggtgttggtcagatgcacctgtgtgcactgggggagggatggtttgggcaggtgcagatccaagggctgtggtaaacgggagagcttgtgtttttgaagtggaaaaaaacccaagagtttgtacagacatcctgtcttcccagagaaggtggacactcttgggctcattgtaaagtgcctgctgcatcaataaagctcttggcttattagtctatacattgcggtgtgtttcgtgtatgtaaaaaaaaatggtaatgaatgggatggtaatgaatgagagttcagttgttgttccggaaacccgatgtggaaggagtagacctgtgtccctgttgagccacccctgggagcgagcatggcaatccacaggccctctgccacaggacgccagcctcggcctcagagctgccggctgctgcagagaggtgtttgctgaataaactatttattgtttcttattcctttgatttgtatgtaattaattttggagcttatttaattaatttaataaagtgccaaacatttaataattgatctaggctttaaaagtcttcagtttgtgggattgcacttggaatcttttgagggtggggcctcagatgtgcctggtcacgtctcctgatgctgggttggctgtgctgcagaatcactgctgcatggacaagctttctttaaagaactaaacgtcagaaatggggagcaatcaatcagcaaatagatggtataatttggttccccataaccaataacagagcttctctgaagggcaaaaatgcttttctttccttttcagcacatgtgactgcagcttgcattctgttaaaggttaggg

SEQ ID NO: 135147 - DNA, 1082 bp, Homo sapiens
tcaaagtgcattaaatcacttagaatatttattccactcttcctcttaaagctgaaggaaattcaacatgcaggaggaaagcctagtcagtgaagcctccctaaagtgagtacagacctaggaacgggccccacagctacacctgaaactgccgaggagtggggcctggggtgcgtgtgggaccagttcaatggctggagaagccacggaggcagcggatgggcttctgtggaaatgtagctgcctttggctggctgtgagctacccagtcttagagattctttcctggaacagttgaaaaaggaaatcctactttgaaaaaaggctacctcttacccatcaaacttgcagaacagaagagactcctgtttcgtgttcccaccaggtaaatggaaattcgtgttctaaacaagggataactgtctgcaaggaggagccagaggaggaggttagtcactggagaagcggcctctggaaggcagagagcctgagctgggactaaggagatgctgccctgacttggttcttcatggaaatttcgttaggttaacgttgcaaatgcgtgtttttctgtgacacattttatatacctattttggccctaagcatgattgagaaatacaactttccatcactggataatggataataaatttagaggctccagttattaatttagttttttatttaaccagtgaaactttcatcaaacaataaacggtttccttttagattcaatattgtggcttttccagaaccagcatgttccctttcctcagtaaacgaggaatccataaaacaagtttttgttggttactaccagagtcatgtgcatgctacaagtgctgcagccagctgggcgccgtctgggtgtagtgtcattttaagtatttggggtgggatgagggagagagagcagctccacagacaaggcagactgccccagtgtctccatcgaggctgggggacagctgctgcccccactggagacagcggactgtccttcagtagaagacaggtggtctgcatcgcccagcggcagcgcagcacagaatcaagacaaagcacacgagatcccactg

SEQ ID NO: 135148 - DNA, 1032 bp, Homo sapiens
tccaaaagcgtctgcataaatgctctaataggaaaaaatacctgcagttccactaccttgttcctgtcaactcagtgtttttctctcatttccctcctgtactgagcacgggcctgcagactggttactggcaccatcttcttgctctgctcagagccagaggcaggatgtgtggggggcaggagtgacaggctcacgggaggggaggggcggttcagtttccctggcaccaagtcctgatttgcatctcagaagccttttctgtttcaaatgcagatgtcatggtttgggtccaaaccagctcccaagggcagcatccggccgtctatctcaaaccctcggataccatggtcctagaggggactacccaaggatggagctccgtgggttgacactttttctgtgaaaagaacactgacacaccagtctgggtgggtttttaatcactgtaactgcagtattttgtacaagtgtctaaacattgtttacaagactaaggcccacttccctgcaggctgacctgaacctcagggggtagctgatcctgtcattctggtcaccaaacaggagggtcctggcactacccagatttccacagtgctgctaatatcccagctccagccagcaccccatctgcacctgaatcctctaacttcacggtagcacttacagctgaagccatcagcatctggcaggcacacctgagtcaccatgtagcgctgctactggaggtagagacggccctttgagatggtgcccagcaggccaaacccacctgcctctgccaggaacagccaactccatgggaactctatgggagtggcttttaaaaattcagatgagttagaagctttttatcccttcctctcaagaaaatattctttcaccctgtctctcaaaccacctagaactttagaggatccatctttaagggtcggtgtggatgaatgagaaaatgcacctttctgacagtatctccactttacttaagaaaactagcaaatatatgaaaagacccttagtaccaaatac

SEQ ID NO: 135149 - DNA, 1075 bp, Homo sapiens
ctgtgttacccaggatggccttgaactcctgggttcaagcgatcctcccacctcagcctcctgaagtgctgggattattggtgtgagccaccgtccctggtcattacttcttcttctttccataaccaattgttccagtcccccactccattcacgtggcctgcgagtctgacttcttgttcttggctactgtccttagaccagctcttcaggataggcccctagccttggtgtgggtcctggcgggggtgctcgtggggcaatcgatcctcagtggtgtgccatttccagagaagtcggtgggttgcctgccaggatagctctgagagggatactgagggcatggcagggaggggccaggctgggagcctgggaagtggggagcatgttggtctggctctgcaaagccatgccctgtctgctgggcttcttgcgtggcatacagctaaaaaactgtgaactaagttttggggctcagtggttttctgcattgtaggaagaatggagccaaagagaaattgtgagcgtggccatggctcaagccctggaggaggtgcggaagcaaagggaagagttccagcaacaggtgggccctgtttcacgctgaggggcgatgtccccctgcagtcccacaggcagcaggcccatcctgccgtgagactgttggagagggcctgtctctccagggtagggtagtagactcaggactcagggaatgcagtcagctgcgtgggcccctgtgctctctaggaagctgggagacaaatgttataaagaaactcttaccccataggatgcccttttctgatttttcaactataattacctggaaagtggtccatgtccacgggcctagtgggctctaattctgtgaggtgacctatcattgcccacctgccccagaggccacgtaaggttgggttgagtttttgcaggaagtatgggaaagcctcccttgaaggtagactttgcatctgaccccagagcttctagttaagtggctttaggcctttggtaagtccttaacaaatctgagtctcctctgatgaggactctagccttctacttacacctc

SEQ ID NO: 135150 - DNA, 1043 bp, Homo sapiens
gtttagtccttgcaggagacctgagaattatgcactgtcatcctcatcctgtagacgaggcaagctcagaaagattggctcagtagcccacaggctcgcagccagtaaatggcagaatccacatctttctcctgtcaaagccctgttcttcattgctgtattatactgcctccccagtataatttctccccagggaaagccgcagccactgaggcaacactgagtagtgtgaaggaggcctgtgtctaagggctggctggtgcccagagctgtccccacacaccttgaggatggagtgatgacatcaagactccatcttctggacaggccagggtccaggagcaacaggcagagcctgcaggggggacctcagcaacgccaggggggatggggtcaggagagagttgtttctgttggatactcatcttctcacctagggccagactaagatcccccactggaaaccattgtcaccctgactgaccgtcctttggtctccccgcaggctgccgccaaccaggagagcagccatgtgcagcagcaggcccttgctctggagcagcagttcttggagcgcacccaggcgctagaagcccagatagtggccctggagagaacgcgggcagctgaccagaccaccgcagagcaagggatggtgagtgaagagctaagagagggtgggcccaggagcaccagggtcccccacagcgaagtcagcctcgtgcttgacagtgtgtcaccacctctgcactaggaaaccactttagaaggcagctttttttttgtttgagacagggtctcactctgtcacccaggctggagcacagtggcatgattacaactgactgcagcctcgacctctcagactcaagtgatcctgccacctcagcctcccaagtagctgggactacaggcgtgcaccaccacagccagctaatttttaaattttttggagagacaaggtctcactgtgttgcccaggctggtcttgaacgcctaggctcaagggatctgcccacctcagcctcccaaagtgctggaat

SEQ ID NO: 135151 - DNA, 1055 bp, Homo sapiens
ggtcattatgtgtatcagcttgtctctatccagttgacccctttatttaggctaccctcaggttttaataaaatctagtacccatcccttaggtctggattaggaaatgggttctcaccacagcttcattactgctgtgttgagtaactgggagaaatccctgtcatcactccctcagcaataaatcatacattttgtgtagtctaccctcaatcatatattctttgggtaccatccaagaaagatgttagtagaagtagaaagttattttttttgttgatatgtactaaaacttttaaggaaaataaagtaaaagaaaggttttttgtttgttttgatttttctttttgtttttaattctgataaagtggtagtagccatcacttagcatcagctttgatgttttctggcaacctacctaactcagtgttctatcattgtaccatttaaaaagttaccttttggcatctttgtaaatatatatacttgtctattacaaaaaacaaaaacgataaggaaacaaacaaaaactgtggtctattaccaaggccaaaatattcttctggaaagttgaggtggatccagcttttcctagtatcacaatccacttatgtgactttggcctttttcattaggtgacagttgtaatcacatgggctatttgtcatgctgtttctgaagtgttttcatatctcaaatagagcctctttgttaacagcttccatgcggaaatttcaagagcagaatgagacattccaagccaacagagccaaaatggcagaaggactggctttggcattagccagaaaggaccaggtattttatatgtggcactgcccagaactggtggaaagatttcacttagtgacgtgatttcaaaaatcatgacataacctatagaaaatatttatagcctaggagaagagaaatgttaaaagttcgttaaggttttctttggccttttcttgtaaagtgaagaaactttacagttctaatcatgaaatgtgtccagaatgtgagagtatcattccttgtatctgtgtagtttcataaaa

SEQ ID NO: 135152 - DNA, 1030 bp, Homo sapiens
ctaggatcccacggtctgtgagcaaggaatcagttgcctcaatgggagctgactcaggagatgactttgtaagtacctttacttaagaaataaagatacttttgcagggtattcttccaataaatattttaaattgcttgattatttcatacctttcatggtttatagctgtacaagagcctgtacatctgattcttcttactctgaggtacctttttgttaatgtttggtttgtaaatgttaaggtactctatatttttttccttatttttctgtgagttcctctccatattctctccagtgtcctcttgtactgtttttccgtctatataccttatacatcttcttttgcatttcatttctgaaaatgtctgggcctgttttcattgcagacatatatacttatataacaactaagtcattgctgcttaacaaggtctctgagttgtggtatggggttagcaagagtgcattgttgtattgggacgattgttggaaagatggccccagtgattacagtatgttgctttttttcttttttctttcttttttttttttttttgagatggattctcgctctgtagcccaaagtggagtgcagtggcctgatcttggttcaccacaacctctgcctctggggctcaagcaattctcgtgcctcagcctcccgagtagctgggactacaggtgtgttccaccatgcctggctaattttttgtattttagtagagacaggtttttaccatgttgcccagggtggtctcaaactcctgagctcaggcgatccgcccaccttggcctcccaaagtgctgggattacaggcgtgagccaccatgcccagcctacaatatgtttcttattagtaaaatacatttgtgactataagatttcaaaaaatgaagatgttgctatatgagggaaatgtcatgcttaaaaaataaagtgtggcttttgcatatgacaggatcctcttaagttagataaatttcttttctcttcttttttttttttttgagacagagtctcact

SEQ ID NO: 135153 - DNA, 1036 bp, Homo sapiens
aattatactgtcactatcatttgacttgaacatttgtggtattgtaaaagtcttgtcagttgtgttctaaattgcttaagccatacgttctcttaaacaggatgtttttttcttcctttccagcagcctttttcttctttgtctgttatggttaatactccatagattttagaaattgagaagttcttgaaacattttattttcttgagttcatcacttttgactcttgtatgagatgtgatttgtcataaaagatagccttccactacttcactaaatgaatttcagagtaaacactgtgattctgcagagcggattcagtaggctttccaatgttttctcctgctatacagtgcctaccaccttgagggcacttcagtactagaggatgaaaactgaaacgttgttttgatgtttattgaataacgagattagagaatatttgatttttgttgtcagtgtattaaagaaattttcacattgataaatgttctctaggaatgtgtctacattcatcaggtgtgaactcttgtacatgaattttgtaccttgaatccacatatatattaagtgtatcatcaatataaaaataaacattatttgcttaaagtttttggtactttttcggtattgacagctgaactgttagggtttgcttcattcaaatatctcagaggctttgaactatcttggggttgatgcttcttgttagtttgtcaatgtttgaatcctggttttggttttttccctgccctgctcctgcaggtcagaactggaacacgcgagggaagggactgttgaagaattgggtggaatctgcttattcttgggcttgtgttgagtctggggatggaaccagagttccttaaggtggaatggctggcttggcattgacgagttcagggacctgacttagggtactgatttggaccgtgactttttgtttgagatagagtttcgctcttgttgcccaggctggagtgcaatggcgcgatcttgactcactgcaacctacacctcccgggttcaagcgatt

SEQ ID NO: 135154 - DNA, 1067 bp, Homo sapiens
gacgggaagggtgtcaggatgatgtagggtgatatgcctttaattggataaagagaactgtattaagtataactaatttaataactgattgaagcaccattcttaattttaaaatatttttgttaatttcttttgtggttttaaaaattaataatttttttttttttgagatggagttttgctcgttgcccaggctggaatgcaatggcgcgatctcagctcactgcaacctccgcctcctgggttcaagagattctcctgcctcagcctcccaagtagctgggattacaggcgtgtgccaccacgaccagctaattttgtatttttagtagagatggggtttcaccatgttggccaggttggtctcgaactcctgacctcaagtgatccacccgcctcggcctcccaaagtgctgggattacaggtgtgagccactgtggccggcctaaaaaaaattctttttaatagttatcagactactttaaccagtgccatgtttaaacatacttggacaatagactcagtttttttaatagtttgaagtacattatattaaaactacaaactcacttattcaagcctaaatttcatcatagactataaattgggtatcaatttcctattttggtggacaattccagtctgtctactacgacaatcatctttttaggtgtaatattgtttaagacataggtaattttaggttttatacttttctcctaggcttatggaatgaaagctaataggatatcactttcagaatgaaatagggaattatggctagccttcttatagggctgccgtaaatgatacttaaatgtttgttatatcactgattttcttttctcttctgaagctgttgtgaatgtccactttgccatgattaaaagttgagatttgtaaacattacaatttgaaccataaattttctcaaacatgaaatcagtatgaataagtataaaatttgaaatgatcatacatgagaatcccaaaagtaaatacttccaaaccatagagggataaccactgtatttttaaaaagcttatttccacccttaaagaagca

SEQ ID NO: 135155 - DNA, 1010 bp, Homo sapiens
caggataatgggaaaagcgacaaatcggatttatgtattaggtattatggagctttctttagcactctcctccaagtttaatctctgacatgtgtgatatagtaactttctgtctctgagaagcagtttggacccagctgaaaaattttatttatggagacttgtaatcagcctgatatacagagaacactctggactggaaatatagtcaggtaccaaggtctgctaatttggccattgccagtgattcaaaaccacctccccaccctgagtaaaagatttgatatgaatatgaatgctatgagtctcctggtgatgttttgggtgtatatgttcctgtgtgtgtttggaaatcatagagggtatttaccttgagggctcttttgttgaccttatttatttgaaattcttattttatttgtaatggcatatgtatatttttgtgatgctacatgcaatctctgtgtatactttttgtatatatgtatacatatttgtaaatatattggtatgcagtgatacagtatgtgtatattatgtacccatacccattgtgggctgaatttatttaagttctgtgaggacatcctagtggcattgttcatgctgctgtaattaggttgtggctgtatctcattcataagcctctattttgagaggcttgtgtttggataaaatgggctaatttggagttgaaattaggatatgaagatcttaacagaaagctagatatttattcttagctttaaaatcacctgcaaatttttatttaaactgatgataaattagtgatataacctgaaaaacctaagtatgtgaaactgagacaccagcagattcttaggctgtagtagtcctttattttcttgatccatatttaagtattattactgagtagtaaattatgtatattggggcttaatagagaggctgtggaaaaaaattgctttaatcacatttaaaaacataggaaaatgtccattaaataggggaaatatattcccagttgt

SEQ ID NO: 135156 - DNA, 1098 bp, Homo sapiens
gcaggatctcagctcactgcaacctccaccttccagtttcaagtgattctcctgcctcagcctccccagtagctgggattacaggcatgtgccaccacacccagctaattttgtgttttgagatggggtttcaccatgttggtcaggctggtctcgaactcctgatttgaggtgatccgttggcctcggcctcccaaagtgctgggattacaggcatgagccaccacgcccagcctaaacatacagtttaataaatcctccttgtaccttacccagcttctgtatttctttaatcaagggagaagaattatctaaaaggacagttgcccaatgggcttgagctgatgatagtggcaaagaatttcattttttaaaaatgcataccacctgccctttataaaaaaatttaaaccctaatgtatttaattttataattcataaaaatttaaatattggaactaagaacagagcaaagcaaagggaaaaagcactcctttgttttcaaattgcacaaactgtccctggagattctgatagtctctcatctctcttaactatcactgtaaacaacatagaaagcataagactgcaagaagtcagttatacacaaaacaaaatgaagcacagtggaattttctctttctttatctgtatatttctgaagttggtaaagcaactatcttctctattttacagaagagaaagctgagacccaaaaagctattcatagtgatagagctagaactaaaactcagatctcctcatctcagcccagtcttctcagtagctcagactgctttctataatgaacaagaaagaataattagggatttgtattttggcacaaaacagtatcaaatttttattgtaaaaatccacaaatctgacattttatcttttattctagccaggatgtattcttcatttgcatgtgtgtgtttctcttagaaagtggtgctctcaaacctttcaaagcacagaatttattgtaccctctttatttttaccaaattgaaacgtttcaggatttcagaagcaaagtgcaatccaattgtggctggagttttcctgatagaggatccgggtggttccctcccc

SEQ ID NO: 135157 - DNA, 1914 bp, Homo sapiens
gaaattatccagaatcatatccacaactgccaagggatgaaacagtggagaatcctcatctccagaagcacattttggaattagcatccattctggatgttcgaaacgtgttctttgagaataccattgatgactattaaaacaaaaaccctgttgtcgaaacaagttttcattttccacaaattttaaatggtgcagttttctaacgtgataagacacatagtggtgttacttagtttttattttttaatttagggccaccattttaaaaacaaacaaaaaaatgttcacacttttagggtaactgttttaaaatgcaacctttcaggtcttttaaaatcttaaccttggaatttttattttttgattttgagggatggatatttacctccaacttctaatcctacactcaaatagtcactattctcaccctgagaagagtaaatcatttatttttgtataatgaggtaaatccaactcttatacttggacctaagttaaatgtctggatttggaaatatgtaatggttcataatgatgaagctagccaccatggactactgaaaatcaagaacagagtccctccataatatattttttctcattccaacttagctggtagaaaaatgtttgatcctttgaaacatgatcaagccagttttttgaaatcatttaatttctttcaatactgtcataatttcagaaattggattgaattgcatctgaaagctacatcttgattgaggacttgaggtggtaatattacttggaatgtatgagtattatgagatttatttgcatattttctttgtagtctgtgaatgctggaaatgaaaaaggaaacaactttgaaatattttagtcaaaaaaccatgtcattggtttcataatacaatgtctccaataggaattctatttaaactcttggtttatgagatcacatttaaagactggattgatgtctgtgacataaagttttaattttttgcctcattcaaatttatgagacttcaaagtcatagatgttttaaattttggtaaggggtaactgggtgttatgaaacctaaaatgtaagttgattttgcattggtaatttggaaataagatttattaacattccctgtatttagtattttatattcatgcacaaaatttttattatcttaaataggactcagtgtatattataaagatttttcttttttgtgttttccttccctgtcattccctttataatttcacagtcacttgctatgaagtcctccctcctttttgattatgcagcattcaatttcagaaatctatgaatgagaaggccttatacctaattttctgtacaggatcacatctggcagtcccaggagaagtgagctgattgcttttgatatctctttcccatggccctaggtaaattatactctaaatttatttattttttttgaaacagagtcttgcttttgttgcccaggttggagtgcagtggggctatctcggctcactgcaacctccgcctcccaggttcaagcaattttcctgcctcagcctcccgagtagctgggattacaggtgcccgccaccatgcctggctaatttttgtatttttagtagagacggggtttcaccatgttggtcaggctggtctcaaactcctgaccttgtgatctgcctgcctcagcctcccaaagtgctgggattacaggcgtgagccaccgcacctggctattatttttaacttggttttcatttctggcatagagactaatttgggtctaagttattcccattcctgctttgatttgctgatttttcaaacctgaagtccaaagttactgtttttggggtttggggacttggggagtattttacttttttttttttttttttttaagagacagagtcttgctttgttgccc

SEQ ID NO: 135158 - DNA, 1262 bp, Homo sapiens
tgtgcaatgggccaggcgcagtggctcacacctgtaatctcagcactttgggaggccgagacaggagcatcacttcaggctaggaatttgagaccagcctgggtaacatagtgagacctcatttctacaaagaaatttttaaaattagccaggagtagtgatgtgtgcctatagtcccagctcttcaggaggctaaggtgggagaattgcttgagcccaggggtttgaggctgcagtgagctctgattgtaccactgcatgggccaactgtgcagttccacttaagacacagcctttttttttttttttccaaaaaataaattggaaaaattttggagatttcctacagtttggaaaacagatgaactacatagcctaggaatattgaaaacattgctcacctgggccctgcggccagcagaattggccccgctctatggctgctggggcctgcgcactggaatcgccgtggcctgcgcaccccaccatgccagtttgaacctccatggcctcaaccagattcggaatgtcaaaaagcagagtgtctatttgatgaatttgaggaaatcgggaactttgggccacccaggctctgtagatgagaccacctatgaaagactagcggaggaatcactggactctttagcagagttttttgaagaccttgcagacaagccatacacgtttgaggactatgatgtttcctttgggagtggtgtcttaactggtaaactgggtagagatctagcaacctacgtgatcaacaagcagacaccaaacaagcaaatctggttatcttctccatccagtggactcaagcgttatgactggactgagaaaaactgggtgtactcccacgattgcgtgtccctccatgatgtgctcgctgcagagctcactaaagccttaaaaaccaaactggacttgtcttccttggcctattctggagaagacgcttgatgcccagcccggttttaaggatattaaaagctgtcaggccaagaccccagcttcattatgcagctgaggtctgtttttttgtttttcgttttttgtttttcattcctgcttttgaggaacagctctgtggaaagaacgtgttgcctcctaccttgcccacaagttttgatttttaatttctacagaagatttttttggattaattgtctgatttcctccctcatatgatatcctttatcttttataatgtcttatccctatacctgaatataacaacctttaaaaaagcaaaagaataagaa

SEQ ID NO: 135159 - DNA, 1032 bp, Homo sapiens
gaaaatagggagatggctggagatagcacaatgactagtagccagctgcaaagatactaagcccatagaaccatagaaccaacaggactttgtgatggactaggtgtggggagggaaggcaggaatagacttccaggtttctggctgagatgctggtagaaatgataatacctgatgagaagcatatttgtagagaacaaaaggggaaataatttgctttgagttgttgacatgttgagtttgaggtgcctttgagaattaggttgaatagagtagcctagagcagcagtacttaaaagaagtaagagtgtgagtcattaaattttctattacctatatcaaaaacagtaaaaagaaacaggtgaaattagtgttaacaatgacattttgtactaaagctttgaaatcatctagtcacattttactcatctagtcacatttttagtgtccagtattttactcatctagtcacgtttttagtgtccagtatctaccgcaagacagagcagtgccagacctaaggaattcaatttaggctgctgatagagaattagaaatttgtaggcatataaatggtaactaaaatcatgggagtgagagcagtcagcaatgtatggggccaaagaaagaaactactcatatttaagagataggaagggaaagagcagctcatagagagcaactcagaagagaatgaaaaagactggcgtttgtagcactcatcagagaattctatcaagataacccataatccaacacttgccatatttggatgaaatttgttaattgagagcaaaaaatagtaagaaatatcattttccatttctcttaagttttctaggctctttctgaagtttgttcagcagaaagcaacatagcaaagtttttgtagtttcgtgaagaatctgctttgatgaattatgatttaatgagatagctttaattttatatattatcagtatattaaaatgttcctcatatgtatctcttatcttttgcaaaactattgtctatatatataacatgtttgtt

SEQ ID NO: 135160 - DNA, 1050 bp, Homo sapiens
gtcagcttgttactgtaaatcacagattcacattctggtcttttatgtcattccatgagagcagttattatgacccacaataagagatgactccaggaatcaggttttggagctgaaagccagatcctggatcttggaaagttcacctttatatatataagtgtgtgttgctcgatggattggcctcttggtatacagccagatgacttctccgtgcaaaactacaatcatgtttatgccttgtgtttaaaaaatcagtagttcactcagtaaactatttcaattgagagcctttaagaaagcctattatgcatggtacttatatatgaatggcagtctccttagctgttgctgatgtttctgcatctatttatgagtttaagggcccaatctatacactaaaaatatgctttggaaaattactaagtaactatctttggtcaaatctttaatgcaagttttaaattcttatatattacagaatttcacaaacttgtttggacagccactagtctgcttgctttctcctacagcatatccaaaagctttacaaggtatgtaccctcattgcctggtatagccataggttgcaaataaacactatctatattatgaatagtactgatctttgttttttcctcccataatgatcgcgtgtggatttatggtgtttaatatggcaggtgtcgctctgaaatatacccagaagccttgccaacaaccaggatcccttaatgtgctaccgttaggccttgaaataattcatccctgagaaagaagtggttttgttccttgctgatggggaactcatgatttgtaaattttaaaatttgttttataggtgtttgttttgatttgctggtcatatccatatagcatggttttcctatacctttgcaggcatgttttaaaagatccaaggcatcttttaagactttaagattgctggtctaggaaacttctcagtctatgccacagagttaggataacctaactggcacaacttaaagtgtttcttttattcacatttttaccttgttgtgatttaaa

SEQ ID NO: 135161 - DNA, 1022 bp, Homo sapiens
ctcttgtaccagcaccactttaattactgacgtttttcttctgttatgttttgttttgttttgttttttgttttgagacagggtctcgctctgttgcgcagggtggagtgcagtggcacaatcagagctcattgtagccttgacctccctggtgcaagtgatcctaccacctcagcctcccaagcagctgggactgcaagcatgtaccaccacatttggctaatttttctattctttgtagagtcggggtctcactattttgcccaggctggtctcaaactcctgggctcaggtgattctcccacctcccaaagagctgggattacagtcgtgagccactgtgccgggcctcactgaggtgtaaagtatgtttcaatatctgatgagtctagttccccctctgctctttttcagagttctcttggggaatccagtttttccatatgaactttagaattacttttttcaattgtaggaaaaaaagtctgtggttatttttattgaggttggtttaaattttaataagttagtgtaatgacattttagaattgttttatctctaagaacatagtatgttttggctgggcgtgctggctcatgcctgtaatcccagcattttgggaggccgaggtgggtggatcgcttgagctcatgaatttaagaccagcctgggcaacatggcaaaatcccatctctactaaaaatataaaaattagccaggtgtggtggcatgcacctgtagtcctagctactggggaggctgaggcaggagaatcgcttgaaccagggagacggaggtttcagtgaaccgagatcgtgccattgcactccagcctgggcaacaagagcacgactcaaaaaaaaaaagaacatggtatgtctttacatttgttcaagtcttcattcaagagtattttaaaaaatgtttttgttgtttgattttttatttctttttaagtttactcctaggagttttatttttcttgttgctttaccacacagcttatgattttacttccctt

SEQ ID NO: 135162 - DNA, 1060 bp, Homo sapiens
gaaaatttctgtaacgaaatattagagaaaaaggtacccaaagccctgaagtacatgtgaaagtcacaactagtaacgtgataaaagtctttaaagtctgcgtgttgcattaaggctaggttgtgtttgtttttttttttcttgcaggttaagttcagtgaactaactgttgacatgttccggatgttacaagctctggaaagggagccaatgaatttagcttcccagatgaataaaccaggaatgcaggtaatctcctcttttacatttgcaagtttggtaaccctctggctgcgtctctcctgttggaacgctgattattcaacagatactacagccttgaataaagaattcacttgatgagacatggagaaatagatcatcacagtaagactgagtgtgaaaataagacttccttgataagggctagtgaaaatagatattgataattcatttgtcaaatgcagcttttatgtataatgttttctgtgtgtaaatataggaatcagctgacaagcctactagacgagaaaacccccacaagtatctgctctacaaaccaaccttcagccagctatataccttcttagcagcgtcttttaaggtatgtgtgatccagtactttttactatgaggtgaaagtgtgccctaactaaaatctaagagtcactcttttgaaaaaatacttaagagtttaggtaaaatataaaaatgaaaaactgcctttagagtaatgatcctgataatagatatttttgttttgttttgtttctttttttttttttgtactcctggtaagctgtgaaatagctgtttgggaatgaaaattgcttatgatgttgtgattattcccatcattaattaatgataatagtggttctccttcctccagttttttattactcaatgattttaggtgtaacaatgcagaattggccaggcgtggtggctcactcctgtaatcccagcactttgggaggccaagccaggtggatcacctgaggtcgggagttcaagaacagcttgaccaacatggagaaaccccatctctactaaaaga

SEQ ID NO: 135163 - DNA, 1127 bp, Homo sapiens
tcatgtagtactgataggaagtagatctctgtaaagactttatttgatgggtgttattctgaagtttgtacttttgaagaaaatttattagttttcatctttgttttttgttataatcaggactgtgtattgctaataatcaaattttgtaagtatgtcggtttctgtcaggaatatggttctatatggctgtgtgtttttatgggttttttaataaccttttttgtgatgtttttaaaatcaggaattgtcagatgaaattgaagattatactcaccgatttaatactgaagatcaagtggaatggaacttggtgcttcaagaagtagcagctttcattgaggtcagtttttgataagaaaaatcataattattgataaataaatgaccgtgtagtttatgtttttattgtgtgtatatgtcaagaagaaggaatagcttactctattgatatttagtcttggccattcgttaagttcttattgcttttttctttaggcggatcctgtaatggtattaaatgatgataataccattgttatcacatcgaatcgccttgctgaaacaggagccccattgctggaacagggcatgattgtgggacagttgtctctggctgacgcactcattattggtaattgtaataatcaggtaaagaattgtgaaggaattatgcttaaaattcactgtgaaaaatagtgctattgatgatcacagaattattttcttataaatatcctaacatcctcttgtgaggaaattgctgattaaattatgctgtgtgcatatatggaatatattacagatatttaaatagcttagaaagaatttttaataacatagaaagatactcgtgatacagtaaatgaaaataaacttgccatggagccaggaagcagaattatttcatatatgttagaatgtctatatgtatgcacacaggaaaaagacgaggaagaaatgttacaactatctaagttttatctccaaataaccaaattataggggatttttattttattttttacaacattctaaagtttccaaaatttctgacctggcacagtggctcacacctggaatctcagcactttgggaagcccaggtggttagatcacttgaggtca

SEQ ID NO: 135164 - DNA, 1063 bp, Homo sapiens
ccaagtaggtttgtcttgaggattcaatgcaagaatctgtgtaaagctctcagctcagaatctggtgcataataaacagtcaataagtgattgcttttattactactttttcttcccttccaatgtgaaaacctgggccacttctgacatatatgttgcaagttgcaattctaagctaaatgttggcaatcaccacaagagacaagagctacttctcatagatctgtagaatacactgatatttgtgctttaaaatcttacattaaagtatggcagttccttaaaaaattaaacatagagttattatatgatccagccactcaacttctgggcgtgtgcccagataaattgaaagcaggtacttgaacagattggtacaccaaggttagtagcagcattattcacaatggccaaaaggtgcacacaacccggatgtccattgatatagatggacagataaacaaaatgtgttatatccatacaatgggatattatttagctataaaaagcaatgaaattctgacacatgctacaacatggatgaacgttgaagacactatgctgaatgaaataagccagacacaaaacgacaaatatgattccacttatacaaagtacttagagtagtcaaattcatagagacagtagaatttaacacctgttactgacagacacatgatttcctcatattcattactcactcaaagtctggaatgttcaaggccagccagagcctaagccaaagtaccagtgataattcttatgttttgcttaaacataaggtttgtatttgtttttctttgaaggatgaaaagctgccgtctgtaatcctagcactttgggaggctgaggcgggtgcatcacttgaggccaggaggtcgagactagcgtggccaacatggcaaaaccctgtctctactaaaaatacaaaaaaattagccaggcatggtagcgcacatctcatctactaggcgggctgagtcacaagaatcacttgaacccagaggcggaggttgcagtgaactgagatcgcactgctgcattccagcctgggcaatagagt

SEQ ID NO: 135165 - DNA, 1045 bp, Homo sapiens
gcccctttgaagactattattattcaggaaacaaaacagtgttgacactaaatttttttttttttttttttgagacagggtcttgctctgttacccaggctggagggcagtggcattatctcagctcactggaacctccaccttgcaggtttaagctattctcctgcctcagcctcctgagcaggtgggattacaggtgcccactgccatgcctggctaatttttgtatttttagtagtacattaccagtgtagtttgtttgtttgttttttgacaaacaaagggttttgagaaagatggagtttcaccatcttggccaggctggtcttgaactcctaatcttgtgatccacctgcctcaccctcccaaagtgctgggattacaggcctgagccactgcactggcctttttttttttttttttttaaagtaaaacacaggatcagaaatctctttgttttgcatcatttgtgcaatatttgttttgtttgttttttccttaatgtcttgagagccagcaaagattatctgacagacagaattagactgaaatctcttagggaggttgtgaagtatttagagttaaaggctagagttaagaataagcagtggcaaaggtataactataaacctcaaagtgttactgacttaggattcattcatgactcttctgcattaagattgggagttaacttttaaaaactaggtacctccgtgaaacatgtatgcatcttactggacactcctttgtcgtttttccaatcacttctgccagatgggttttaatataataggaagaattgttacgatgtcagctctgttgtaatttggactggaatgattctgttctcttgtgaacttgaagagtccagttgaatcactttctagttattgtctttatttttttattgtagtttttaagtgtttgtttctacttgtggtaataatcctgttaggatgcatattaccaactatatgtgaaggcctggctatatggagcataaaattagatatgcttctttcctttggctcacagtctaaattta

SEQ ID NO: 135166 - DNA, 1052 bp, Homo sapiens
ctcagttcactgcaacctctgcctcctgggttcaagtgattctcctgcctcagcctcccgagtagctgggattacaggcgcctgccaccatgtctggctaatttttgtatttttagtagagacgggatttctccatgttggccaggctggtctcgaactcctgacctcaggtgattcacccaccttggcctcccaaagtgctgggactgcaggcgtgagccactgcgcctggctcttcctcctgtttttctttatcatttgactctgaggataattacttgtaggccattgaattcatttcatcatggggaggagaaactccaggttattgtctttaatctctttactccttgttttttacaggaaaactctacttaataaaaaccaataaatactattaacaaaaagtcaactttggtatattctggcatacaaccaatgtattggtatgacagattgtatttgccaaatgtgtctacagcagtatcgttcattttacatgttctacctacaatgtcatcttcacactcctcccatctagtggtgaagcctgtgtctcagtctcttaaccagagcagacttttgtaaatgcctttaccagtagagcatggctcaaacgacgtgtcacgtttagggctaggttataaaaatgccatggatttctaactttctctctggagtgtcacttttggaatctggctactatgtgaggagcccaagcaactaggagtggcctgtgtaagagggaaactgaagctcctgactctcagccccagctgagctcccagctgacatctgggatcagcttgccagccatgtgagtgagctgtcctaaaagcagatcctaatcttctagttccccatcacagtgccctaatgagtgcttatgtagtgtttatatgtagagcagagatgagttgttcctgtcaaactctacccaaattgcagattcatgagcacaataaaagattgttttaagccactaagttatgtagcaggggataactggattagcattccattttgccggagtttagagatcatactatacg

SEQ ID NO: 135167 - DNA, 1223 bp, Homo sapiens
aactctttttcaaccccttttcttggctttttgggaagagtgggcaaaatagagccaagtcagttatgatggttcattttatgtgtcaacttgactgggccactgagtgcccagacatttggtcaaacattatcttaggtgtgtctgtgaggatgtttctggatgaaattaatatttgaagtgattgagtaaaacggatacccttccgagtctgggtgagcctcatccaatcatttgaagacctggctagaacaaaaagactgagcaagagggagcttctcctgcctgactccttgagctgggacatcagtgttttcctgcctttggacttgaaccaaaactttggctcttgagcatggtagctgttgtattggaacttgcgccattgattcccttggttctcaggcctttagacttggactgcaactagaccataggctctcttgggtctctagcttactgactgacaatcttgggacttttcagcctccataattgcatgagccaattccttttaataaatatctttttaaatatatatacctctgtctctgtctctctacctctacctctgtctctctcctgttgattctgtttctctggagagccctgactaatatataagcctagtcttttattgccttacttttgtctcatttcaggtttttcagagtgctcctaatctctgagaacttctgcattactggcttaattctctgcattgacgcagtctgtcatgaaatggctatcttcatgacaaaccaagcaaaaggagaggtgcttgggttttcataaacttggcagctgttttggaaacattttactctaaggctaggcaccactgtttgtattcttattttgcatttggggtttctttctcctaagttctctctccatatattctcctggcctggaaggcatgtgtgcctgtttgacagtgtcctggaaattcttttctagacggggagtgcatgttgaaggtgctcacacgtggtttcctaaaatcctgcaaagtggcagttaggacttttgtttgtttgtttgtttctttgtttctttgagacggagtctcactctcgcccaggctggagtgcagtggcgtgatctcggctcactgcaacctctgcctctcgggttcaagcgattctcctgcctcagcctcccaagtagctgagattccaggtgcccgccaccatgcccggctaattttttgtatttttagt

SEQ ID NO: 135168 - DNA, 1098 bp, Homo sapiens
gatgtgactgagcacattgtctaagaggatatgaggcgttgaagcctggggattctgatgtacaggcttcagctttgcttggtacaacacatgcccatttctctctgaggacttgggcactgctaggacgtggggttgcaggttccctttttgtggattctgaaggaattccttcttctcagataaattgctcccatttttcttcttatttctacctaacccccagctcccgccaaaggcactcattgttctacccttcttccctcagtataatctcctcaaggagttcatattttcagaaaacatgcacaaacctcccttgaggcaaagaagcaaataggactatcatcttggggattgggaagtaccatgataataaaacatccattgatgtcttaataacttatctggctacttatattttcatcagtaattctagtccctgtagtgggacttaatgatctatccaaaaatgatttgattttcccttctttaaaagatggagctgaattctcctcccttgagtgtgggctggacttagcgatgcacttctagtgaatagaacacaggagaagtgatgagatgtctcttcccagattgggtttttaaaagactggtttctgccttgcatgtgtgttctctctctctctctcacacacacacacacacacacacccacacccacccacccacctcactttgcgggaggctagctggctagctcagattgggttttaaaaaaactggcttctgccttgcatgtgtgttctgtctctctctctctgacttctgccttgcatgtgtgttctctctctctctcacacacacacacacacacacacacacacacccccaactcactttgggggaggctaactccatggtatgaggcagcactgcatagagggaaggcacttgccatgttgtgaagacagccacccaggcagcccatggggagggccatgtggtgaggaagtgaggcctgccagcaaccacaacagctagcttggatgtagatcttctgaggcctgctggcagccacatgactggctcagaaaagtgagcttgaacagggatcctcctactctagttgagcct

SEQ ID NO: 135169 - DNA, 1049 bp, Homo sapiens
gttccctctttgctttggttttttgtttttagggtttttgttgtttttgttgttgttgttgttgttttttaaagacggtctcacttcagggtggagtgcaatggtgtgacaatggctcactggagccttgacttctcgggcccaggtgattttcccacctcagcctcccaagtagctgggactacagatgtgcatcactatgcccagctaatttttgcattttttgtagaggtggggttttaccatgttgctcaggctggtcgtgaactcctgggcttaagctatctgccttcctcagactctcaaagtgtttgaattataggcgtcagccacagtacctggtctgctttgggtttttgtatgtgatttctttttctttctggagtactttctccttgctccttgacaagccccctcctttaagactttgctcagtgagggcttccccccaccctccctctgctccaccttattgggtcccatcatggcctgtacatacacttacatgaaatggtctgggctgaatttgaattcagctctgtcaaatgtagtttgcgagatcatgtgcaagttaataagcctgtctctgcctcagtttcctcatctatatagtagaaataatagttctgctggcgtggtggctcacgcccgtaatcccagcactttgggaggtcaaggtgggcagatcacctgaggtcgggagtttgagaccagcctgaccaacatggagaaaccccatttctattaaaaatacaaaattgggccgggcacgatggctcaatcctgtaatcccagcactttgggaggccaaggcgggcggatcacaaggtcaggagatcgagaccatcctggctaacacagtgaaaccacgtctctactaaaaacaaaaaaaatcagctggacgtggtggcaggtgcctgtagtcccagctactcaggaggctgaggcaggagaatgacgtgaacccgggaggcaaagcttgcagtgagctgagctcataccactgcactccagcctgggcgacagcgagactccgcctcaaaaaaaaa

SEQ ID NO: 135170 - DNA, 1008 bp, Homo sapiens
tggggtgggggccagggagcgggcccaggggcagcggctcggggcggtggagcattcggggcgcagagaccggaggggcggggggtgcaggctggggggaccttgggggcgcctgcaggcggcggcgcgggctgggcgcgatcgcctcctcgaggccaggtgagaggggcgtgtgagggaaggggcgccgaggggtgaggctggcggcgcggggccgggaggggcaaggcgggcgcgcccccggaggggccgtggaatgcgggggtcgccgggcccggagaggcggggcgtggagggggcagtgcacggtcgggaacgggtgggcacaggaaaggggaggctaggggggcttgcgggggtgacgaggcagacaatgagtaggtggaggtgggtgattttggggagctgggctgtgacgagcaggggtcgaggatggggtgagggaccaggaaggtttgagctcagggggaattgggggaacggtgagtcccaggaatgctaggtcttggtaaataggggaaacagggcatgaggcgtttgtaaggtcagatctgggcttggcgagcctgtggtcccagagggtggtctatttagttcttgactggcacggtagcgccgggagatgttttcttgtatgttacttttagttaccgtcttatttgtttggtctgcagactgactggcacagtggagaaaccgcctcgaaaacggagaagcaggtaaggcagtgccttcctattttgcttcatgtttttctttttgcttggctgcacctgtgccgtactgcataattgtatactgtcagtagatgaagtttcttatttatcccccttttaaaagaatataaccacatgcatgatttttcttttgaggacttcaaattactacctctacagtcgattttttttttcttggtatctaagataatgtgggaaatcttgagaaatcctacttttttactttttgatgttgtgtaaggatctcagctatttttttttttaaccttag

SEQ ID NO: 135171 - DNA, 1030 bp, Homo sapiens
tttttccctcaaaccacccagctccttacatagtttttaattatatagctatatgaaagaggtggctaagacatttgctgcacacacttgaactaatgttgggtcagtagcttcgtgttactgccctgatcccagtgtaattcaggtggaaaggtatttttatctcacagggatatgtagctatgtattttactaattgtgaaacactggaaattaatgatgcagacaacttggtgtggtctttgaacagctctctgcagtatttttttttttcctgttaccataaattgtatttaagtgcttgctttccacttaagttgtactaatagaaccggtaactcccagccctccctgtttgacactccttagcttagattgatgtagttgtttttgttatccctataatgtgacttttatttttaagtcattgtgtactgcatttgtttgtcactagttgggcacgtgccaataatattctctccattccttatctgccatctctgttttgcctgatttctcttcaactgaataatggctttttgcatggaaaaaatagtttttactattagacgtgtaaagggaagagagagctaatgtattggactttgtgagcctacaaggaatattttggatccctccaataaataagggctatgtactatatgtactatatagagttatcatgtggtggaagatacttgcaagtcatagatttatgggcaggaggatttgttactccctatatctaggctgaatgtaaaatcccttatgttgtatcaatgggggtaaaaactatttttatttgcctatgatatacttggtttctaataaagtgccctaggctctagtgagaactgtctactttgaattgccatttactccctttcctcctttggccgatatgctcttggctagctttttataagttaatgtgtttccccaaaaagtttcactactttatattcatttgagtgtgatcctaaaacacctggatcaacagtacatctcatatgcaatctgcatcagctcc

SEQ ID NO: 135172 - DNA, 1039 bp, Homo sapiens
cctcttcttaccccaattttcttgtattaccctctacaatatactttttattgagcactttgctgctgaaatgctgcctcttgcctttttttttttaaattttaaattatctaaatttattgtttgttgtggtgtctatagcaaagtttttctatcaattttcccccatcccatccccaccctggactcatttgagaagacttgagaaatgtcttaatactcacactgctgcatgtagctcttgcttatttactggtctgggaaacaggatgtgtttcctttttttaaaagccaattgacagattacacctaaatactcctccttttgtatcattcagccttttgttttagtttggtaagttttaagaaatttcagcagcaaagttgttattcagtgggcacgatggactccaaatgcctcaagttatgtatacctgtcccagatgtaaacttcattgtcctttgttggatgatattttaaatggatataaaataaattggtctaaagggctgccctccttgttgtgtttttaaattttagttaaaaactgctacagcttatgactttgtactttaagataattgtattgatcttttttcagattccttgtattttttaataaagtaatcttaaataaaactcagataggttaagtgttagaaattttaaacagcttacattgttagcgtaaagttatcttttcttttttcctaatcagagttcttgaccctttggttattgagtttaaaacttcaattgaaattcaatagtatttatttttgaaaaaaatcactaaactgtgcctaaagaacataactgccatattaatgttttggtttatatcctctatagtaatagaaaaacatttaatacttgtaatgctgatgtgttaatttgataccagttgagtagaatgtgatcaatccagtttacaatctatcatgagtattattaactaaaatctatgtgcttttcaataggaatcattcttctcttgctgtaacacttgaccttaacttttagaaagtgttcattttt

SEQ ID NO: 135173 - DNA, 2839 bp, Homo sapiens
tatgaaacaaaattttgtgttttctgatttaataataaagatattgctatcagtatctaccatttactgaaggtttagtatatgtagatgttgcaataattctgaaagagattattcttttgcaacttaaggaaacaaaagctcagactagataaataacttatctaaattaagatacactgatgcaggatcagaatctagttttttgacttcattatgatgctggagcacttcccaatataaggggtgtgtgtgtgtgtgtgtgtgtgttttaattgaaaacagttgaaagttcaaagtgtgtgtgtgtgttttaactgaaaacagttgaaagttcaaagtactgcctatcttgaagatggcggagtagcatcgcaaagagattagtattgagtctctgggccgactttggttgcagtctctgcagcagcagtgatcacttagtgaagagtgcttagggtagttggccaggatcctgaatatcaaaatcttcagcggcagctcccaccagggcttatctcagaaaactgccgatcgcctgggcctggagctcggcaaggcagtgattgagaaattcagcaactaggagacctgtgtggaaattggcaaaagtgtacgtggaaaggatgtctacatcattcagagtggttgtggcaaaatcaatgacaatttaatggtgcctttgatcatgactaatacctgcaagactgcttcagcgagccagcttactgcagtcatcccatgcttcccttatgcccagcaggataataaagagtcaggtgacaatctcagccaagcttgttgcaaacatgctatctgtggcaggcgcagatcatattatcaccatggacctacatgcttctcaaattcagggcttttttgataacccagtggactatctgtatgcagagccaggtgtcctgaagtggataagggagaatatctctgagcagaagaactgcactattgtttcatctgatgctggtggagctaagagagtgacctccattgcagacaggctgaatgtggactttgccttgattcacaaagaaggccaatgaagtcgaccgcatggtgcttgtgggagatgtgaaggatctggtggccatccttgcggatgacatggttgacacttgtggcacaatctgccatgcagctgacaaacttctctcagctggagtcaccaaagtttatgctatcttgactcacagaatcttctctggtccagctatttctcacatcaacaacgcatgctttaaagcagtagtagtcaccaataacataccccaggaggacaagatgaagcaccattccaaaatacaggtgatcaacatctctatgagccttgcagaagccatcaggaaaattcacaatgaagaatccgtttcttacctattcagtcatgtccctttataatacagtaacttctgaggctttttaagaataaaatccaccccaccccttgttttcccttggtatttgatgacgaattcagcagaagacccagcttgctccagtgtagctttctatatcccacatcaggtatatctgagcttatccgaaatgaagaaagaaggattgagattaactgctgggacttcctatctgcattgtctcattctggcttccttgatgattctgtgagccttgcagctttaactatagctcagctgttacaagatttcagacttttgaggatgttgtgtgggggtgtttgactgtgactggagaagctcagactactctgcatgtgaatgcttcagggttttctttgttgagaacaaccagcagcaaagccaacccatgtgtgagcagttctccccaaggtctatgctaaattatggcaagagccctgggcaaccccaaacctagtcccggtggctgagcaccctgtaaggcaggagtaggcagttgggcttgagcagccatggggtagggggtggggggtggttgaggggggaggcagcacagcgcagcaaatgtttcttgggaggaagaagcctgatccatcatcatctgcttgactatgtagcttggattctcttttgtacctactcctttgatttggctttaccttcatccatcttgatcctttcctggccaaagatcctcttgggcccaaatgaacactgtaccgtagtcttctggaaagcaaatgtgcttcctgctatgtaatcgctaacattcacattacatgatttgctgtagcttgatcttccttagcctactaccactgtggcagtaggttttaggtggtatcatagtgccttttgattaatttaagtatttaattttcatcttctttctttggatctatttggcttttcaaatgaacagagatttctgttaaaaagaaaaaaaagatttgacgtaggctgggcgcggtggctcacgcctgtaatcccagcaccttgggagaccaaggtgggcagatgacctgaggtcaggagttcaagaccagcctcaccaacatggtgaaaccccgtctctactaaaaatacaaaattagccaggcgtggtggtgtacacctgtaatcccagctactcgggaggctgagacaggagaatcgcttgaatccaggaggcagaggttgcagtgagccgagattgcaccattgtactccagcctgggcaacatgagcgaaactcttgtctcaaaaaaaaaaagattcatgttattgtctcttgtagaggaaactaataaagtgtctgtatctgtgtgatttgaggtctttgagaaaaaaaaaaaaaagtattgcctatcttggtcttgccattttgttacttaactacagtacttgaaaggaaaggggctggccgggtgcggtggctcacacct

SEQ ID NO: 135174 - DNA, 1040 bp, Homo sapiens
tatccccatggttaagggacatacaactgtatgtagttagtcactagcgttcttttggctctatgtggaggtcctagcaggactaaatatgtgtcatatcttgctatcctagtttaagctgaatttctgttgtactgaaggctgctctagtattggatatattgtttatttttattagcagattcattaattaaaacccttctgtttctttcacagatgagtgccaaaccaaatatggaaatgctaatgcctggagatactgtaccaaagtttttgacatgctcacagtagcagctgtaagtttctatttttaaagtctcatgtacgttcctgccaataacacattgcatatttttatctagttgtcatctcaattatattgatatctttagtattcactgatgagtttagatatgcctgaggttatatgttcaactctttgttatccttttttgctagttaatagatgagcagattttgtgtgtccatggtggtttatctcctgatatcaaaacactggatcaaattcgaaccatcgaacggaatcaggaaattcctcataaaggagcattttgtgatctggtttggtcagatcctgaagatgtggatacctgggctatcagtccccgaggagcaggttggctttttggagcaaaggtcacaaatgaggtaaagccaacatttttggaaatgtaatttgtggattgctaatgggctgcatagagaactatggtggccctagataacaaacttgtagtctagcttactcaaaatatggtggctgtggatattaaatttctagtttagttattaacgtatgtctttctttaatggttaaataagatgacacagtgaaagcacctactccagcatccatttggtaataatgtataaagtaaatgttctttccttttttttttgtttttgagatggagtcttgctctgtcgcctaggctggagtgcagtggcgtgatcttggctcactgcaacaacctctgcctcccaggttcaagccattctcctgcctcagcctcctgagt

SEQ ID NO: 135175 - DNA, 1083 bp, Homo sapiens
cacacatacacatttgctatagatgtttgcttttcttttggaatgtaatgttactgttgaactttttctggatccttctctcattttctttccttctgaaagtttctgggtcactttcttattttttttttttgagacggagtctctctctgttgccaggctggagtgcagtggtgcgattggcttactgcaacctctgcctcttgggttcaagtgattctcttgcctcagcctcccgagtagctggtattacaggcgtgcgccaccacgcccagctaatttttgtatttttagtagagacaggatttcactatgttggccaggatggtctggatctcttgaactcgtgatccgcccacctcggcccctgccttggcctcccaaagtgctgggattacaggggtgagccaccacgccggccactttcctattctttcagctgttttcctattggtgtaatattggcccaagtcagacattaatgggaagtgtaaatagtatattatcatatatggttgttaaatgcaaaactgagcctagaacgctgttataattatggtatttgcttttacaaaaaatttttttcttcaagtaggcaactcttccaatacagttaaaatgattcttaaaataaaaaattattttacctgggcatggtggtacatgcctgtagtcccagctacttgggaggctgaggtgggatgattgtttaagctcaggagttctagaccaacctgggcaacatagtgagaccccatctctaaaaaaaaaaaaaaattgaatttttaaaaattaaattacttggccgggcgcagtggctcacgcctgtaatcccagcactttgggaggccgaggcaggtggatcacctgaggtcaggagtttgagaccagcctgaccaacatggagaaaccccgtctctactaaaaaaaaaaaaaaaatacaaaattagccgggcttggtggtgcatgcctgtaatcccagctactcaggaagctgaggtgggagaatcacttgaatccaggaaggggaggttgcagtgagccaagatcacgccattgcactccagcctgggcaacaagagt

SEQ ID NO: 135176 - DNA, 1025 bp, Homo sapiens
atccagtccagtcgcggtggagggcctcccccattgccagtcgacccggtcctacccggcgtcacgccgagggtctcgcgagccgagtcgtcgaatgctgtcccggttgcctcagtggggatcccgagggatgtcgcggcctctgtcccagggtcgccccttctggccttcgggctgccccaggacccgcagctgtaacagctttatttagaaggctcggctccccaccccatccctgggtctcccgcagtcggagccgagcccccgcggcagtgccctcgggatggggtcgcctccaccggaggtgacaggagcgcggagtggccggcgtctgacaggagatgccaccggctaccggaacgcggcctcagtgtgtttaggtctctgaggaaggggaaggcggtgggcccgagtggtttggtactggcgggagcgaacgtcaggtcgtccctcttcattgccactcctccaaattgctttttaggatcgtcggttttgctaattcagaggtgaatcccgtttctgagtatgttgttgagcttactgaagtggataaagtagttggttctcaataaatacaaatactttctccttaaccccttcttaactcagtatttcattttcttcgttttctaaaggaggtgagttccttgttactcctgagtccaagtaagagtaaatgtatgtatgggtaaaggaatgactttggtatactgcttttcttttttaaaactttttaattattattattattattattattattgtttttaactgagatagagtctcactctgtcacccaggctggagtgcagcggtgcgatcttggctcactgcaacctccacttcccgggttcaagcgattctcctgcctcagcctcccgactaggtggaattacaggcgcccgtcacgacgcccggctgttttgtatttttagtagagacggggtttcgccatgttggccaggctggtcttgaactcctgacctcaagtgatccgcccgcttcggcctaccaaagtgctg

SEQ ID NO: 135177 - DNA, 1034 bp, Homo sapiens
cctcggcgtgacgccgggtaggaccgggtcgactggcaatgggggaggccctccaccgcgactggactggatacccggcgggggtcctggagaaaggaagggccggccggcgggcgccccacagccggaaggggcgagcccgcaaatagggctcaccttcaggtcgttctctggcaggtacttgcacagccgcgctatttccacatacttgtccaggtctagcggcgccattttaagaataacaagccgcggcaacagcggcggcggcggctgtagcagcggcggcggcagcggcggaggccgaagccggaactttccctgcgtcacgtccggcccgtgagtggcgcctgcgcagcgccgttaaagcgcgacccgtttctccccgctacgtcggtacgcccggcgccccctctggctgaaccccgactgcaggccccaagagagcccgcttcggtccaccccgcgaaacctgctgggacccgtagtcgtctgccgcgggggtgctgggatgtgtagttttctgttgtggacagccacccctctcttttcctcccgttcctccagactttcacctcccggcagccggcgaggcttttccgaggcaaaacagcggagtaggtggtcctagccactcactggtttgtttttccaacccttttaagcactctccagaatatcttcacttaacaattgggtaagcctggccgtagtaaccgtttgcacctttccaagtccctgtgaaaacctcgcctaagcctgtggcagagatgtcaggccccagtcttccagcctgaaaggaagggaaacgaatattattaaagcatttctgatgctaaatgcgatacaaatgatatttttccttttaatcttcgtaacgattgataggaaagtgaggctaggaaactgcagttcaccccaaatctcacagggaacaaaatggtggggtcaagattgaaaaatggcttaagcttaagcatgcttccagtgagaatcccacgagggcagggagttttttgctgtaactccagcaccga

SEQ ID NO: 135178 - DNA, 1078 bp, Homo sapiens
agcgccgggccctcggggcggagcagggaagagggagcggttggcccggacgctcttccgggtcctgggaggagggcccggacctaagccccgcccctccggggtggagtcacggctcgcgactggcctaagtcgccgcaggtattgcagtccggggctggagggtaggggcgagggtccccggataccgggtctatcacggtctcgggcagggagtctgaatcttttaggggagtgggcccaagccgggtgcaaagaacggggaagggccttccctggctccgtcccggccactttgaccgaatcagcctgttctttcccgaccccgtctcctatcccctagaactgccacgtggggatgagatttgctgggctggtagcggcggctgctgcgggaggtcccgcccacgtgaagccagcctaactgagctctggactttggggacagctgtcagtggcctaggccgcaggtgagatttatccattcatctctcaatctattttctttcttcattcactagccactcccccacttctactccatgccaggtccattggtaggttctcggaatggatctgacaggcccagccctctaggaacttagtctagtggaatttaatctagaatctagtctagaagccttaaatagataaacattccaaatgattcctgcaatggtgatggctaataccttcagagcccagtgggtggaagaaggaagtaacttggatgtgggtggaagagaaaagggcaaatcagggaaggtttcaccagggaagggacttttgaactgggctttgaaggttaactaggagtttgcaaatttcccagaagggaagcgacattccaaataggggaagcagaacaggctgcaaaattatgaaaaggcctgccatattacaagaacagcaaaaaaaccaataatgcaagagattgtggaggtgagttcacgggaaaaaagctcaacagcagaaggccttactttctatgctatgttgaggccaagatttatcccagagctcagtatttctcagcttctttaaatattttgtcctttgagcggagagcagtggctca

SEQ ID NO: 135179 - DNA, 1030 bp, Homo sapiens
acctcctgggttcaagcgattctcctgcctcaacctcctgaggagctgggattacaggtccccaccaccatacccggctaatttttcagatttttagtagagatggggttttaccccatgttggccaggctggtttcgaactcctgacctcaagtgatccgcccgccttggcctcccaaagtgctgggattacaggcatgagccacactgcacccagcctgactccattcttgtgcttacagcttttaaatcttggggattttggactgtcttggcaaatcctaagtatcatcttcattcttccttgatgtttgtgagtatgagatccctgcccaaaactatgctggcccccctggggattggagtttggaaactgacttcactcagccccagagtcaaggtcagaagcccctctacctggatattttaagtgcctgcattctctctggcccagaaaccaggacgtggaccacgccagaagtgaccagccccccaccatccccaagaacattccacacatcatcggcagccattggaaaccagctatatgtctttgggggcggagagagaggtgcccagcccgtgcaggacacgaagctgcatgtgtttgacgcaagtatggactggtgggcaccttggggctggtcagggccatcccagtttacacattacctaatataggaagcagaagttagaaaaggaaagcctgactaagtgtctcacttctagacttctttgttatatctcttagctgatatctttttcccacagcaaaattggcatttaaaaagggatagtgaggcctggcatggtggctcacacctgtaatcccagagctttggaaggctgaggcaggtggaccgcttaaggtcaggagttcgagaacagcctggccaacataccttttctctactaaaaacacaaaaattatccgggcatgatggtatgcacctgtaatcccagttactcaggaggctgaggcaggagaatcgcttaaacccaggaggaggaagtttcagtgagccaagat

SEQ ID NO: 135180 - DNA, 2286 bp, Homo sapiens
cctaggctggggtgcagtggcatgacttgcaacctctgcctcccgaatagctgggattacaggtgcccaccatcacgcccggctaagttttgtatttttagtagaggcggagtttcgccatgttggccaggctggtcttgaacccctaacctcaggtgatccaccgacctcggcctcccaaagtactgggattattacaggtgtgagccactgtacccagccaatgattagcattctcactaataatagcatctgagctggctcctagagtacaagaaaaaggagttcacagtactttaaaatagataaaattcagttgagttagtaacctaactcattgttagtactagttgctgctccttgtagaccaatatgaaattacttttagctcgataaaaccaaaagtgtcactttatgcttcagactgaaatgcggggatctagatgtgctaatgcttgtcagtaacaactaacaagtttttctgtatgtaacttctaggtgaaagacccctgacaaaagacaatcatcttctgggtacatttgatctgactggaattcctcctgctcctcgtggggtcccacagattgaagtcacctttgagatagatgtgaatggtattcttcgagtgacagctgaagacaagggtacagggaacaaaaataagatcacaatcaccaatgaccagaatcgcctgacacctgaagaaatcgaaaggatggttaatgatgctgagaagtttgctgaggaagacaaaaagctcaaggagcgcattgatactagaaatgagttggaaagctatgcctattctctaaagaatcagattggagataaagaaaagctgggaggtaaactttcctctgaagataaggagaccatggaaaaagctgtagaagaaaagattgaatggctggaaagccaccaagatgctgacattgaagacttcaaagctaagaagaaggaactggaagaaattgttcaaccaattatcagcaaactctatggaagtgcaggccctcccccaactggtgaagaggatacagcagaaaaagatgagttgtagacactgatctgctagtgctgtaatattgtaaatactggactcaggaacttttgttaggaaaaaattgaaagaacttaagtctcgaatgtaattggaatcttcacctcagagtggagttgaaactgctatagcctaagcggctgtttactgcttttcattagcagttgctcacatgtctttgggtgggggggagaagaagaattggccatcttaaaaagcgggtaaaaaacctgggttagggtgtgtgttcaccttcaaaatgttctatttaacaactgggtcatgtgcatctggtgtaggaagttttttctaccataagtgacaccaataaatgtttgttatttacactggtctaatgtttgtgagaagcttctaattagatcaattacttattttaggaaatttaagactagatactcgtgtgtggggtgaggggagggagtatttggtatgttgggataaggaaacacttctatttaatgcttccagggatttttttttttttttttaaccctcctgggcccaagtgatccttccacctcagtctcccagctaattgagaccacaggcttgttaccaccatgctcggcttttgcattaatctaagaaaaggggagagaagttaatccacatctttactcaggcaaggggcatttcacagtgcccaagagtggggttttcttgaacatacttggtttcctatttccccttatctttctaaaactgcctttctggtggctttttttaaaattattactaatgatgcttttatagctgcttggattctctgagaaatgatggggagtgagtgatcactggtattaactttatacacttggatttcatttgtaactttaggatgtaaaggtatattgtgaaccctagctgtgtcagaatctccatccctgaaatttctcattagtggtactggggtgggatcttggatggtgacattgaaactacactaaatcccctcactatgaatgggttgttaaaggcaatggtttgtgtcaaaactggtttaggattacttagattgtgttcctgaagaaaagagtccaggtaaatggtatgatcaataaaggacaggctggtgctaacataaaatccaatattgtaatcctagcactttgggaggccaaggcgggtggatcacaaggtcaagagatagagaccatctttgccaacatggtgaaactccatctctactgaaaatacaaaaatt

SEQ ID NO: 135181 - DNA, 2273 bp, Homo sapiens
cttttcatgtattatttaatgcttacaattccagggacataaaattttatatgttgtattcatcaataagttggcttaaaaactaaagtgatggtttgactgtaattttttttttttgagatggagtcttgctctgttgcccaggctggactgcagtggcacgatctcagctcactgcaacctctgcctcccgggttcaagcagctctcctgcctcagcctcccaagtaactggaactacaggcacaccaccacacctggctaatttttttttttttttttaattttcagtagagacagggtttctccacattgcccaggctggtcttgaaatcctgccctcaggtgatcctcctgcctcagcctcccaaagtgctgggattataggcagaagccaccgcctggccagactgtaatttaaataagggttaaactatgtgacaatacacttaattatcttttatccttttaggttacccatgcagttgttactgtaccagcctattttaatgatgcccaacgccaagcaaccaaagacgctggaactattgctggcctaaatgttatgaggatcatcaacgagccgtaagtatgaaattcagggatacggcatatttgccaaatagtggaaatgtgaagtactgacaaaacttttccctttttcaatctaatagtacggcagctgctattgcttatggcctggataagagggagggggagaagaacatcctggtgtttgacctgggtggcggaaccttcgatgtgtctcttctcaccattgacaatggtgtcttcgaagttgtggccactaatggagatactcatctgggtggagaagactttgaccagcgtgtcatggaacacttcatcaaactgtacaaaaagaagacgggcaaagatgtcaggaaagacaatagagctgtgcagaaactccggcgcgaggtagaaaaggccaaacgggccctgtcttctcagcatcaagcaagaattgaaattgagtccttctatgaaggagaagacttttctgagaccctgactcgggccaaatttgaagagctcaacatggtatgttccttgttttctgctttgctaatgagatctccttagactctgaattcaggacattgcatctagatacttagataacagacatcacagtaaccatgtcttttttctaggatctgttccggtctactatgaagcccgtccagaaagtgttggaagattctgatttgaagaagtctgatattgatgaaattgttcttgttggtggctcgactcgaattccaaagattcagcaactggttaaagagttcttcaatggcaaggaaccatcccgtggcataaacccagatgaagctgtagcgtatggtgctgctgtccaggctggtgtgctctctggtgatcaagatacaggtaggtcatcatcgcagcatctttcttagtgattcagtagcttgatggaagactcattagctattgctttagaaaataccagaatatgagcaacaaggtcacacagctagtaaagggtataagtgaagacaagactggggtagtctcaagatcattagcaactgtttaattcactgcctttaaaatgtgtgtgttagaacctaaccaaatgttagagagataaactttacatagctcatagggagaacttgaattaaaagttaaataacttatccttacaggtgacctggtactgcttgatgtatgtccccttacacttggtattgaaactgtgggaggtgtcatgaccaaactgattccaaggaacacagtggtgcctaccaagaagtctcagatcttttctacagcttctgataatcaaccaactgttacaatcaaggtctatgaaggtaattacttaagtttgttaatatcatggctttttttttgagatgaagtcttgctctgttgcccaggctggactgcagtggcacgatctcggctcactgcaaattctgtctcccgggttcaagtgattctcctgcctcagcctccagagtagctgggattacaggcgtggaccaccacacctggctaatttctgtatttttagtagagatggggtttcaccatgtttcccaggctggtctccaactcctgacctcaggtcatctgcctgcctccacctcccaaagtgctgggattataggcgtgagccaccacgccagatctatctatcatggcatattttaaaagaacatgacttaatatgtcctattgaaatggctagggaactaagtaactgctgttttcagatgg

SEQ ID NO: 135182 - DNA, 1548 bp, Homo sapiens
ctggatggaagctgggaagagaaagctgcttcccgcttcggggtgagggatggaggaagggagaacaagcagtagagaagaaaaagtttcagatcccacagccccggggggtcactcctgctggacctactccgaccccctagggccgggagtgaaggcgggacttgtgcggttaccagcggaaatgcctcggggtcagaagtcgcaggagagatagacagctgctgaaccaatgggaccagcggatggggcggatgttatctaccattggtgaacgttagaaacgaatagcagccaatgaatcagctggggggggcggagcagtgacgtttattgcggagggggccgcttcgaatcggcggcggccagcttggtggcctgggccaatgaacggcctccaacgagcagggccttcaccaatcggcggcctccacgacggggctgggggagggtatataagccgagtaggcgacggtgaggtcgacgccggccaagacagcacagacagattgacctattggggtgtttcgcgagtgtgagagggaagcgccgcggcctgtatttctagacctgcccttcgcctggttcgtggcgccttgtgaccccgggcccctgccgcctgcaagtcggaaattgcgctgtgctcctgtgctacggcctgtggctggactgcctgctgctgcccaactggctggcaagatgaagctctccctggtggccgcgatgctgctgctgctcagcgcggcgcgggccgaggaggaggacaagaaggaggacgtgggcacggtggtcggcatcgacctggggaccacctactcctggtaagtggggttgcggatgcagggggacggggcgtggccgcctggcctggcgtgagaagtgcggtgctgatgtccctctgtcgggtttttctgccagcgtcggcgtgttcaagaacggccgcgtggagatcatcgccaacgatcagggcaaccgcatcacgccgtcctatgtcgccttcactcctgaaggggaacgtctgattggcgatgccgccaagaaccagctcacctccaaccccgagaacacggtctttgacgccaagcggctcatcggccgcacgtggaatgacccgtctgtgcagcaggacatcaagttcttgccgttcaaggttcgaccgggtttttctcatccagttagagaacgggtgggtggtgggagtatttagagttataagtctctggaaaagtgttgagacaacagttgaaggttatagacatgatgtatgtaataactttaatactattagtatgttacaaaacttaagacagttgctgtcgtactgtctacgatagtttaggaataaaagaccgattaaaactgaactttgtaagacacctatactccctgaagtatttctagtcaatttgcagccccaagggaccaaaataaaccaaattgtggggatggtagtgggtcttttaaactttgagatgtcattgtatctgtgtctgaaaacaataattctttaaaataggtggttgaaaagaaaactaaaccatacattca

SEQ ID NO: 135183 - DNA, 1008 bp, Homo sapiens
agggagagacgcgtgggggatgggatgggaagggacaggaggaccgcggggcggcctcgggtgggggccagagacgagaggcccggcaggtagggaactgagtataggaggcgagaacgaaatggaatgtcttctgagtgtcgctgataaagatatcgtgctgcagggaagcttgacaagctggacacacgggtctgggggcagcccacctaacacagacactcactgtacttggcatctttccacttgctgtcggaggtctgaaagtgagggagctgttggttgtttccatcccttttcttttaacttcaccttttattgactggcaaaattgtagtgagtgctggctaggcaaaccacagaagtacacccagggttctgtgtataaatgtgcataaaaacagggagacatagtgataggttcagatgagaactaggtcaaaggaggaatcagtgtttttatttttaaatttatgacgaaaatcagttctgagcaggactttgaactagagaggggttttaaactggagttcattgatggatagaattagaagggtcctttcactagaaggaggataaaatgacatcattatttttattgactgctaactgaaacttattatttccttcagttacgaatgtggacaacaagccagagtagcattagcagcgcctatgactttgtgatcaataaaaattacggatatttttgcatcatgtttacagttgcagatagctcagaatatcatttatggttaacacttctttgaatttctggtgttactagacccgccgttagacattgttatttaatgtgataataaggctgtacatatattatgaccatattagtttgttgttttgctaatatttccatataattggtttcccttgtaatcacatgtatttaattatgcacttaaaagaaatctgagaaagggaccataggcttcaccaaactgccaatgaggtccgtgcacaaaaagattaagaactcctgaaataatt

SEQ ID NO: 135184 - DNA, 1033 bp, Homo sapiens
gatgcaatctcagctcactgcaacctctgtctcccgggttcaaggaatccccctgcctcagccttctgagtagccgggactacaggcgcgccccaccgcacctggctaattttttgtgttttagtagagacaggggtttcaccatgttggccagggtggtctcgatctcttgatcttgtaatccgcccgccttggcctcccaaagtgctgggattataggcatgagccaccgcgcctgcccaaatgtaactgaattcttaaagtattctcctgtcccttttgattttagaaaagaacttaagtgacatacataaactttaaatctttatctttttactcttagtgatcagcctttgagcctttcccacattgaagatggtgaaactagatattcatactctggctcatcacctcaagcaggaacgcttatatgtaaactctgagaaacagctcattcagaggctcaatgcagatgtacttaagacagctgaaaagttgtatcgtacagcatggattgcgaagcaacagagaatcaatttggatcggcttatcataaccaggtaaagagatgattttcaggttttaagttttgtgaaccactatgattctgtaaataaattagtaactataaataaatgaatctgtttccaacaaagtgcattatttaagataatttacatcaatgttaaggtgagtctttgcttataatacagtttatttggattattaagtaacttaggcacttttatagaaaattgtaacttaagcattgacattttatatcacaccaattggttttgtgtctttgtctatataaaatgttattgttggctgggcgtggtggctcacacctataatcccagcactttgggaggccaaggcgggtggatcatgagggcaggagtttaagaccagcctggccaagatggtgaaactccgtctctactaaaaatacaacaattatctgggcattgtggtaggcgcctgtaatcccagctactcgggaggctgaggcagagaattgcttgaaccc

SEQ ID NO: 135185 - DNA, 1098 bp, Homo sapiens
tttgtatttttagaagaaatgggagtttcgccgtgttggccaggctggtctcgacctcctggcctcaagtgatttgcccgcctcggcctcacaaagtgctgggattacaggtctgagccaccgcacccagccccaatacttttcattgattctgatttgataagaggaaattgtcctttgtactttttagttttgttgtcctttactcattgagttgctgttagtttaaaaaattttagcaattcagagtgacctcattgttgggaccataatcaactcacatatccatgtttggatatagtatatgtgttattattattaatactattattttgcttgtttgctctttttttttttttttttagtgctgaagcttcccctgctgaatgttgccaacatgccaaaattttggaagatacacaatttgttgatgggtataagcaattgggatttcaggagactgcttatggagaattcttgagtcgattgagggaaaatcctcgtcttattgcctcctctttggttgctggagagaaacttaatcaggagaacacacaaagtgttatttacacagtttttacctccctgtatggcaattgcatcatgcaagaagatgaaagctacctccttcaggttttgcgatacttgattgaatttgaacttaaagaaagtgacaaccctaggcgacttttgaggagaggaacttgtgccttcagcatcttatttaaacttttttctgaaggactgttttctgccaaacttttcctcacagccactttacatgagccaattatgcaactgcttgttgaagatgaagatcacctggaaacagatccaaacaagctaattgagaggttctctccatctcagcaggaaaaactctttggagagaagggctcagatagattcaggcaaaaagttcaagaaatggtggagtccaatgaagcaaagctagtggctttggtgaacaaatttattggttatctcaaacagaacacatattgttttccacatagtttaaggtggatcgtgtctcagatgtacaaaaccctctcctgtgtagataggctggaagttggggaggtcagggcaatgtgt

SEQ ID NO: 135186 - DNA, 1058 bp, Homo sapiens
agagtgaaactttgtctcaaaaaaaaaaaaaaaaattcaacatcttaaaaaaatatgatttttaagatgtttaaattttttcatgcttgtccaccttaatgagaaatttcgttccagtattttaaagggaaatgtttcactgtttttttcctgttttaacagagctgtgttgccgctttccttgatgttgtgattgggggccgtgcagtggagacccctccattgtcttccgtcaatcttctggaaggattgagcagaactgtggtttatataacctacagtcagcttattactctggtaatggcttcattgtttaagagaatttctcgaaagtcttttagctaagcgtgagcaaaaacatacatgagtacattgtgtgggaaatacatattgtatttgaaaaagtgatttcattagctaatgttctttgcttttgccaggtgaattttatgaagagtgtgatgtctggagatcaactgagagaagatagaatggctcttgacaatttattggcaaacctacccccggccaagccaggaaaaagtagcagtttagaaatgactccctacaatacacctcagctatctccagcaaccactccagcaaataaaaagaatcgattacctataggtaaagagaatttctcgtattggagctttctcttaaatctaatatttcattagcctttgttattgctgagtgttttggaacatatgtttaagtacttgggaaagtctttctcttcatgtttactgatggtatttcagtttttagaaatcgtatcagattagttaaggtttatcagtagtctttagctttgcctacatacttttcataattaattgaagtcatgctatccacagtatactttctttaaattttattgtcttttcttgaaaaaattttggaaatgttataagtagtcatctttaaaactatgtagccctcagcctggtgtggtggcacgtgcctgtggtccctgctacttgggaggctgagatggggagattgcttgagcctgggaggtcgaggctgcagtgaaccatgattgtgccact

SEQ ID NO: 135187 - DNA, 1251 bp, Homo sapiens
gcctggctaaatttttatatttttagtagaggctgggtttcaccatgttagccaggatggtctcgatctcctgacctcatgatccacccacctcagcctcccaaagtactgggattacaggcatgaggcattgcacccagcagattaatttgttattagcaccttaggataaattcctagaagcagaatttctcaaagggcatgtgtttttttaaggtataaaaagtattaaaaacactttaatcagttgttagtcttttatcaaggcatgaaaaattgtgtggtggctcatgactgttttaaaaagattgctcacactataaacatttctctaggtccttcaaatcgctccaattcagtgtcctccctagacctagaaggagagtctgtgtcagaacttggagcaggaccttctggcagtaatggagttgaagctctacagctgttagaacatgagcaaggtaaagtgaagttgaacacagttgcctaagtagcaaagaatttacctgattgcaagatgagcagtgtgttttcattaagttggcttggttcagtaagagattaaatcaccattaaacttaacatttattcatcattccttcagttcttcaaaatctatttagttggtaagtggattgtttaggcttaataaattaatataaattacttgaaattcagtaatatttgatattttaattatgtaatattttagggatacaatgtaaatactcaaggctcaaggaacttagaatagggaaagaatagtacacaattgatttaaagtatcatgaaagtatttggcagttctgagtgagagatacatatggttgaaagtatagggaaagctgctgggcccggtggctcacacctgtaatcccagcactttgggtggctgaggcgggtggatcacctgaggtcgggagttcaagaccagcctgaccaacatggagaaagcccgtctctactgaaaatacaaaattagccagggtggtggcacatgcctgtaatcccagctactcgggaggctgaggcaggagaatcgcttgaacccaggaggcggaggttgcggtgagccaagatcgtggcattgcacaacaggctgggcaaaaagagtaaaactccgtctcaaaaaaaagaaagtatagggaaagtttattggaagaaaatattagccttgagggctggctggcattgccttggcagaagttggagataggtcattctaggtgaaggacaagcataagcaagtca

SEQ ID NO: 135188 - DNA, 1914 bp, Homo sapiens
aaatacaaaaattagccaggtgaggtggtgagcacctgtaatcccagctactcagaaggctgaggcacgagaatcgcttgaacctgggaggcaggggttgcagtgagctgagatcgcaccactgcactctagcctgggcgacagagtgagactctgattgaaaaaaaaaaagatgggccgggtgcggtggctcatacctgtaatccctagcactttgggaggccaagacaggcggatcatgaggtcaggagatcaagaccatcctggctgacacggtgaaaccctgtctctactaaaaatacaaaaaattagctgggcatggtggcaggcgcttgtagtcccagctactcgggaggctgaggcaggagaatggcctgaacccgggaggcagagcttagtgagcagagatcacaccactgcactccagcctgggcgacagagcgagactccatctcaaaaaaaaaaaaaaaaaaaagatgatgccctcaactaggtttgacacagtgattttagcatgcataagaattacctggttagctttttaaaaattccatttcccaagtcttacttctaaaaaagaagtcagtttttagaaagaaaaagagtattgtcattggagtgtgtgtggcttgaaaaaagtaatgctgtattttactggatttgtttatcagtgtattaattaggattaagtttgttgcaagcagcagagaaaactcaagtaataaagtagtacctccttatccatggtttcaccttccatggcttcagttacccatgggcaaacttggtgcaaaaatattaaatggaaaatttcagaaataattcataagctttaaattctgtgccattctgaataatgtgatgaaatctcacacagtctcactctatcacatccaggacatgaatcattccttagttcagtgtatccacatatacactacctgcctattagtcactgcttatcagatgaaaacagcatggaatatataggatttggtacgatccgaagcttcagttatccactggaggccattgcataagtggaggaggaactttcatatgagcttatgaaagaagttgaacaaatgtcacctctttagcaaacttcctgggagattctgagataggtggttggcatatgcaaaatgctagattaagaagtgaattgataggccaggcacagtggctcacgcctgtaatcccagcactttgggaggccgaggcgggcggatcacctgagattgggagttcgagaccagcctgaccaacatggagataaaattctttaaagttgattaaaaagtcatagctgtgctactattttaaaagtgcttaattttgtttttgatagctacaacacaggataaccttgatgataagctaaggaagtttgaaattcgtgacatgatgggattaacagatgatagggacatatcagaaacagtgagtgagacctggagtacagacgtcttgggaagtgactttgaccctaatattgatgaagatcgcttgcaagaaattgcaggtaactgccatttaatgtctctgaaatatcacggtttagttattcaaatccaccaacctttcatgggagggagcaccagtgccctgacaaacattgtgtgtgttagcaccatctgggaaactgttataactgtatggaacaaggcatttgggtacttttttctttacttaaatataactagtgtttttcctttctacatttaatcccaccccttacccatcctcctcccagctgcccaaaaaaaaaaaagaaagaaagaaaaaccagtgttttgaattagcttctggtcaagtgttgtttgcagggcatagtataagttcttagtctgtctctaattagtatattctctgtttgaagccaaacacctaaccttaagatgaaaattctta

SEQ ID NO: 135189 - DNA, 1039 bp, Homo sapiens
tccaccaaaaccagtcaggcgtggcggcgcgtgcctgcagtcgcaggcactcggcaggctgaggcaggagaatcaggcagggaggttgcagtgagccaagatggcagcagtacagtccagcttcggctccgcatgagagggagaccgtggggagagggagagggagagggagaggtgtaaatagatttcttaattggttttacattactttgttccagatgccaaagtggtattgttcttggcagttagctgtatttgcgcaataagctgtatttgcagttgagtgagtgctatgaagatgtgtattttcctgtgaatgtatcttattgccctgaatagtgactaatatgctggaagaaaaaatatttggccagcataacattctgtggttaaactctcagtgtttttaatctttgtagggctataaattttagaacgatattaaggacccctgtaaaatttgctgagaaatcaaagctaaagctgttgaaattacttgacttaatgatgtgtgttttctctatggagagtcaaaggtgaactggaggaaactggtgaaaagggtattgtgccattgtgaccaaagtaggaacttgtgtttttagtggtgtgcttgattgaagttattcttactttggcctctttcttgtaggtagagaggaatttggtggttttttttttttttttgagacaaagtcccaaaatgacacggccatttttatttttgagacagggtctcactcacattgaccaggttggagggcaatggcatgacctcggctcactgcagtctctgcaccccctgcaacctctgcctcccgggttcttgtgcctcagcttcccaagtagctgagactaccggtgcacgccaccatacctggctaatttttgtattttcagtagagacggggtttcgccatgttggccaggctggtgttgaactcctggcctcaagtgatctgcctgcctcagcctcccaaagtgctgggattacaggtgtgagccaccgcgcccagccaggagattttgttagctagtg

SEQ ID NO: 135190 - DNA, 1104 bp, Homo sapiens
gtcacctacgtggcaataagagttgtgccttaaggcaaacaagactgactttcttatttcacaaacttacttaaatcctttttagcctgagcaacatagtaagaccctgtccctacaaaataaaaataaaaaattagctgggcatggtggtgtgtacacctgtggtcctagctacttgggaggctgatacggggaggatcgcttgagccagggaagtcgaggctgcagtgagctgtgattgtgctactgcactccagcctgggcaacagaatgagatcctatctcaaaacaaaacaaaaacaaacaaaaagaaatccttttcttagtaatttatcctgctatccaactccaaataaagcctccaactttttctacagactgaagaacgcaaagatagcgatgatgagaaatcagacaggaacagaccttggtggagaaaacgttttgtttcagccatgcctaaaggtaattttataaaatattagaacgctgtattagcaataagaagcaaagccccagaatctctttcagagagccaatgtctcaactcctctgtaagacttgctgggcttaagtttctagctactttgagggtgtagaaagtggttccactcagatgaatgctaaggcagagctttagaaatgttcttgttctttgcaggaagtgatagtggtttcataaatggaagtcatgcctgtcactattgtttaaatatcatataccattgaagttaaacatatagaggacttctgacatatatattgctattaattattgcaggaaaatgggacgttattggtaattaaacattgaaaactcatcctttacattcctggaataagttgaagctttttatgtctatgttcattgagaatgtttatactgtaaatatcagtgagtgtttattttggaaggtagctgtataaaattgtttacttttttggtgaacagcctggcatcatttgagttggcaaaagcatctcttcctgaaagaagagagcatccaggagtaaagctagaaacttattccaaaggcctcttctcagcacggtggcactcaggaactctggggagagctgctttcacgccatactcaagcgctt

SEQ ID NO: 135191 - DNA, 1043 bp, Homo sapiens
actgactttatttaatttccagctcctataccatttagaaagaaagaaaaacaagaaaaagacaaagatgatctggggcctgacagattctcaacactcacaggtttgtagacccatggacttcctggctccttcattcccagagcacatatttcataacactttttcttgggtgccataagcgttgcctttctagaagagtgtgtctgtgtgtacagtggggagtatgttcttcatagctctgtggtttccagttggtggccacagtaaacctgtgtgctcttcctgcagactgccaccaccatcatcatcctcattatcataactccgtttatgatgaggcccctgatcctgagcctctaggcataccctacaactcaacatctagtgggatgatgacacacagtgccttttaggaaagtgtggtgacagttttggtgctgtgcatgctgtatctttggatcattgattgaatagttttctctaacattgatcgtagaattctacatttattttcatctacagtttgttcttgattattcaggatcacagtgaaattctgttttacctaatcgtttccttttttgtgataaagtgtttgttcaaacagtatcataaatgccaaccattataatgaaagttttaaaaactttactaattttttacagcttgaaccattttaacattgccatctgacccaaggaaaatacagctgggggttgggtttttacctgattaagcgtttgtatttctgcagctgctttttggcacattatgaatgagcaccctaaaaggacagtttgagagtagtgttaatgacccagtcttgggtttgatagctgtgtattgtttccagtggctattatagagcatcttgagcaagtttgttcaacccacggaccgcagaccacaggcagcccaagacagcaggacagcttcgaatgcagcccaacacaagttcataaacttaaaacagtatgagatttatgcaggaaccctttttttttttttttaagctcatcagctatcattagtgttagtgt

SEQ ID NO: 135192 - DNA, 1021 bp, Homo sapiens
ttggccttccctatatgcttgtttcacagctctgtgtgaaatgtagtgttttctttttcttttctctctctcttttttttttttttcttttgagacagtatcttgccctgctgcccaggatggagtgcagtggcgcgatctcagctcactgcaatctctatctcctgggttcaagtgattcttctgcctcagcctcccgagtagctgggattataggcatgcgccaccatgtccagctaatttttgtatttttagtagagttggggtttcgccatgttggccaggctggtctcgaactcctgaccgtgggtgatctgcccgcatcggcctccaaagtgctaggattacaggcgtgagccaccgtgcccagcctaatacagtatcttcaatctgcatttgattgcaaaaaactgtgtataaatggacctgtgcagttcaaacccatgttgttcaagggtcaactgcagtttactacaatttcacggagacatgaataccatgtgtttgtttcatgagaacaaaagaagagccgatgagcatgctacttaagctgtctatgtcttgatttcgtcttctgtaaaatgaggatgataacaacgtttctctgtaaggttgtttgatcagtagttgagataatctctgtaaggtacttagcacagttcctggcatgtggtaagtgctcaataaatgttagctgctattagctgctggaaacacaacacacacacacaaaatacgtatatgtatatatacacataagtgtgtgtgtgtgtgtgtatatatatatataaaatctagtgatttcgatgtgtttgtataatttttagaaaatgggattctaccagaatgtgaacatttatggtcacctgcctggcctaggactaacccaggagtttgtgtttcactatggaactttgtcctgtagatctatagcaatcccttgctttaacaacccagttgactactattttagattccaggataatatttttgatgtgctgattttgacagagtaatggtc

SEQ ID NO: 135193 - DNA, 1007 bp, Homo sapiens
gagatgcaaaaaagaaactgaggcttgctctttgctctgcggactctgttgccttcccagtgctgacccattcaacaaggaatggtttaccagaccacacagacccagaaggtaaattgctgcaggatcgtttaatttttcctatgtttatgggttgcaccatatgaaattgccagtattcagctgttgaagctgtacagcaattccatatggttcaacttaatatgtttacattagtatcacttaagggcactttgattactgatgatttattaaagtattttctaattgggagtggcaatacagcttagttctaatgatacgtgacaaagcagaattgacgtcccaaatgctgaattagcttatttaagcacatggaaattctcaagaataacagaattcttgtatcttttatttagacaatgaaattgtatgcttcttaaaagttcaaatagctgaagcaattaatttacaagataagaatctaatggctcaacttcaagaaacaatgcgctgtgtgtgccgttttgataataggacttgtaggaaactgctggcttcgattgctgaggactacaggtaatataccccacctgttcagcttttaaacctagttgttagctgcaagtgttttcttttttatccttatttcagaaatgaatctaggcttcctacaaagtgcttggctgtattttcctggatgtagatttctgtgttagtctgttctcacgctgctgataaagatatacccgagactagccaatttaccaaagaagaggtttattggacttacagttccatgtggctgggaggcctcacaatcatggcggaaggtgaaaggcacatctcacatggcagcagacaagagaagagaacttgttcagggaaacccccctttttcaaaaccatcagatcttgtgagacttattcactatcacgagaacagcacaggaaagacctgtccccattgattcaattacctcccactgggtccctcccacaacaca

SEQ ID NO: 135194 - DNA, 1249 bp, Homo sapiens
ccagctaattttcatatctttagtagagatggggtttcaccatgttggccagaatggtctcaatctcctgacctcgtgatccgcccacctcggcttcccaaagtgctgggattacaggcgtgagccactgtgcctggcctagaaacatatttttataacaaattccttgcacttaaactttcacatatttcttgctttttctcctgatttaattatatggctacatattgtcctaaaataaactacactgaaacacttttggctttaagatcatggtgtctgcatagctagtgattaaaattatttctatgatttcctttttaaaattatttagatagtttttattaaactatttaaaaattattattttgctttggagactttcagaaactcaccgcagctgacgataaaactgctcaggtagaagattttctgcagtttctttatggtgcaatggcccaggatgtcatatggcaaaacgcgagtgaagaacagcttcaagatgcacagctggccattgagcgaagcgtgatgaaccggattttcaagctcgccttctaccctaatcaagatggggacatacttcgcgaccagtaagtacttctatgttgagtgcctatgtggaactacatagggatctaccaggtagcccatattttaggcaagctatacgtgtaacttagtgtctgattgtaaaaggaaattcattggttaccatttttcacctgtcagagttacatgatcacaaagaataatacccagttttcagggatgtgggcagtcaagctggaaggagtagaaattggtatagcctctttggaaagcactgctgtttactctgccttaactaatcttcccttccttctcgtgattaagtcttacttatgcttcaggtcttgacttaagtatcgtttccctgatgaagcctgtcctgactaggttacatcctgttagggctctctcaggcctcggtgcctttctttagtacttgccacagttgccatttgacatctgtttgagtcatggtttctgaacccagccctactaacatttggggccagattgttgatgatgtgggaggctgtcctgtgcattataggatctttaggagcatccctgacctctacacacaagatgccagtaataccccaccagttgtgacaaccacatgtcttcagacattcccaaatgtcccttgtgggggcaaaattctcccctgttctttttttctttttcttttcttttgaga

SEQ ID NO: 135195 - DNA, 1051 bp, Homo sapiens
aaaatttcaggtatttgagctttctgtttgtttttgttacaacccccactaatgagacatgaattagcataaaattttaaattatctttagttttttgaatctgttatttctggaattactgcaacaatggtacatatttttaaattaacctcttttatcacatgtgataaatctagttcctgtgtagagccagtttaagctagttttaaggaaaagtcctcttttagtagtttgtacttctggaatcagctactaaatgtagagaagttccattctagctatttaagaaagagaatggtttgaaattttgtgaattctagcttctgtgctgttgaatgccctttttctattaatggatatctggtttgctgtattttaaaattcagagcaacttatttaaaagttctaaagttacaatctttagtgaaggggaaaggggcctgcaatatggttttaccaaagagaggaaaaagcaaccacattatcctctgcctcctgacacggaggttgcagtagtcactgcgcagggttgccactggattcagaatctgtatattgtctatggtctcacttaggtttatcttcgagaagcaccatggccatctgcacaatcagaaatcaggacaataagtgcttataaaaccccccgggacaaagtgcagtgcatcctgagaatgtgctctacgattatgaacctcctgagcctggccaatgaggactctgtccctggagcggatgactttgttcctgtgttggtgtttgtgttgataaaggtgggccccttactactatcagttaaggagttatgtggcattctgagcaggtggcacagggcttcacacaaccatagatatcttggctcttttccaagtcacaagctctgggttactcagaaagaaagtgcctaatgtcaagatttgttcttttgagacagaatctcactctgtcacccaggctggagtgcagtagtgtgatctcagcccactgcaacctccatctcctgggttcaagcaattctcatgcctcagccacccaaatagctgggattac

SEQ ID NO: 135196 - DNA, 1122 bp, Homo sapiens
agtgaccaagaccaaggcccaccaaggcagcagactgttaatcagacaaacagatctctgagaaggtgcatcagctgctttgaaggctgaagattgttttgtatgatactgcacagcatcaggcattttaaagcagatctttactaaacaggttaatgagctaacaagcaggttctctcgtctttgggctctttcctttctgagttgcatattctattttcttgtccccaagtagagactagtactacaaaaagggaccacatttttcaagtatttctaagtataaaaaacaaaacaaaaatctcttaggaaatgtctagacctccattcttggattccctttctttccttttattttaaaaaagaacagtacccctcttttaagatgctgtcttacattaatgagcatctaatggaaagaaggtatgagttgcactgaggattagaatagtggtgcgttagtggcattatctataaatacactcacctaaattgaaagctaagaaggaaatgtaaatataatatatatttatatttgatgtaatatggacatctgcagattctaataaacaaggactattgctgatagtaggctgtgacatactgtcttgtgaaatggtttccttgacaaaatttaagctgagcttaaaagcaaaaaacaaaaagtacacagaaatatttattaaaatgtaatacagtttattgaactttctaggtatggagtttgatggacagggctgcctttaatgagtgtgaaggtcactaagtcacttagacatctcaccgtggaagtttgtgagcctgcattaggagatagactgattaccatacatgacataaaaaggaacagtggatagctcatactttatggtggttcttctcctccgaaataatatactgcagaaatcccagacagagctccttacaaacctttaattgtaatatatttttgatgattattcacattgaatgcacagaccaagaattcagtgaatgtcattttttaaaaaactaatttgtattgtctgctctagtgatacaagttttactagtgataaactattttaatcaaccatactattcttatggaaaaaaatatctattttggcaggtttctgtgcc

SEQ ID NO: 135197 - DNA, 1097 bp, Homo sapiens
cccagttcaagtgattcccctgcctcagcctcgcgagtagctaggactacaggcgcatgtcaccaagcccggctaatttttgtatttttagtagaaacggggtttcaccatgttggccaggatgatcctcaatctcctgacctcgtgatccacccgccttggcctcccaaagtgcgggattacaagcgtgaaccaccctgcccagccagaaactagattttctttatgcctccaccccttcttattcatttactttacaataccaaaataacaaattgcataggagtgtgggatgtggtttctgccttctagagagagatcagaattaaactagtactatgaaatgtccttttgaatgttaggtcaagaaatccatgtacagagtcgtgcacttcattggctgtaactgtcaaacttgccttgtattagaagttaaatcccatcgtaaatacatcacgaggccagctgtgtgatttctgagacctagatgagagtccatttacttcagcctttgattcagtaaatgttaagcagcagaagacttcgaatggttgaaattcattgttacaggatttaactcataaaccaatgagagattttttttttctctgcaatggttgctaagtctattccatgttaacactgtggaaataaatatgaagatgtggacattgcatcggggctcttttctgtggaagagaaggtggtgggattggggtgaagggctacactggaggcaggagatagggctgtgctgtgttggagccggggctgagggtagaccccccagagatttgacatctgtgacacctgtgaaatgggttcgggtgctcatgactccatagctggcggaggagcacagcacagctgttgcaggggcagctaaggtttcctctgaaaatctgtcaggagcaaggactactttggcattaaccatcactgtttgatttcttgacaggtatgtgagatggggagtgatttgatttttttttttttttttaatagaaaagaggaatagttgttccccaaatgtttcttcctccactgccttccagtactttctttacatgaaagattagtgtaaaagtacaaaatca

SEQ ID NO: 135198 - DNA, 1001 bp, Homo sapiens
ctgaggtgcgtgagcaagagaacaatctcagccccaatacgggggctgtgttcttgccgtaagaatctgtagctgactggtgtgctgaacccgggcactctttttcctattgtttgccatggaaatttccactttggaccgagtaaggtcaactaggtgttttaaaattgtttttctcctatgtgattgggtgtgaagagggaaagtaggaatacactcagaattattactggattgcataaaagtgatagaagtgtagtggggttcacttcctcaattggtgcttcctagatttttctctcccatctcttcctgctttgtttctttaaagaaaaggctgttgtctctctttttaaatatttaagtctagtgagtttattttgtacgcaattgctttaattttaagggaagtaaatctgaaactatcttgaagcccaaaggatttttagtaagtggattaacagtgatgaggtatttgcgattactttaaatgccaaaatgcttgagaactttgccaggttaaaaattacttaatatattttagaatgtaggttagaaagtagtaggacaaggaatagctttattactcttgagaacacttggataaatgaaaatatagtttgcttccgtgttaagttgtggttgagctatggagtgaccctggagctgccgcatcccacaggcctgagctcagcaagggttcaattcaagagagatgacgtctccacttggataatggcagacagtgtgggtagcggccatgcactaggggaattcacctctgtcaaattaatactctcctgtctactggattcttcttgtgcttcacctggattaaaaagctgtactgcctcttttgaaacagataaaacctttctataagtctcaattaatgagcttgcacaatcttgtatatgtacaggaaacccctcctgtctcctaatgtgattagtactgtaaaatattctataaaactgattaaaaggggagagcagtttgat

SEQ ID NO: 135199 - DNA, 1019 bp, Homo sapiens
cccacgtaaggcctatgccctccctctaagggccccactgctggctctcccctccctaccccttcctgcctccacatagtagccccaggcaggaggcacatctttatgcattaactccatgaatgtaagaaaaactgaggctaattctttctaaaatgataaaatttgtctgtattacagcattccagcccccagcttcctgaaagctaaaaatattttaatgtcatatttccatgtaaattttagtttagaatttaatacccttttaacatacattaaattgttagcgttcttcaagcccttgactattttaagggcttagctgatgtgcattgcagaaaagggctgggggaggctgtaaattatgagggaaagttctagaagcaaggttaccctaaaccaccacgcccacctcatcttgagagttactcttcaggacaaacgctggaatcctggggagatgtcaaatgtcttggttttcctgctgggaaacgtggctatgattggtggcatccctgggggacccgaggatctgctgcagagcccaggctgggagacgcccagatggctgaagggccagggacaggggcgctgcagttgcacgggctgggctcagatcctagtgctgccacttgctggcaggtgactttgtcatgcttatccatgccggtctccttgcccaaaatgggaccaaggttagagttcatgcacaggtgttctgggtgaattcacaggaaaagaggttatcggctccacagaggaggtaacttccagggtgaattggctggccttgctgagagccgctggtgacatgtgagtgcagtggtgacatgtgagtgctagggctggcagagaggcagggaggggtcctggcaggactgggagcagagggggccccgggccacaggagccatgggcaggcccaggtcctgctcccacagcaacccgccagcagctgactcagggaccagggccccccagcctcggcatcgcctgagagacctgacaccactctggcg

SEQ ID NO: 135200 - DNA, 1062 bp, Homo sapiens
cactggcctccagcctcaatctgttccgtagctcagagcctgcctgccagggccaagtgccctagagtccacccggtgtcctgaagtcctcggggggaggccagcccctggctcactggcacagggcaggtgggctctcggggaaggtgtcgggggccccctaggagggagcgctggggacattgccatgggacggaagtctgcttggcagtggctttgataagcgatgcttgggggtcagaccaccccctagaggagccacgtgccgcccagccaccttcaatgcctgccaccctgcccgaggatgtacagagccgtgcccacacatttccttgcaacttgatcaaatttcttaaagcaaacaacaaaaatgtacatttctgtttttccttttaataaacaggtgtactctttatcatggttggtatgatggaccattctttggggcggaggattgattatgttactctctttaaaatctgttcccatattgaacaggcagattggaaaagctatggttcgatttctcagaagaaatgtttaggtcttagtcaatagttttaactatgccatttgtttaaatgagtgcatttgcttcgagggtagtgtcttactaaaagttaggaacagagacctagtggtgtgtccaaggccgtgtcactttccccttcagcacaccccagcttctgacctcagagcccaggagctgcgtggacagtgtggggtgccaggaggaggggcggtggctggtcctcaggcacgctgcactcccagccagacatggtctttccgtttcttaagtagcaagtgtaggtttcagctggcagttccacctgcatgttctctgcttcgctgccttggaaggggccacattccccattcctcttctccttacagcgcctgcctcctttttcaagcaggcggaaagctgctgtttctcacgtttcagggagaggggtgagcggagggagacctgtgtccgtgccgtccggctccctgggtgggaacaggcaagggatcagatgcccctgacaccacgcctctggccacaccagatgcctc

SEQ ID NO: 135201 - DNA, 2068 bp, Homo sapiens
acaaaagctggacgtctccacttctgacatttgtgccactaattagtttctgcttggtattaaattctatcttctctgtcttactttgaaaaacttacataagtgtaaatacagttctacatatccagattttcacttcagtactcacgagtggaggtacagtttcagtatctgccctgagcatgtgaccagtgcttagatgccacatttataccctcttatattgcattttatttacatagcactataaaagcaaatctgctcaaaggaggcccaattaaaaatgcaatcttcaaagcaattagcattttatcatcaaataccagttccatcatagttaaatgaatgaccacctccctgctatatgcagggatgtatgtgacatataagagatcactgacagatgctatcccctcctttacagccaggcaaaccttggaagggacagtgccttgccaaggtcccacagctgaaacatggcagagctaggatttcatcctaattctaacttcaggaattatgctttttttcctctgtgtctcaggcttttgttaaaccttaatttaaacagaatttaacaattaatgcaaaataatttgaactaattggaatattaaactttacatttttttaaagtcatactaatacataactttttcttagctgattttttttttttttttttttgagacagagtctcgctctgtcacccaggccagagtgctgtggcacaatctcagctcactgcaacctccgcctcctgggttcaagcaattctcctgcctcagcctcccaagtagctgggattccgggtgtgtgcctccatgcccagctaatttttgtatttttagtagagacagggtttcacagtgttggcaaggctggtctcaaactcctaacctcgggtgatccatccaccttggcctcccaaagtgctgggattacaggcttgagccactgcgcccagcatctcagctatttttttacaactagtgtctcagctattttttacaaagacagcttgctcctgtgacttaaccctgttcctatgaaaaccgctggtggtcttggaattttcaaaggtaacttgcctacctctgattccctctaacgccccagggagatgcctggtgggctgcagctgaggaggtcattggccccctcttcctcttctacctgagatgaactgtgaggtgtctgaggctgatggtatctgataacaggtgttcttttgttcagtcagtattgaagtgtgggcagttccttcttcccagacacctatggtggaaatttactatgtggcataaattactcatgtttattgacagattcatttccagcaagaggtcaatgaattgttacactttaatatataggtcttggtctgggtgaaattatgaaagtgtgaattctgattattagctattattctgttgtgaaagagtctccccatcctgccaacattaccttctctgtagttctcgcctccattccttttcagtatcctttctgcacctgtctagctcaaaactgcactcactcctacctggctgactacgggaactgcttacctcgcctccaggctccagggaaccagggagaacaccctaaaacacagtttgcccatttctttcacttgccctgcttaaacccctctagtgacccccatcagctggtgactccaggcactctcagccctttgtgtccctctccctcccacctgcctgccacacatgaccctggtttgcccagagctcccatggagaccctgtatgtttgcccatgccgtttccttgccctgtggcatcttcctctttttcacccttctccaccctcacctttacccagctgactccctgccctcctccaaaactgcggaggtgtcagctcctcccaagaaactgtccctagtggctcttctccacctctggccaggtgcttctgccttggtgtctccacggcagctccctgcgtttaccttcttcacgctcatcatatttgactctcggtgttcatttctctgtcctttgctctagcccatgctcctggcagagcccagactgaggaa

SEQ ID NO: 135202 - DNA, 1088 bp, Homo sapiens
gtgaaagcctgtctctactaaaaatgcaaaaattagccaggcatggtggcttatgcctgtaatcccagctactcatgaggctgaggcaggagaatcgcttgaacccaggaggcagaggttgcagtgagccaggatcgcgccactgtactccagcctggacagcagagtgagactctgtctcaaaaaaaaaaaaaaaattcactaaatgggagcagattagtatgatgatgaaaaaagatcagtgcattacttatctattgccacaaaacaaattgccccaaaacatagtggcttaaaacagcagtaacatttactgtcttacagtttggtgggtcaggtatcccacagcttaactgagtcctctggcttggggtctctcaaaaggctgcaatcaagacatcagctgggactgcagtcatctcagggtttcattcagacaaggtcttccaagctcactgagtcgttgctggcagagtttacttccttgggaacaccctcagttctccaaagagaagcttacatgatggagctggcttcatcaaagtaagcaagagtgagagagtgctagcaaggaataagttacagtcttctataacttattcacagaagtgacatcccaacgcttctgctatattattcattagaagcaagtcgctaggtccaggccacaaacaagacaagggcattacacaagggcatgaaaagcagaaggtaggatcattgggagccatttcagaatctgccacaatcagtgaactctatgacagaacaacagaaactattcaaggcacagagaaaaaatggatgaagagattagagcctttggagtcatagcaagtgttctaacatatatgtaattgtagtcttggtgatggaggggaaaaactattccagatttgatttcaaatatcaaaccagcaatcttggaagccaaatgaaagctaagcatgataaatataaagaaaaccacaccaaggcacattataatcaaactgctgagaaccagcgataaagagaaaaatcttaaaagcagccgaagaagacatattacgtagagaaaccaagataagaatagttgctgacttctc

SEQ ID NO: 135203 - DNA, 1050 bp, Homo sapiens
aactgaaaactgaacttactgaagccagaatttagaatccaaaagttattccacataatttatgttgtaaagtgcccaaagatgtattaaatgaatcggcttgatgttatgtgttttatgatttccagtatcttcatcaaattaattcagtgactcaatctagcaagttcatcctcagaccatagaattaatctgtggggcgtcttctgtttctttattatttaaaggattaatggtaaccctttttatcttttgtgtctgttgaaccttagaaaaaagttattttaacatcactaaagaaatgaaagtcactatatttcataagtttagcctgtgatttttatcagcatagtgatgtatgtttgtagctgagtttacatcaaaaattgttcttggggccttcttgaatgaattatggcaaagagagagagtctagaagtagataaggtttttgatttctgcaatatatttcctttttcatgtttttatctctggtagcacaagtgtcttgccgaagaccggaacgtgtgaccaactggaataatttagttgtgaaaacagagcagacatgttattaaacagctttctttacaaaaagacattaagtgtagggaggataatgaagttgtccccagtcttagttgagacatgtttgtcagaattttgaacagaaaagaaatggtttttaaaccttcgactgtggccagtttgcagtgtttattgagaaagccgctgtcaaaccattaatttggtcgtcataaggcatagaactcaagtttaattgatgccatatccaaaaagtgtgtgaatagctgacttggcaaagagactgagcatttgagcggctgcagggaaatacataattacacatactgcgggaccggagagacccaggctcagaagccgtgcttcgtaaacaacagttctgtggctctctttccattcccctcgacttctccctcttaggctggggtctcagagggaagatttattgctctgtccctgtgagtgtttaaggacttgaacttaatggctaaatagatacatgcc

SEQ ID NO: 135204 - DNA, 1095 bp, Homo sapiens
gcacaatagtgagtgaaagcagcagcggtggcctggactgcctcactcctcaggcacactctcaggctaaacatggttctgggtggccacatgaataaaacattttcccttgttagtttccagtggggtacctgtggagtacagttcaagtaatcacataatctgaacatgcgtgttcttaggaagtggattgatcttccatgtttccatttcactttgccgttgaacactaaggaggtgcccctctccattccaagacacaatcaggaggaggcgtgcgtcacatttaactcaaatccctgggtccgttcagtaatttgaagttggcaattctgatattaaatgattgttcagtccctattgtgacagcatttcctgaaccaaactttggaattgacttatactaatgaactgatgaggcagaggatgcatgctatcaagactgcctccagaaaactccgttaccacttttgcactaaatgcagtgattggcttagggaaaaatcacctaactggtaatattggaaacactgtgggctttttcttaaggcctagcttcctctggctccctgctcccagagccacccttttgagaattcctatggagtaacccagggttattaatgacaatgtgtcaggttcctcaggtggctgagaaagaattgagaattggaagaagttgagaagcactggcatgatggaattaatgggagtcggattcatgagcgttcatccagagttctgtgctcctttaatcacttcctcatctttggcacctgagctccaacagggcctgaacatggggaagatcaggttttccccactctacaagtgatactgtaaattctcttagggcctgctgcttcctagctgacatcataggctcacctgaggtatccatttactgagagagtagtttggtgatctagctgtcctagtgcagaatctttgtaaatgccttctctgcagagagaacttagcactcattcaaagacaagtctttctgggattaaacagtcccaggtctgatttcataagctctgccctggtgctgtgtcctgtgctgactgctgctctgcgttcgttcgtgtccag

SEQ ID NO: 135205 - DNA, 1052 bp, Homo sapiens
ctcatctgcccattattaacatttcagcaaaatataaagttttcattaatctcccacagcaaatttaggagtgaaaactggcacttgtttgagcttttaggactacattagctggtgtattaaacaaaatatgtcattcttcagtagcttctgtaagaagctaaatcaatttccagccatatttatgcaccactttatctaaaagcatctgaattatcatttatagctaagatgctttattagcagctggcattgaaattgctcagtaaaaaattatatgtcacgttatagtaatttttaaattggttttaatccaacatcataaaatgtaaaaatcttaagtgtgggttttttttttttttttttagtaattggcattttagcataatgagctgttacctctttccaaatcaaatacctgcaatatttagaaaacactaattagtaaagcaaacagaagttcttgagctcagagctaaattgtatctaataatagcattttctcagaaaagatgacttgaaatgatttttaaaacattaaatgattttaatattttaccaaaattctctgcaattctcatgtataagaagttctaaaatagaaataaaacatgttttggcagttatgtttcagtaaaaatgactggaaaaagtgaatgattatttgaaactccaaatcctaaccagcctcagtattacccaggagagagtggtaatcaggatcatggcatctctgtccaaaatcataggtgctgcaaagaaaggaaaggggctacccagtggcccttgcagatgtggagtgaagctctgcagtgtcctggaggtgcaatgttggttaagtcactctgtctctttgaccctcaccttcctgtggacatggcacctggtattcgttcagtacatgtttattgagctctgctttatcctctgagtggtagcactggcagtgtctgagttgcagtggtgagaaagcagtccctgtgttcttggggttatagtctaatggcagagacaggcaattactccctgtgataactgttctgaagaaaaat

SEQ ID NO: 135206 - DNA, 1055 bp, Homo sapiens
gctattacaattgtctttatatgctatgagagagaagcttacagatgaagcagatatgacaagagtttctgcctaggtactgagagctaacatttgtgcttggatcttggcctaaataagaaaatgacaagccaaagtccttgagctttccagtttggattcttgtcggataatctactacatccttcagccaaatgcctgctagaagctggaatcataccagaaggaagcccaagtacattatggggaggatgtaacattacaagacttccattcttgtccaagcttctatatacatcctggcaccaaactgagcctcaattcccttgtctgccaaatgttgccagtgacctttcccaccaaccatgtggaggtagtccatgcaggtccttagaagaaaggtgccgcttgaaccaacttattctttccacagctttaagagagaaagtggaatttcccatcatcagggccaatataagcctgaaattaaactggctttatggaatactaacaaagtgtcagacaccatctttctgttttatccctgactagtctgtcattcacagtgcttaaagcacagtcattagaatcaggcagaccttgggtgaaccacttgcagcctgtgacagtggacaaattatgtcatctctgatttcatgtgtaaatggaggtgaatgaatctatttcacaaggatttggtgagaattgaatgagatataagtgctcttattataacaacattttaggccatgtagtcatcatccttgttttatagaagaggaaactgaggggtgaagtgatttgctaatatcacatgaacaataatgagaggcctggaaaactgtcttttattcattaagtctggtgaaagagctgaatctaattattgtatttcctaaatagaaggtggtgtagagagagacttcagttgctctgtaaacattaattcagcttcctttgatctttccttttgaaggagattcacagaatgtttaagttcatccattatttcagcacttaatgaaattctcatttcctaattttaaggttatact

SEQ ID NO: 135207 - DNA, 1086 bp, Homo sapiens
ggctggtctcaaactcttttttttttgagacggagtctcgctctgtcacccaggctggagtgcagtggtgcaatctcagctcactgcaacctccacctcccaggttcaagcgattctcctgcctcagcctcccgagtagctgggactataggcacatgctgccatgtccggctaattttttgtatttttagtagagactgggtttcaccgtttctatggtctctatctcctgacgtggtgatccgcccgcctcagcctcccaaagtgctgggattacaggcgtgagccaccgcgcccggcggttcaaactcttggtctcaagcaatccttctaccttggcttcccaaaatgttgggattatagatgtgagccactgcagccagcctgtatttagaattacatacttttctcagtgattgtttaatatctctcttccctgctagattatcaggtctgtgaggatgaccctggcccataccaagttgcccttcatatagatctgctgtagactatgtgctacaggatctcagtaaatatagattgaatgagtgaatgaatggtagatctttactcatgccactgaccctctaaacaagatcaggctgctactctttggatgtttttggttttggttttggtttggttttggggtttttttgagacagagtcttgctctgtcacccaggctggagttcggtagtgtgatctaggctcactgcaacctacactttctgggttcaagcaattctcatgtgtcagcctcccaagtaactgggattacaggcatgcaccaccacccctggctaatttttatttttatttttattttttatttttagtagaggtggagttttgctatgttggccagactgctcttgaactcctggcctcaagtgatccatccatcttggcctcccaaagtgctgggattacaggtgtgaaccaccacaccggcctaggatgctactctttgactagggccccagacagcctcttccgccgagcatgcacaaaattcaccaggaaggtgaaatatgcttttggcatttggtagcaaattctcaaaggcagaaggttactgtcccc

SEQ ID NO: 135208 - DNA, 1049 bp, Homo sapiens
ataatagaacagtgaagaatgtgaagccttatgcaaaagaaaccccaaacttccatcctggatagctagaccctcaagacagactttaacactttactaaggctttatcagcttttcaccagtatgtggtgttttttaaatgttaaattcgctgtttcagacttcctcccctcctcctgcccctttgatcttccaggccctcagtaccgcctggagaagcagagcgagcccaatgtcgccgttgacctggacagcactttggagagccagagcgcatgggagttctgcctggtccgcgagaacagtacgttggccgcctcgctccatgcccgctttgtccgttgcaaacttgcttagaagtcatgtgtttggaaacgctcactggtctggtttccctaggcagatttgaagtgactgttttccaaggcagactgcagtcttcgtgccaaagtatatcccaaagtgaaatgattgattttgtgctttttggtagagaggctgcatcctgtttagcactctgtgattaatattttcctgttaaactgtcttcctaagttgggagcatccctggaaacagcttagaagcatgaggccttttctgaagtaaaggctattttgtatataaagcagctggccctgtcagtatcactattcagacatcaggttttagaaaattttaaccatttgcatattctagcaggaggcagtgtagtgattccttatgctatgttgagaacttcaaaacttgttaactttgttcattctctcttcagagtttccaaattgtgcattttgccatcctctcctccatactcccactgacacaagggcaagtgatgtgtgaaactgcgcttgcggcagcagactgtctgtagtcattcctgcttcgaggcttttacacaggctatttcttccacctggaatgctccttcccccattctggttaataactctttctcattctttgtctcagtttaaatgtcctgtcttcagaaaggccaccaggatcttcctgtcccccattgcttaaacctgatccacctctcgtt

SEQ ID NO: 135209 - DNA, 1323 bp, Homo sapiens
ttaggatggatagaaagccttgagagtggggtaaggaatttgcatctaaactagtagcctgcaaggaagttgtgaagggattgtatgaaagtgataccttgaatctaccagaatttggctctggagagcactctaacaatagggtgaagagtggttggctggaggccagaagaaggttgggaaaccattactgcggcctgagtgagaaggaatgcaagggagatgtattaagtgggtagagtctgcagaacttgggagccgatttaatgtcatcaacaagggggaaggctaagaagtattccaaacttgagagtgccgtgttcactatgccaagtccttagaggccagatgcagagtcttgttcatcttcatatctacagtgactagctcatgacatggcacatggtaggagtttagtacagtttgatgaaccaactgatttaattcattgggtgaatcgtagtgtcgtcattggaagcacagttacaaggaaaaaaagctggtttgagaatggaaggatgataagtttatagttgattgtcctgtaaaattagaagcaaaaaagagcttagagtctctttcttcctgcaaaggctggtccaaccattcactggcagtggtgcttccctgaagagttggtagaagtccctaaagaggccctgtagccttttgtcccaccctgggctagagccccttccaccagggccactggcatcaagctagccaaagaataatcctggtgcctcactgaatctgctcaaaatcctgtcaagtacatacaactactgtattatccgcatttaacagaggaagagactgaagttcagagaggaagtggtttaccgaagcctctgacataagcagatttgaatgaaagtcttcagattccaatatatcataacagagtctgctgactgaaaacaattggctctaagcttgctctccactgactcaggttggagtcaccactttcatgtagctcagagaaggttgaagataaatgaagtctcatttttgtttcttctgttttttgtccttaggtgcttgtgactaaattcactaatttcactggctgtcaaggctgtgttaaggaaaatgggtttgaactgctgtgggttttgagtactggactggatgtcagaaacctttgccatcacgggaaattctgtcactctggatttactgtctgttccccacagctaaattcctctgcagtgtgatttagcaccctggatccccatcaaccagttttggcatttatttgaatgcattaccccactggtttccataaactattttacaattgtttaaaataaatgactg

SEQ ID NO: 135210 - DNA, 1006 bp, Homo sapiens
gacctcgtgatccacctgcctcggcctcccaaagtgctgggattacaggcgtgagccactgtgcctggcggtccttccattttctaactgaaaagacttccttgagtcctcaggtttgggagttcccctcctagagggagtctctctggctcccaggctcaggcataacttcattctttccactcgtttccacgcatctcctaattgggctaccagcacccctccttgatgcaggcagggagaagtggacagggcagaaagggctgggtaaattcatgagcagtaaatgactccatcaacagtggccatcaagggaaacaggccatgttccagccatggaagctgggaagggacactaatcctctccagagatcagtatccctcagccacttaggcttgtggcagaggcactgtggccctgtccccagtaagttccaaatacactgatcttgccagctgctggtaagcaccttgcaaaagaagagaatgagagcccccgcttttccttgagtacagtgaaagctccttttggagaggtaggttccttatggtttaccagcaccgcagctggcccagggttggtggttagcacatttgtggaatgaactaagatgtagtgaaaaccagtccacagctcgtagccacgtgtctctcagccagcccacacctgaggccaccactttgtgtttaggagtggattcactgtactttggttatcagagattaaactcccttggagaattacatcatcaaatgaaaatgtaaatgtgtttaaaatgaaaggcgatgcatatccgttgaaattagtgttgccgcccagattcccgtaatgatgtggatctcttctgagtccttggggagccagaggagtataccaaaagcagacattttaaacattgatagtcacgtaagggtgcccagcaggaggaagttactgtaggaagctactgtattgcagaaaaagaaaagaaaagcaaactcactttccaaaggacgtgtgggtgtg

SEQ ID NO: 135211 - DNA, 1073 bp, Homo sapiens
agatacttttttccattacactttaatccttaaaacaactatttgaatcagttgtcatgttcattttataagtgagaatactaaagctcagagaggttgcaggacttgctgaggtcgcacagctagtaggggagtaaggactcaaagccaaatggccaaaggttgtactgctagacactgtggtgcttccttctactggataaggttacggggcccacggctcagtggaagctgttgcctttctctctagagagaccaaatgtccctgcttcagctgggggtggcagcaagactcagtggaaacagcatgggctttggaaccaaaccaaccccagtccccaggccacctgtcccttttacaagctgtgaagttagggaagtcatcagccccttctgacctcagttgtcttttctgtaaatagaggtaataatacctatcttgcagggttattgtcttaactgaatgcatgtaaaacacttagtccatagtaggcgctcagtggacatcagctgccatcatccctattgccactatcatgccaggcacgccataaaacctggctttctctttaggttttggtttacttccttttctatccatatgatttggcctttgcctgcaccttttgttttccagtgaattaagtctatagaaagtttttaccttgtggtagaatgagcctttgaattgtgtttgaattagaatctgctggaagcacactttattttgaagaaggagaaaactagacccagagagtcaactcaaatgattttttttactaataagtgaaccataccatatatctatagggatggattaatggtcacaagccttatttatcagatagcttatgtctgcaaatttaatttcctatgccaaagattctggaaataatgtgaacaaactgtaattgcctgtaacaaacacatttataagtaagttttaaaagtctttgtgttcacagtttagtagctcacagaccctgttgctgtttctcagaaaacatttaaaagaggaagtatacttaaatatccatgtgattttgaaaatgaaaatgattctataattacag

SEQ ID NO: 135212 - DNA, 1057 bp, Homo sapiens
tgtatttaaaaaaaaaaatacagccaggtgcggtggcttatgcctgtaatcccagcactttgggcagctgaggcaggcagatcacaaggtcaggagttcaagaccagcctggccaagatggtgaaacccatctctactaaaactacaaaaattagccaggcacggtggcaggcgcctgtaatctcagctcctggagaggctgaggcaggagaatcgcctgaacctgggcagcagaggttgcagtgagccgagattgcgccactgcactctagcctgggtgacagacatctcaaaaaaaaaagtgtgtgtatgaataaagaaatatatttactagctagttagagcattttcttttcctccttctcaattactttggggtattactgccctgcggccccacatgacgtttttttgtctggggctccatgagcttagtatgatggcagtatctgcctgtagtgacatctactgacacaagccaagtttatcagttgtcaatccttgttgcaagatttggtttggaagccaacactaggaacccatggtgctgctgacccacacagaccacttaggttcaacttggacaaattagaagaaccttccctaagcgtgacctctctcacatggaactgctcacgctagaatcgtttatcactgcccccccgccacccaccatttgaagtatatttattcaacctatttttaaataattggcacctcagtatgcacttactttaaaacttgcttaaacacggccgggcgcggtggctcatgcctgtaatcccagcactttgggaggccgaggcgggcagatcacgaggtcaatagatcgagaccatcctggctaacatggtgaaaccctgtctctactaaaaaaaaaaaaaaatacaaaaaattagccggatgtagtggcgggcgcctgtagtcccagctacttgggaggctgaggcaggagaatggtgtgaacccaggaggcggatcttgcagtgagccgagattgcaccactgcactccagcctgggtgacagagcgagactccatttcaaaaacaaaacaa

SEQ ID NO: 135213 - DNA, 1048 bp, Homo sapiens
aaatagaataaggaataaaagaagatgcttgtgttctttgtaaccaggcctgacaaaatgagtataaattatcctggttatttattgtttgcttgattcatagaggaccaactgtgtgttgtttcttttcattctgttgtattagcaaacattttcattgtccagattgtcctcgtgtatggaaatgtaacatatgcagcctgtttaattttgtatttgtaaatctgacttgatttcctttttggcaacagctactgtctagagaaaagaaaggatttttctttgtgtctgtttaaagtgacagaaatattggagcaagtgataaagatggaaagcattaattacacacttctaagaatttaaaggtcagacaagctaaatatgtatgttttgctcactggaatgtcttgaaattgtgccaggattcgctttgttcctaccataaaagcacacattttagataaccatcaacttactttgtatctaaaaattatgccagattgttgctttagttaatatgtgtcttcaaagtcggggagctcccatttctgagcccatgtgattggtttggtgatgcttccccctttggccatgtttagttactatgtctcattttgatttcctctgttctcccctcagcttatgtcggagtctgtcagctgctgctatgtacatgtcaggctagtgacttggaatgtttattaatacaatgtcagtcttgctgttgaaaaaaactgtgatgcttctcagaaggttgtgatagaacgaagcgtttgatttccagatcctgtctgcactgcatggtgaatacattctcagatgttatgcagttcactgacctgacagttatggaaccccgcctgggaccccatttcagcaggacatatttgaacagaaacagtttgcaaaactttacacacttaaactcctgccaaggcaaactgttagccacttgagtttgttataaatacccagtggcagtggttggaagtagcccacggtgtgttttatattctgaacggaatgtgaatgtctttgcagttatata

SEQ ID NO: 135214 - DNA, 1046 bp, Homo sapiens
catagttgctattgttatttctgtcagggattctcagtgggaataatttacactaaggtgagaatggggtttaaccttcctttgagttattttttattatataattaatatgtgtccattatagcaaaattgggaaatagatctgtttctgcatataaaagaaatttttaaatttgtcttcattccatcatgcaaaggttgtgaattatattttataattatttacattttttaaaggggaactaattaatgaatttctcattggaaaattattctgtggagggaacgtgaaattggatgtcttctgatgttcttactaaatcaggactagatctatctagctttccctctagaacccctgggccccaggaatcccctggatagagttgttgttcagggaaggagaatggattattctaacaacttgcaaattaggagcctggtaatggaaactgcctcttttaacaaatcttcaagtggattcctaagctatccattgttcctgattgattttggacagagcaaatatatctataaatgggaatccctaacttgctgactactttgagcttaagcagtaaagatgtttggatatcagtagtgtcagagaggagaagtagggagtgggaggaatgggaaggtttttggctgacccccaaaaccagataaagagctggagctcagatagtgcccagcatctcaagaagtgtttcttgccagcagtgaccaagccaaagcctactgttcctttagacaaagtaggacaagggagaatgagatcttgagtgggctaagtgcctctcaaggatagggacctgccttgttcgtctccttctcccattcccaacacagacctaatttagtcagaatttgtgagactgaattgagttcaaaagtggcaatgacaaaaacaactgtggtagtattattaccttatatgtgttgacattaaagtttcatgccaggattctactctggagtgggggaagaagggcattaaaggaaaaaaaaaaaagtcaaggccaataaaatggtcagaatctcct

SEQ ID NO: 135215 - DNA, 1589 bp, Homo sapiens
cacagtgtttcactatgaaccctgccttctggagaataggaaggagggggaaggcagagagtaacaactgctttaaacttaatactctgttttttgatcctgaattactcccatccctgtgttcccactcccagacacacacatagcccagtcaatcctttttctattttaaaattcaagagagtttatttgatgtgtctggagtgtttctgaaaacacgaggtaaagtgaaatctttatatgtgagcattaagaacaaaagtgtcaataaattttctttttctcagtcgtctgatgaaatagtacagattactgaccgtttgccctgtgtgtattttcttggttcagcaacctcttactcgcctttctggtctatattctaagttagtaaagcttctcctacagatgcagaacagagcagaccttcaggagtctgtagggatgtgtctaaagtttcagagaaggaaatcccagcaaaataaataaagccgtaactactcctcctcgtcatttcccccctttcctccttccatttgtctcccagtagaggagggacaagaagtggctgggaagacactaagctgaaacagaaagaggcaagtaggtttgacatagggagtgaactaatacttactaagggccaactatgcatatgctatctcacttaatcccaaaatagcccagtttttatgaacaatttagaggcgtggaacctgagggtgagcaatattgttcttaggcctggatttgacgccatccctgactttaaagtccatgccctttccaaccctctgctgaaagattgaggctggggaatctggtgttggtttaacctgtgaatctcactgtcttaaggctgacattcagccactgctatagtgcagtaggtgacagcatggtgggctgtgagccagatcgcttggatgccgatcctagccttgcccttactagtgtgtgtggtcctggatgaatatttaacttttctgtggctcagtgaaatggagataataatacctacctcacagatcagttatgaggattaaatgagttaatagatctgaagcacttagaacagtgtttagcatatgtacgcatcatcttagtgttagctgctgttattgttactattaataaacaacccttggagagcaagaactgaattatctgtgcccacaatactcaccatcactccattactgtgatagatctgtcacacgtatttcttgaatgggttactgagtagatctctgccacttctacatttttcttctccgactttgttttatagcagaggaggggtagtgtttaggtggacattgctcagctggactgaaaaagctgaattggaataactttcagtgaacatgggcagtgggtaaacatcgaggatctacatactttcaaatgagtcctcttatgagcacacatcctctgagttagtagcaagaccattaacttcttgaagactaggaaggcacagtcttattgtctctctgtatcctgagcacccagcacagggcttcatggagaaggaatgactgaaacttcaggtgtctgtgggctgccaggaggacacctgacccagcagt

SEQ ID NO: 135216 - DNA, 1041 bp, Homo sapiens
cataaaataaaatccactggaatataaaagtattctgttatttaaagttatcagattattgaacaaattcatgatatagtaatatgtgtggctttactagtagattaaacaatatccagctgtatacctaacagtaactcctgaagcctgttgtttcaaagcggtgatgagcataaatggtatttgagaaatctgcaacagctgtaatgtgctgtagtgttagctatgacttctgttcatgacagagtcactggcactgtgattctgctgtgattgtttgcctacacttataaatcaaggaaatgcaaaatattagaagttagtgaaaattaaaatgtagtttttatccattcaagtttatgagctcctgagttttatccacatgtcccagttgttaagggaaaacctgctgcatttggattttactctcaaacctaagctttttttcaacctaggcctcagcagtccttctcatggctgtctcctgggaacaatagcgatccctttggcaccccctgctgttagtaaccagcaaattcactgctcaaaagggattgctttagaagacatttccctgtctctctcaacatactgcctttgtttgagattgttacagaaaatagggttatgctacatatgatatatgagtattttggctctttctacccttgagcaaagaaagaataactgagtacctgggggtaagctggggagtgggccctcaggctttcatggtggccgtttcatccctactacaaggtcaagtttggtgtaaataacagcaaattttttcctgctttttcatttcagaggtactaaaataactttaaaggatatttaaaataattgaaaagttggccaatgatgcctccatcttaactatttttaatcttgtataataatcgtgtgtatatgttactcagtttcacttgtagcacacatatttttgtgttatttttacttgacattaaattaggtcaggcgcagtggctcacgcctgtaatcccagcactttgggagaccgaggcaggccaggatttg

SEQ ID NO: 135217 - DNA, 1067 bp, Homo sapiens
ccccctttacagttttgtttgtatctgttttatatatatattttttacatttgtattgtagctagtgtaatgcttattacttttcctccctactatgctgtaagctgcttttagggctgatactaaatctcacctttgatctaagaggttaggttctttgtcgtagctgcaatagggctcagtgaatgttgcaagaatagagtagtataaagaccttcatttcacactgtttttctcccctttgcattgccatgtgtattctctctatcaaatgaagtaggatttgggattttttactgtatcaccaggcttggggtaaagaaaagcagtctcctcaatttgcttgctgtgcaccataccctctggtcttcttgtcccttccctaccttggtattcactcgcctttttggttttcctttcagtgacaatgtcagtgcctactgcctgcatattgctgaggatgatggggaggtggacaccgatttccccccgctggattccaatgagcccattcataagtttggcttcagtactttggccctggttgaaaagtactcatctcctggtctgacatccaaagagtcactctttgttcgaatgtgagtactgactctattacttctctcggtatctcatcccaaccttctagcattttggatctgattttggttttgttcatcaaataaatgatatttggcatctggagagtccactggtaataacgatgactcccagagagatgctgaggacgacattcgcattgtatttcatgcctctgcacctaggctacgcagactgctttgcagtggcacattgtgtgaagcagatctctgaacggcatgtccagagccaggcctctggaaacactggtgcactgggagcctgtgaagcaaaacttctaggtttgcaccttctctgcgaggaatacacactaactgaaaatgtgcactgtggccacttctctcttgtgacttaaaataattttctctcagaccaaatttgaccttccctgtcagttgcctgccttgagactgagcacatgtcttcagctttttttttgtgccttt

SEQ ID NO: 135218 - DNA, 1067 bp, Homo sapiens
aggaatcagtcttcttttccttcctctgttcctgatgctcaggacaggccacagcccaggggggcactttacaaatgtgttttgaatgaatgatttcacacttcatatttaagaactggggagaataatagcacttggcagtgaaccttttgcatctcaaatcttagcctgtgatatttattgaatttgttttgagaggatttggggatgtcccttaacaatcaaagcagaattcttctgatatcattgttggacttttctgctttgatcaataggcttattatttgcccctgaacctctgtgatgctggagaatcaaacattcctcaggttgatttacatggcaataaataatctgtgctgtctgttgcttgttccatccatgtctgccctgttcataaaaccctgggggctcagtgacccaaggttccaaggttggaacacagtggacatgttgactcccattacagttgtgtgtacatagaacatgctgctcagatgcattgttgcttaatatgcatccacaatttgtgtttaaggattggtgcaactataagttagtttccatatgactttcttattatagttaccttcccatttattttttacttctgttacatgccagacactacatatattatctgatctaatctttacaatctctgagggacgattataccctttttatagaagtggaaactgaaactcgaggtgaagcttattctctgaaatcacatagccatgagccatggagctgaaatttgaactcgttctgaccacagagctctcttagccagtataccatgacattttcctcatccaaagtgctttcttttgcctctctaattgttctgtttttaagttagtacccggctgcagagatccaaaagtttcccatgccattcaaagatgaattttaaatatcttaacagcattacaaatacctgaaatgtaaagtgacaaacatagctagattactttcttgttatcaatccatttagcaaatttacagtttccattaattttaatttgtccttattacttgttttttataataaatatctctta

SEQ ID NO: 135219 - DNA, 1050 bp, Homo sapiens
gtgggttttagctggctccattactgcaaccttttatcagcaatgtctttatgacctgtattttgtgttgacctcccgtctcatccaaatgccttaaccatctgggaatgcagcccagtaggtttcagcctcattttacccagctctatttaagatggagttgctctgactcacacgcctttgacagaatgagaccgagaggtaggcaggggtcacagtggggattgagagaagtggacagattctgggagtatttgagaaatggaattcacaaggacttgggctgaactcaatatggagagtgtggcagaggagaggcttcatgactcacacaccgtgatgcactgtggtgctcttcactgaaatagctagcattggaacagcaggttttgttggggcttgctgtgtgactaggagggataggggcggcatgagtttggttttctgcctgttagtttgaggtggctttgctagatctaaacaaagtgttcaagtagtcacttgtattttcttgtctggagtttagaggggagagatatgagctggaaatatgaatttaggagtcatctacgtaaatattaattaaaacttctagcatggatgaatgaaaagagagacaggcctaagactgggtggacattgaagaactgtgtggatggcaaggtcgaaatgggatatcctatagaaataggtttctcagtgtgagtggagttcagttttgggtgtaatgaaggcggagattacttgagagacatccaagtgaatgaagaagtcttttttctttttctttttctttttctttttctttttctttttcaagacagtgtctcactctgttgcccatgctgctgcaggggtgcaatcgcagctcacggcagcctcatcctcccaggctcaagctatcctcgcacttcacctcctaagtagctgggactacaagcatgtgccaccacacccagctaatttttgtattttttatagagatggggtttcaccatgttgcccaggctagtctcaaactcctgggctcaagcagtctgcctgccttga

SEQ ID NO: 135220 - DNA, 1144 bp, Homo sapiens
gtggaactagcccccagtctctgagaaggcaagcacctgtttcagtgctgcgggcctaaatccttcctgggagagtatgacagcttcccaggcagctcatctcattgtctcaaggacaatgagacagttgccagagaggcacccagtgctaaggtccagggacacactgagttagtagcaaagccagcctcctaacaccaaacatgaactctactcaccactcatattttcctcttagttgtagtgcccatttaccttcctgctggcagatcccgatccattagtttattataaaatgaaaatttaaggaaaaaaaatccttgaaactagacagtgtttccactttgggaccattccatggtcacagtaggtctgtagagcaaggatgaaaaatggctgtgctgcccacaggcctggagagcagtggggtctgtataactggcagtgtgctttgctctcacgtgtttgttctgtccacagggtcatgtaggtacaacagcaaccaagaagatcgatgtctacctccctctgcactcgagccaggacagactgctgccaatgaccgtggtgacaatggccagcgccagggtgcaggacctgatcgggctcatctgctggcagtatacaagcgaaggacgggagccgaagctcaagtaatccattctctttttggctgctctagtttcttgtggtcttttggccacccaaggtgtcttctaggctggttagtctttctaggcattggcctggaaccacacttctgcactgatccagctctgggtgctcaccaggtctcgcgcctgtgcatctcagagaatcagcttgcaaaatagacttagaagtttgtgaattacagacatgagaacatggatttttagtaatttccaaacccttttatgatccctgctaataagcaacctggaagggaacgggaggggattgatgtttgttgagcaccaatcatgcattgggcactgggctgggcactttgtagctggtatctggaatctcatttgatcctcccagctccctgggaggtgagggtaatgatcctcattctgcagtggtggaagctcaggttcagagctgttactggctgaaggttgcacagtgagagatggcagagtcaggatttgattccagg

SEQ ID NO: 135221 - DNA, 1174 bp, Homo sapiens
gcccagcaggaagaacttgctttttattagtccctgtttgtcccaggtgatacttgggccaggctttctgacttgctgtctttgttatccacaatcagccttgctgtccctgttactcacacttagatttggctactctccctgtgtcctctaccaagctctgttggcgctgtgcattgaaatcttccttaaatctcacttctttcatgaagtctccttcagcaactcacacttcatagacttctcttttcagctttgggattgagcggtcttgcatttacaacagctcacttagcagagctaaagggcttgtaaattcaaaaaagggaagtagtgattgctaggagccaccatgggtttcctcagaaccaagcagggcagaacaagcccatttctttcttggatagggttgttagctagatagagggctgtggttaaaattctttgttctgaatttcagtaaagcatcaatttttgcatagtattcttgcacgcaagctggagatattctccagtcacattgtggtcaggtggactttgcacctggctgagagacgaggcacagagtggtgattaatggatttatgtcaaactggagagctatctttcgtggcaagctgtaggtctcttgtgtgttcattgctgtcagggacctgaatgagaacattgatgataggctgatgacacttgtggaaggcagaaggctgggaagaatagcaggcatgtgcagtgacaaagtcagggactaaagtggtcttgacacaccaaaatgatacttgcacttaagtcataagatgcagtcatttgtgtatgggggtggcagtggaaaaggggaagaggaagatgaggtttaaccaagtagcacatgaaagaaaaggtttagggtcatggttaattgtaacctcagtatgattcagcagagccaggtagttagaaggaaaactcatgcattcatttctcaaatatttcttgagtgcctgtatgtgccagggacttgactaatgctgaggatacaatagtgaatgagatagtccctaatttaatggtatgtgtaatcttgtagggaagtcagacaattataatatagcataataaatgctatgagaggaaaagtttagtatggtgagtttcttcttttttttttttctttgagacggagtcttgctctgtcacc

SEQ ID NO: 135222 - DNA, 1057 bp, Homo sapiens
ttagctttttttcctatgtattttcaaaccagtacttcctagtgtttttaaagtgtttggtttcattttttgctttcagttttattttttttctcttctgtatattaatatgtccctttcaggataactttcatctgttctaggcaatgacacctgctattaggtgttttctgcctttggcttggtccacagttgtgctcatcttagaaccagcctccttttttctgttgttcagcagcagttccccagggttcactctgacacaaatcagtggtggaggaagacttgggaatagggaatgtggtctctgccctggagccgtgtgtcctttaggagaaggcacttcaaagcagcagctgttcccattacaccagccgcagctgataccaggagttcatacatgtcccaggttgaactgagctgctctagttgagccatatatgagttaacatgtctgttaacaatttctatttagtttaatttagtgaaaacttatcaaccccctactttctgggtcccatggatacagacatgaataaactgctacgcctgctttgaagtaacttgtagactggtaggtatgcaaatgacaataaagaagcattaagaaatttctgtataaagacttaccttaaaaatcagaatttcatgattgtatctctcttcaagccatagatgcaaaatcatctttacatcatttagcatgatttatagtgtaggtgtagttttgcattctgcttttttacctgcttttgtgttgagtttttcttgtttgtgtagaatgcaaatagtgtttagattacattcctttgggcagatatttcagttcactagtctctttctcagacagggctgcttcatgaacggtcttgtggcaaaaggtagggcgcattttagcaaatagtagagcagtgatctctgttggcaaaggtgccagatcagcctgaacatagggtggaaggcttttttcttgactttttaattgagcagcagctggggagctaagaaagaaaaagatggtttgggaaatggagagaactcactgatagttcatatc

SEQ ID NO: 135223 - DNA, 1041 bp, Homo sapiens
ccatttgagagacaatgatgtgcttagggacagagtgcactattctcctgatgacagaatgctttatgtgctgcagtcttaaagggtgcaggccctgtttcctcaggcccgaatgattgagggacatgagtgagagtaagcaaattgcagtttaatcttgggcagatcgaggtaatttgtacagaatagtgtttagacttggctgggagaaaggatgttgcttgtagaaaaagcagaaaaatattaaagtgtattttgtgtgcaaaacaatgggtctttctgtgaaatcagtaatatccaggggattattttcaaagaaggattgtttccaaagtgagacttaagccagaattgactggagtacttttcttctatttcaccactctctccccacagtgtgtgtccctaaggtcagccagtgattccttctcagtgtctgtcagatttgacacttctcagattcaccagtcacactcttgtttcaggaccaaatcacagcccatttatattacaggagcaccttccaggctggtctctctgcttcatgtcccctctcttttggtttgtcctgttcattggtggccagattaaatactcccactgcccttccaaggtagcaaaactaaactcctccacttgacaatcagagccctttccctcagacactttccaattttaattcttattgttgagttcagttcaaccattaagtacccattaccagctgggcgtgggggctcagacctgtaatcccagcacttcaagaggccaagactggtagatcacctgaggtcaggagatcgagaccagcctggccaacatggtgaaacccgtctctaccaaaaacacaaaaattagccaggtgtggtggtgcatgcctgtaatcccagctacttgggaggctgaggcagtagaatcgtttgaacctgggaggcataggctgcagtgaactgagactgcgccactgcactccagcataggaaacagcgagattccgtctcagaacaaaaaataagtacccattacctacctaccttccta

SEQ ID NO: 135224 - DNA, 1100 bp, Homo sapiens
gtcattgaacctgagttgtctttaaaactccattgtcatctgcgttctcactgagcttcgtttctcaggtgttgggggaaagtgtgcatgtgttttacttgaggctggccacagtggaaggactccagtcacatccttttgtgaggaggctggggttggggtttgcctctgtagctcttctgcaaagctagggggcttgtatttctctctgcctgggcagaggcctgctcttcaggtcccccttggctctagtgtccctttcagctcatctcctttcagcctttcccctcccctttttcttttggtgacggttactttttatgcgcagacacaaaggacccagaatgaatttgtttgtcttcaaaactctccttgtagtggttttgagattcctttccacctcctacatgtttgaggggctgccacattatgactgatgattgcgctatgtctaacatgctcttgaatatattaaaaaaacacatttttcatattcaattagatatacagagaaaaatgttaatatgtaattttgatctttaaatgcagttatgtagaactagaaatggatattatctctttaaatgagacagcaagaataggtctgttgaccatgaataatttttgtcagttttgctaccccggcagatccttcattaagcgttcagcattaaattaaaatagaaccagtttccaatagtaattaacttgagtatattgggaggctattattcacattaaagtaaccttttaatagctctgcctttaacttcactgcaggtaatgactttaaagagcacttattaaaagagaaatggtaatgagctttaataaagcagaacaacttgaaaattaagaaccattttctatggaaaaggatgtataggtgtgacttcgatattacattaatggtgctaataattctttatctggtctcttaacattagcagtgattgcaaagggacaattgtgttgcaaaaattaattttgccattttgggttaaaattgtgctaatgtgaaattttctgtttcatgtttttttttcaaggactcttactactacgatagatgagttgcctacagtttgtaattttgaacc

SEQ ID NO: 135225 - DNA, 1068 bp, Homo sapiens
agggaggtgattgacatcagtgagatgtaggggggtacagatgggaaaactacaacttttgaagagttaatcttttgtgtatacattggaactttcctcttaattatcctaacagaacagtgatctagggagtattagctccaggtgagggaacaggctgagagagagaaagtgaggtgctcaaggattccccactagtgtgtggcagagctggtattcagctcctttttctcctattccagtaccacagctctttttcctagactcttgcagtcgttgttatggcgaaaacaaaaacagttaacatttgaaattttttaaaatttaaaaacaaaagtttttcctttagcagtggacttgaaacctgacggactgcttcagatctttttatcagttatatggattgggcaagttactgcatcttgttagccttaacttccttacatgtaaaaaaaaaaaaaaaaaagatattgggactggggaaggggaatgctttcacacgtagtaactggtgtgtgcctcacaaatgtttgtttatttccattgatttttctggtgtgcagagtggattcgttcacacatctctatccatcgaatacatcatttactaggcacccacactgtactggctcatttcaaacatttattgcataccagctctgcaccgtgcactgataaataaaatggggctgactgcccttggggaacttaaaagacaagagcggccatatggccatcaagtggagaaactatactttacatgaatgatcgtgcccagtgctgaggactgtgacagtggtccatgacattaggtgcacctgaccgagcagaggaacagaaccacgaacaacaaaccagagagcaaatgtgatgggcactatagatgaatagtagatgaatactgtctacggctcggatctgagccagtttcttatccttggtgtggttgtccgaatttcagttgtattcctacaggccagggaattcagctttggtcactcttataatgaagcccagaatggtactctccacatagaaatgtggaagtttttaaaaatggcagtgata

SEQ ID NO: 135226 - DNA, 1155 bp, Homo sapiens
taattaactgagttgcttaggtctcttgggcaaatagtacataattggggagagaaggggatggggaagagtttggggtctaattaaatatgctaaaaaactacttaattatgtattgcctcaagagactaactgctgtgaaatcctccttaagattaaactagtgttagatctgaagaaaggattttgcttttgctatggctttactgttacattttagtcaagcaggcacatatagtgttcttaacagttcatgccaactggattgttggtttttatgattctgagggtgagcatctcttagctgttgtgctaaattaaagtgaatatttccaagtaatttttggttcctgtagctggttaataattttataaaaagctttttaaaacagtggttggctaataattttttaaggcatgaaattgagagggaaaggctgtacttaggcatgtgccttggtgtaattttgacaatttttggggtcaggtttatcattttgatattatttctttagcaaattggtgatgctctctgtgatctgttttagagtctgggtctggattatcaataactgtttactgatcatttgaaaaaagttcaaggttgatggccaagcagttttagggcatgctttggtcagatccgcaaaaccagcctcagccatctgcctgaattcttaagcattgttgagaacggaacctctgaatagcctcgttaacaacacaaaacctctattctagaggttgagacaattggaaaacttcttgtgccagtccttctgatttcactggatgtgggaactgttggttgtgacaagaggttgctttgaggtgatcggggagtgggctttgctgagaggcaagtagacattcagcactaatttacgtgcctcaaaatatgtggattttctgccctgtttctccacccgtttcagattaggttatgttttaagaaggaaatctaaccctatccattttatgccatatcactttcttgagactcttttgctagtacattatcactattctggtcaaattgcatttgcagatattatccttaatagaccatcagaagttcaagtacccatttcctgtcaatacagttagtaataaaaaaaaagggactgattagcaagttgtgtcatctcagtcagt

SEQ ID NO: 135227 - DNA, 1112 bp, Homo sapiens
tgaggttattgatgtttctgagggataagagcaaaaactagaaacaaaatgcataagtaatataaaggtcctaatatgctctggaagtttcctccaaagaacttctgacagcacttttagtaagttatagactgtattgatgtaaagcttctctttcgtctgcccttgctgctttctcctgttttgtggaatgtagcatggagaaggaagttcccccaggggacaggaatgtcagcctctggaaaatggcgagttggactacataggatttaaaaaaaaatactacaatgattcatttagacatgtgagaagttattcttgggattagggtaagcagttggaatttatttgcttccattgcctgataccatctcattgtttgaggatgtaatttctggaatagttgatgtgtgataatgtgtttatatcaaaaaatagcacagatcttttaaaatactctataattctctttataccatagactttattgttaattacttaggttcagatttgtcacaaggttgtgaactctgcttggtgtgtatatatctaacttctgaagtaccagcgggaaaataaaaagtaaaccatctccttagtcacaaaggaattattctcgctagatgtgtgtttacactgaaggctctcaatgcttttgtcatagcaagtctatttgtaatccacgaaggatgtgagtgcagagcagtcaccattatgcattgattaagaaagatttagatattgataagtctatcttatgtgatgctattgtattattatcttacatattacaattgctaaaatacaattaaacccttgttctcatctgttatttaatattgatgcatttggcagatatgtaatgaaaatggctaatatttgaaggatattgtactgtacatattaaattagtctttctttatctttgtgaaatgcgtcaatatgatatacaatgacatctcaatgattaatagagaattatacttgagtcaagcctttttgtaacctagaaattaaaatgactattcaaataacacctcaaaatgatcaaattagcattttgtgattgcataataatgggattgtagtagttataacagcaccatggctgc

SEQ ID NO: 135228 - DNA, 1039 bp, Homo sapiens
ggttctcattgatcatgatgttgacctagagaagattcatcctccttcaatgcctggagacagtgggtcagaaattcagggaagcaatggtgagactcagggctatgtatatgcccagtcagtcgatattacctcaagttgggactttggtattagaagacgctcaaacacaggtaaacattgtgttctagtcatgtcttctgagctttaaatcagtaaacagtcttatggaataatgcataatattggaataggcttaatgggggatgtttccgggtattaataggaacatgcatatgtcagactaagagtgagtctgagcaacatctccatctctgcgactgcgaatggagagggcctctagaatattattagaagtagacagaagggggatagtgaaaaagttggttaggagagacatgttggacatttctaacaagtcattgtgtagaaaggcaagtggactggctttgagtgtcttcacacagcaacattagtcccagtaggtagactacccggagacagatttcaggttgacataataaagagcatttaatacagagaggtgaccacccaaagagagcaggcacttcttgcccctggaggaattgtgggggagtggggaaatgggaggagacacctgagtatttgttagggctggttttagtaggattctatacatagggtgtgagattagaaaaggggcccctgtttttgatacttcgcctttattttcttaaattgatcaccttttgatttttctggcttgaaaacactcaactttggtatacacgtatttagtcattagctttaaaagcttattgcccattttcccacttatatttttttggtggccttgtttcaaggggaatgtgatgaaccaaggacttttttttttacttagacaaattatttagaatacatattgtagttctaatatgacaggtattctaggaggtaattttttttagataatcagaaaatataatcttcaaattagcagtaacctgctaactcccaggaaaggtaatggcaagga

SEQ ID NO: 135229 - DNA, 1193 bp, Homo sapiens
caagagtgaaactccatctcaaaaaatatatatattttatatatatatatatatatatatatatatatatatatatatatatatatttatatatattatgtattatatatatttataaattatatatttatatattttgagatggaatatatatatacacacacatatatatacacatatgtgtgtgtatatatatatactttttgtatatacgtatagagagagcgagaacgcgcatgcgtgagtagcaaaactaggacttgacctttgttttgactcagagtactgaaaagcactattactttttttttggagttgggggtcacttttccatgctgctctggatttggatattgggactggccctgtcttgggactgtcattaattatggccctttgccttcatttaaacttaatgtttacagaaagttattattgattatattgtgagagtgtttgattataggtatagtgttatgatatgaagcttaaggatttgatgaaaatactaatactcattgataataaagattggtggtaagatggtaagatggttactcatattgatagtgggaatgtaaatgagtaaaacttttctggaaagcactttggcagtatttattaacaagcttttaaaaaaagttatgcatgccttttgagcttgtaattccatttctaggaatctttattaaagaaatcagagatgtcgaaagatattcgtgttcaaagatgttcactgcagcagtatttagcaaaaattagaaccttaatgttcaataaaaattagagaaatcatggaaaattcatagaatggaaataatatacagtcatcttagatgtttcagaagaattttagtgacatactaatatgctaaccatataataagtgaaaaaaggatatgacactctataaagtatggtcccaattatgtcaaacatgtatgcaaagaaaagaaataggtggtgagattataagacttgatatttttctcagttttagaaatgttctttgataaacaaattatttaaaaataaatcatagtttaaaattgatattaacaaatatgagtagagtcagtgaccatcattttaaccaatagttttcactaatgcaggtgattgtgaagttgtaaatggattgtattttcaagttagttttcacctcttttattttgcacttagaacatggtttc

SEQ ID NO: 135230 - DNA, 1050 bp, Homo sapiens
ggcggccacccgggcccggcgcggggcgatgggcggttccctggcgggtccgggtgcggacggccaagttctcggagagggagggccgccttgcaaactttgccgagctgtcaccctcccgctggccgcagtcggccggcctcctctgcacaggagcggacgcgggagcccctccgcacccgtcccctcccccgggtcgccttcgcctgcccccggggcgaggctccccgcgcgggttcgcgtcgcgtctgcagtggccgaggctgctgcctgccgggcagatgggtccgccttgttccggctgcagctttcgccgccggggcttgctggctgtcgggaactagtcaactggagtttttgttgacttcccacggttcaaaagggccttccagaatggggggctggaattaaatcttgggtctaacttaaaggaaggcgccatattattccataggtgatgctaatacctttgtgtttcgttatttgttttttaggaaacatgccctgaactgtcacagaatgaaaccagcgctcttcagcgtcctgtgtgagatcaaagagaaaacaggtaagacgctgcgccccgcagtgggcctggagacccccgaggtgggggtcggagctactccttcgactctccagttgagagctgctgcttttgggcaccgccatctttgatcattctctccttcccacgtcctgatcttgagaaaaaactgcaataaatctggagtcaatttctcagttctgctcctggtgtaaaatgaagtgtaggtgcggaccgggctggatcgccgtccctcggcggccgcccctggctgcaggcggggagggggcccggagcgccagccgccctcttccctctcctttcgccttgtttgtgtgtcagtttttaaaaggagcaacgggagactggatgccaggaccgagtccccgggagaagcatcgcccgaactttgttttacttagacagtcttaagcttcagctgcacggatagaagaatagatgcaattgaacagaccccagtagcatgcttgaattagtgtttt

SEQ ID NO: 135231 - DNA, 2536 bp, Homo sapiens
cttatattactagggagaggggatggatacttatcgcttctcatccccttctcattatttgtatttatttatttatttttgcctttttaaagttttggcctagctagcttgagaactaaacccagcaaactgcttttcatgttgagacatttagcagcaggcagaattcaattaggaagcataagtcctttagttgcttatttgcacaggacttagttacaccattctgaaaggaaagtatagtcaaccacatgtcaaaggtgagttacgaaaaagaaacaaatcttttcaaagtctgggattactggcagagagagctttggtagggctattgctatttaaaaaccaagaggcagctgacaaaagaaatttttgtgttttaaaattgtttctggggctttcagtgataacttgtaaattagattctctttttgtgctttggccagtggatccacatttgcacgttatctcttttgtaaaaagccaacagccgacaaagagtaaaggcggctgtctgggtagaggcatcttcctgctagcctctctaagctcgagagggatgggatttaagtactgagtgattgatgggggtgaagctctttctcttctttccattctcccctactacccatagcttcacctcactctccaaaactagtcttagaatgagacagggactcagaatcctcaattcgaaataaaacagctgtgtagacattagtgttaccaaagcaaagaaagcggggctgcaaattccaagcccccccactcctgcttccatagtcggtcatgctttagaaacatgaacttataaaagaaacattgtagaatatatgtatattgcataaatattttttaaaaatcattttatttaatctaataatacctaaaaattaattctttgtaatttagagaaagtttacctagtcatttatgaatagaaaccagaaacattatgttgatgactctattctgcttaatgaagggggttgagggtgaactgtcatttcagtggataatgtcatttcagttgtgcttttcttctaaaacaaaacaaaatcattttaaaaaaaatctgtttatttgtagctctgccagtggattttgaggtttctgatcaggcagtgaacactgccagttcttatgcacatgggggatttagtttagaaaacatctgtttccccctctaccatatatgaaaaggtatttttcccttctgacagataaatgggtaatctactacaattatattattttcttgttgagaggtaaggaaagtatacttctactataagatgctgctttttcttgagaatatattctttcgtaaaattgatcataccattatttttgggcagaaatgtctctcattgttgaattgtgatatttgtgcattttgagagcacccaaaaagttgtaggctttaaaataaaaatagttgtttattttaaaccaagtaaccagtgagattattgttgatatgttaagatttttctcctgatttttaaagccatattttatcatctgtctcttattaaatatccctgatgccacaaggtctgctcacctgcatacctcttttggtgtatgcccccacctctttttggtcatcttaatcttaattgttgaagtgctttcctttgtgaaatatttcatcctgaaaaatcttgtcttctttccaaagcccttaattgtgcgagtttaagtgaaggaaatagttctttttcaagaaaaaaatatttattttttaaatgaaatcccacattttagtagataatatgaatcacattattgtgaaaaatgttatgcatgaaaaaaaataaacacaaccttttccttttcaaataataggttaaaatactccatgttgatggctgccaaccaaactctgatttattgccaccacaaaccctaaatagcgttcatttactagtaatgtctaatggcatacatgatggtttgccagatttgtagcctttgtgaggcttataagtaggactgacttgggaagatcataaaacttaatgaacttctctactgcaggaggtgtccgcaggggaagagaaaggcctgcttggttggttgggctggttgaagtattttttatgtttaaggagaagaaaatgactagtaaaaatgccttacttttaaaggaaccctccctagaaagagtcataagaattttagatattaaaactagatcaagagtatagtttacaagtgaggttttatgtgcatttagtatatgatgtgagattaaaccttttatctttattgctagaagtgtgactagctttcaaagagacaaggcagtactgtcattcgacacctctctatttaattgtgaacccacaggtttagagactctttggagtctttttttggtgtgcttctctttttaaggtttcaatataaaaatctgttacatttttctttgtacagtgctgtgtgattcttttaattctacatatgtaaaaatcaattttttcaagtgaaaatttagcaagaaaggtgaaaattgttatatattagtcta

SEQ ID NO: 135232 - DNA, 1015 bp, Homo sapiens
ttagaacctcatgatctaaagtatcatgtggatattatctttaaaatatagagacattttccaatcctgttctttatttttttcttcccaataaaaatgtattgaactctcttgtcaatactaacttgatctgtgcaagtaattcttttgttccttagttttaatgaccctcattttattacagatttgaatagttttggtattttatttgggactttactatgttattttattaatttacataattttattctgaattagaagtcttttaatacactagcaaaggaggccccgacttgccccaaagagcacactggttgatcggctttcataaaatgtacttgtctacatttttcatactatgatgcttttccttttaattaattttgcctgtatatttccatctcaatttataaattttgtaaaaggttacttctgaggcaaatttaaattaacgtattagttggattatttatattttgatactttatagtggcatggtataggatgaagttacattatatgaagtgggactataagaattgaaactgcatttcgtgaaccacaccctaagtcagtcatcactttattttgtactctaccctgaggtatctatttagaataaatgcttaacacatcagcactaacacatcaagttatataaggttttagattatcttttccctattcgtgtttgtgaacatctttagatatttattagttcaatattgacattatgagaataatgttttgttttctcagcagtcttgtgttttagccatttatcagtgtgatcagcatgatttaggtattaactgactaacaaagcttacacattaccaccacctccccctcaagcccgtgttgaccttttcaagcatttgctctacttcagtaggccatttgagtcttcaagtatgaagagagtaaataatttatatcactatgtagtataaattggtaaaagtttttcagaactagctatctgattttttacaaagttattgaagttaat

SEQ ID NO: 135233 - DNA, 1686 bp, Homo sapiens
taaaaatgttaagctgtttagacaataactcttttttagtgatcatattaatgaggacttggtatacaatgtaatccttttaatgctgatgagtcctcacaatgtttaaaccattatttgtgagactcaacatgttatggcaaaatgattttttgtttgttttgttttcttttatgtgatacatcagttttcaaagcatatttcttaggcttcagagtccagcaggtggctttttacattaaaaaattcataaattttaaaatcccataaaattttatttcaaattcaaattaactaattgagaatgtcaacattttcactgtctctatattaacatttataatagaacaaatggttgcatatagaaattatctgcaacagtctaaattaagattctaaacaggcattacagatgctggtaactttggcaattatcattttgtttggtgaacagtagtaaaacagtgtgcggtaaaagtgtttagagagagaggataaataaattgaacagttttgcaatgcaaagtggtttgtggtgtttttgaggatttcttggctctctcttaactgctattgtgagcctggagcagatttccccattgctaatgccctagaagtattaattcactttgatatgctaattagagggcattatgcaagaaatgagattaagtggcagcatgaagccatttgcctgtcagtaaattgagagctttagcatcaggaggagctttgttttttttttttttttttttttgagtttctcttggttttgcatataaataaaattgattgaaaggtctagagaagcttccagaacattggtggattcttttttccccctcctatgattatttaaatgaaatgttacaggatttttctgaatattaattgacctaattggagatactgaatataaagtttttattgtaatgtttctgtataaaaatatactaaaatttttgtgtcacctagtcttttttttcctaaaacataatttcattaacatggctaatgaactgtttatcacttatctcttctcagaagtgtaaacttctgtgtatgggcttgtgcaccaatgtcactaaattgaacttcacaaggatattttcttcactagggaaggaaggaagaagttgaattgggcttcagaaaactatattaaatgagtattaacattctgacttgaatccataaaagctgtaacaattataattcatggttaaactgccctttatacaacctgtggaatttatatttcagcatatatcttataggtaagattactgatgacattttgtgtggaagatggaatttcatactggattcagattttgttgacttttgtggcctaagctaggcctctgaatttttctctataaagctattttgtgatatttcttatattctggggagaaatacatgaatgaatactaggattgctgtggggaaagggaggaagacagaccttctgtgcctacaagaaggttaaggtttactcaaacatggaacttctatctataaaccatgcatagaggatggaattgcaaaatcctggcctaactgtatttgctgggtatggttagaaggaagagggtttgggtaaggcattcctactggggtttagttcaagtgtctgaattccaccactgtagctgtgactctggacccagtaaaccatatctt

SEQ ID NO: 135234 - DNA, 1305 bp, Homo sapiens
ccctgaactagttaaatcagtgaatcctcattagtctctgattacttgcaaaatttcatttaaaacatatgaagttatttttgattgaaaagggaacaaaaagcttttgaaattgcatgttattatttaaacaaaggtttctacaggctttcagatgtactaagccctgcaaataatttatagaggaattattgggaaggacttatgaaattcttgaatggcatttgatggggaggaaatcattgcattaaaaaatatatatatttgaaatggcaagcttaaatgtgcatcttacctttactatccaagtgtccttaaatgaggaagaattgacttaggtggtcttacaagtttcatttttctttcttttctcctcccaccattgtttttttttaaaaaaaaaactacaggtgaaggttgttggaattcatagtcagatatatcattttcaacttggaataggaactagagcaggaaattgattttatatttattatgaaagcaagaactctgccaccaactgacagccatccatgttttagttttgtgataattgttcacagacattactctgtagttggtccagattatttataatgttgattgggactgttggtccattaaaagatatgtgtgtaattaatatctttaattaaacctagtaatattggcatattttatttttcttttacactggatcttgggtctaggattaactgtcagtactggtaagaacaagttataatagattgtgcagtgatttctgtggcttcatggatgtatttattaccatttttgaacaaattacactaacatgaaaagttgtatttgaaatgattgtgtgctagataaggtgatacattacaggaatggttgggtttatggagctttatgcagaggttttctcagaaattatagcacagggctgtcactataaaacccagtgatacagttggtaataacatacagtgaagatatttttagattttcacttgttattcaaataagtgagaaacctccagtttttctcatcatatttctttgttagaatcagtagagaaaaaaatgaaggaaaattcttttaactgtgtatgaggtgtgggtgtttgacttgtctgaatttcctcgtgttcaccacttgttacagcagtgatgtgatactgaggatgtccttaggaacttactgacttcttggttcttgaccttttgactgtgatcaagtagagatactgaatgcctgaaaatgaaatgatggactctataaacataaattctgttctgtcaatgtattgcatgaactaattt

SEQ ID NO: 135235 - DNA, 1005 bp, Homo sapiens
ctaggagcagtttgtggaccgcgtctgtgaacgcggctcataattgtttttcacacataagttatgcaaatgagcttttatggcaactggcataacaattagcatcctccagcaatattttagcaggttaattgcaaaatttctaaattgtacatctgacttgttaattaggcatgacagaggtggtaaaatagttatcttcaggcagtggcagccaggagctgcttgaaatgcaaagagcaacgattgattggatttgagggttacaattgtgggagcactgctgttgtcaagtgccgctgagcagctctgctccatcagttgcctcagagcaagaactcggtagttgctgcgaggatcctgccatttacaaatctgctttatttaactctgcaactcttccattccaacctatctgagcagtttatttcacgcggtttgttctgcgttgggatcattaaaacgagatggcaacacaaattattttgtgctcgaatttcaggacgctgaaagtttactttctattttaaagttcatctcaacatttttctcttaaaatagaaaaaaagtcataaattccctattttaattaaattgtaaatttcagttctcaagacttcatatgtgattatttgctttttaatgatttaactcttttaaacagtgcatctttttgtgcttcataggttcattgcaggaaaatactgtttgtgtattttagtcttaggttttttttttgagacataggagaagaaaagaatctgatgtaagggtttcatacagtggacaaattcattttgcttgtagaatttataaaataatattagcatggcatattgtgatgatattgtataccactattagaattctatctacagtatgttttaaaaattattttttcaaaattgtatttaaatttctgtggtctatttcatagttttacttggatagtaacaataatttggtaaacataaacattagtgaacacagcatgatggcacattg

SEQ ID NO: 135236 - DNA, 1046 bp, Homo sapiens
gagattttctctaggggaaatggatacttgaagttcattttcttcctcatattaaggcaaaaatgtgaacaaccttcagtataggacatatgattacagtatttttgcaggggcagtttatattctaaatatatttgcaatagtgaatgttgtaaatttaaaacaatgtagagattcagaaatgttagttgctattctggctgagtgctactttacgtacattgttttattacccttcttgtcattttttttcttgtaaaaattactaaattttcaggaactgcaaagctgagtacaatcatgactgtattccctttctttagagtgctgtaaggcctttaagagagttaactgattgcaagaagtgtagttccccaaaaaatatagtccacccactatgtgtatctgtatatatttgtaatataggtaattgtgctttccttctcaaattctttacctttgagttatttttttccctttaagagaatatttacttagttagtattcacttaattagaactgactgtttaatgttttctgggagggtatttatggtattttctttgctatatttgcattccagaaattaagtccccctgccattattcggtgagcctttcatacattagaatgatgaattgaaagcagaaatgggaaaaagactgcaatgcaatgaaaatttaatcagcgtcttctgctgctttaataaggcaaataattcttattggccgctgtgttaaggtttctaatatttaattcataacaaaccttgcattattctgcagtagcatcgacagatccactttgctgcctgccaacaggcaaccataaaaacttaaaagcagatgtaaatgtctaaaacaaggagaatgattcgatctaaagcggtcaaaaaaatcaacaatattgtgaaagagtttgatggatctctatatttagtgatgcaaaaatgatattaattaaactcacttgagcagattttttttttggacttagaggtaaccttttacaaagcatagcctttagtgcctagtcaaagacttgga

SEQ ID NO: 135237 - DNA, 1359 bp, Homo sapiens
cctgccaaagctaggtgcaagctcttgttacatggaagggttgggcctgttctcatttcttcttgaaatggcttaattggtgtcagcaccccagggataaaggcctctaacactgaaatccacacgattcaccctgtctctgctcagtgtagggaaactggtaacaactggtggtgaatgaggagcgaacggtgctgtaacaatactcgatgatgtttgggatgacagaaattaatacgcacttgcttgaagaaagcaatgattaatggcagtgagcacgggaacgctgtccctccttttactccactttgatggggattgaaaagcaaaaggctgttttcattctctgtggaaagcagaggtcacacagagtacattatagcaatttttcctctctggtttttttatttcataaatattatgataagcatagattagatagatttttttgtggaagcttaaaaggatattttatgtcatttaaacgttgtttatgcataaagaaatcacacattcttttcttcacttgttagatcatttcccttcatgtcagaataattagtgtaattagaaattttaaaagcctgcaaacatgaaattgtattaatgctgcttactattttacaactggaatcaaaagagcttagttttctaaagactgcaaggacagggcggggataagagtgttgcaggggctttcacctttttcctgcccctccccctggtttttctcagtgaatgtttgatgtaaatatattttgcaaggtacttgcacttgtcagcagctttcttagccatttgataaagattctttatcctacaagaaagcctgaaataacagaactgtactttggataatgaattcttcatctgtggagaactttaaaacaaagtacagtgttggcatttttttcttttgagtgagaaggctgatatatcttttggatccgacaggaagacataaattaatagagttctggagttcagtttctcattaataatccattttgtcatggttcttggcattgtcagcctagtagctggttcatattttgctaacggataaaagcagattatgtcttaaggcacaaagcaagaataaagagtttatcgccttttgggggaactacatgctataagaaaaatattgttttgcaaaaagtttcaatttttagttagcaatacactacattttctaaggtaaagctgttattttaagatccgaaatggttcttggaaccttaggatattagagttttagatcattgcttagagttgcctttgctgattgcaaaggtttgcttttcagggacagttatagtagatttaagcttgtttttatattttatttttagaact

SEQ ID NO: 135238 - DNA, 1046 bp, Homo sapiens
gactagttttattttagttttcattctcaaagggactgtaggttcttagagggcagggactatctgtcatctattttttttagcacacagaatctgctcagtaacatttttaaataaatgcatgccttctccatgtattattagatatatatctgctgagtacattaaatctgatactatattcttctaattctttacatataaatttattttaattacagtaactatatacatacagtataagaaaactgccatagctacctacctggatcctaagtaatttatatgtaaattatttgtaaagtaatttatatgtattactgctccattgctatcattaatgataatattttaaaaatagaaaaatctgtggtgaaaactcctggtaacatgcttaaagttgaatattcacttttaaagttttaactttaaaactatgataataagcactctgttttctagtgaggaaatatttgtgtgtttccaaattgtagggttgaattaggatgatttaagacttgtttctctatagagttgggaaggacatttgttttagtacattataatgaaatcttaaagagtagattttgacaagagacattttgctgacacagaatattttgttcattttgactctcaaataagttcttctgtcttaatgattgatttatattcattttagactgtacagtttcctagctgagttttctatctataaggtacagaaatcactgtttaagttaatgataaattaaataattatctttaaaggtgacagatgggtcacgtccaaagattaacctaagagtagttaagtaaaaaaatactatgattatgagttattgaaatgaatgctaattttaaatttagcatgattgggaacagaatacagtaaggtatcatttatttaattgctatagttttttgttcttttagacttacttgacttctctgtgttacagtcattgttgaactgtttacttcctattttgaatcaaccactgatgtgttgctgtcgctcatcaggtggaaagacctggaaaatt

SEQ ID NO: 135239 - DNA, 1080 bp, Homo sapiens
gtggttctacaaacactcagaccaccagtcgtttctgagtgtagtgaatctttgagtgtattgaggggaaagaatcagaaaaatggaatagaacaattacatgaaaggcaggagcaggctagcaatgagactcaggtgctagtaggactagagaaaaaggctggcggccggtgggacggggagaggggagtttagaagagggaaatctgaaattagagacatgggttgttgaaggaacttatttggtaattagcatatattaccttgcaagaatgatacaaaaaaaaaattactggtttatgacctagatgatataaggtccttgggggtggtggggggcaagtttgtctttttggtaactgttttgttatttcatgttgctttatagggatttaatttctgctatgtgatagaattcttttaagatacatgccatccttgtgtatataaaataagtagatgatttattgggttagaatctgtatttaatttgttaaactttcctatgtaaagacttttgaagagaatatctgtgtcatttattctcaaactttttgatcttaggactcctttatactcctaaaataagttttgtttatgcgggtttaatctctatttattgtatgaacaatcgaaacaaattcttaaaacgttaagttaatttaaaaattaaaatcataaatcgattatgttagcataaataacattattacaattatcagcttgttatatgttatcctaaacagcattttctgaaacaaaactaagcaaaactaaatgataagaagaatagtattgttttacacttttgcaaatcttttaaatgtcagacttaatggaagacaactggattctcatatctgcctttgcattcagtctgtcatcatatggttgatgtatatgaagaaatatctggcctcatacagatacctaattggaaaaggaaagagtattaccaccaaacttatcaggacagtttttttaagtgctgggaagatttcatactcacagtggaggacacagtgtttcaaaattctaatttttgcttgaaagcatgaattttattattagcgccaaaac

SEQ ID NO: 135240 - DNA, 4049 bp, Homo sapiens
aggaagtaggacgaggagatttctaaggctttattcagtttaatattctgattctttgacttttttttaaactgagtgaattgtttattaattagctcttaaccacttattaatttatttaagctcaactggttatgtataatttgtatttgttgctatcacattggttaagcattaatgttattttgcagtattgaaaaacggaatgtatagaagaggaaatggaagggaattgtaaatgaagaaggcttctacaagcaagtgaattttaagtggcaaggaagaagaaatttggatggtgggggggatgtacattgcagtgtatttaacatatttctgaattcagagtctttatagcctatgctataatagcagagaaggaaaatttgagttcagaaataacagtaaagcctgtaagttaaagaatctaccagtaatattctctgatagtgacatgtgtaatatgaactgttgaaaaaaatctccagagtaaaaagtggttcagcacataaatacataatgttgattctgaggttcctttagctccattaattttgaccagaaagctataatagtttttgaaggggaatatagtacttaggcattaaaatatatttatttttgctcctcaatgaaaaaaatcttgtattaccttgagatcttttgatcttccttctcatactttagaaggaaggaatactattcagtaaggaaaaaatgacccccaaactcaggttcttactcagcccagcacagtgtcaaagtccgttaaaaatttaaaaagctagtggaagggactggatgaatcctgggaaggtgctatttagattcttaaaaaggagagagggctcctgggatgcagtttgtgttcaggcaaatcagacttggaagctgggaagctgctattgtggcaatatttaagaaaaaaagacttcagagattatgtattttggaaatatttgacaacattagcaacatcaactactgacaaaaaaagaaccacctctttggcaaatctttcacagttgtgccaagaaaagcagcttcattggaacattttcataaactatcatcagttatgcagcagcagcttcacaaatcagaaatgatatcttcaggcgctgctgtcaagtgttattcaaataataccagcctcacatttgaataacagcagacattttgaattaattaatcagatgagatagtctaggccttttctcattagtctctgggtcaggcttgggaagatatatgtgttggtgatgatatacttgtctttaatcatgatttatgaagatttaggattgtgtgtgatttgtcaaaggttctgggaaaaggctggtgcatatttcattacttaatctgagattgattttatgatgctaagagatatcacactattgttcaaatgtgtgggaagtacaggtagacacaacatcccaggctttttactggcttatctttgcaactgtcaaacaatgctgtaaactttaactgcttgtagttaacaattcctgttttaattataggcagattttttattctgtccaaagggagaagtttcaatggttatttagctaaaatgcatagcagacattataactatgacctggtatgaatcatggacaaagttggtaaatttcatgggttggtcatggtgaaaatataaaatttcatggcttgtcaaagattaatataaaattcccattaaaatggtgcaaataatagaggaacaagaagtaaggttactctccttgcatgataccttccctctcaggactaattttagcaaaattgagatgtaaaatcatatcttttttcagttatttaagcaacattaatgatctattaaatgaaataatttgtctgaaaatatctagtataatgcctggttgatagtaggtactgaatatttgctattgataattttattttctcatttcctacctacttttcttcctttcctttaatgtttaaggctgtgttagcattgtttagcctttacattcttcagaatttgaatttttaatcctgttgggtcttaatttcttgggatgtgttttattttgaggagagtagtgcaagggtgagaggttatcattttagcgtgctgggtaaccagggggaccccagtgtgacctgagttcttgttgtgtctgctggtataatttatgttatggcaggcagtggggtgggaggtaggtaggtggtagatatatgaaaagtagaatattaacctcttagtacatttgaagcatgtactgcctaattcaaagtgaatctttctgtatcatgtgcctcctgagggcagttacgtgtctgggataagtagagcgtttttcattctactctcaagcacactaaaatgcttattatgtgaagtattaaggaataataaggtgattttcaaccttgttatacaaaacaaaaatttgcttttctttccaatcttggatgattgacaggtattgctttattgaggtgatcgggctattaataattactagttctttttcacttttatgttttgggaactgggttagtactcctaaagtagcttggcacatcttaacataattacaggcagacaattctaattgatgttcactttggggaagatagtttataaataacaagatgtgttgatatttggagagatacagtaagagtagtctgggaggcagcttgatgcagaataatactgattttggaaattaatagatgagtcctacttctgaactgctgcttaattgatttgtaactttgacaagtcacctaatttttcctgagctttagttttcttttcctaaagtaaggccactaattcgtagctttcaggattgtgagaattagaggtgaatgtatgtacaggacctaatgtgatacgtggtatgtaatagatgcttaataaattgcagctattgctgttatcttatctattcatttatctcttcgagaaacatactggggcatgtgtttgcaggcccaagcctataatctcagcactttgagagccaagatgagaggattgcttcagcccaggagtttgagaccagtctgggcaacatggggtgacaccatctctacctattctccccagaaaaaagagtgatatatgtggataaatacaagctgagtcatttataaatacaagctggaccattaagtaagtagaggcaggtgatgagacaggcagggatgacatcattgaggcttcagttctgtgcgagggtagtatggtctttgttctatactttggctagctactggtgggttcaaacaagggattgatctgatcagattttttatatagttcactttggaaacttagaaggaatatattacttatgagactttcgtagatcagtgacgatatgtatttgtaatggggtaatagtggggttaaaaaagaggaaacaatggttttaaactgaaaaatgagaaggaaggattaggcgattggttggagaatttttgtgtcccttcgttcacttggctgactcctatgtatctttcagatcctagcctggatgtcctttcagaaagccttttgaccacctctgagtctgctgataacctacctaagtctgaaaacctatcttatgtgctccagtagtatcctgtgttcccccttgttactgtgctcatgacactgtatttaattacatatttaattttctgttgcctccaggaaattgtgaactcagggcagagatactgtgttttgtttactgttttgtcctctggcacatagtaggaagcactcaatatctgttttttaaaatgaattgaatgtagtatgtgaggaagaaggagaaaacaagggcgtctgtttctagcataggtgaccccaggtgagtggtcgttttccacctgagagagagagtagagtagaactgcggggtcgtagcatatgttcgttatcaactttgctagataatgttgaattattttccaaaatgtgtgtgccagtttatattcaatacagcagtgtatatttgttctatttgcttgaggacattagtttttttcatatttaggtaaaattt

SEQ ID NO: 135241 - DNA, 1062 bp, Homo sapiens
tgggctgtgatgaagtagagtttgaagggagtgatgaagtcctggaatagttactccagataatgaaagagtgagctggccaaggataagaaaagtattgtcagattgaagactcagctgaggttggagactgaaattgaaatggcactatcatgaccacttgtcatttctctagcaggttaacatcgactacaacttgagtatatgcttggggcttgcttggcaaatgagagaaaaggatagggtgaaatggattataggggtctgttgcaagaatagttaagatgttcaaccatataatccattttgcatagatgggaaaggtaaaggagtggctgatagatgagaaaatggagggattttaggattgtttggtttaattaaattgaggaataaataggtggagtgcaagaaagggaaggtgactggcggagtaaaagactgttatcataggatgagacatttgaattttatttcagaaatgaagcacttctaggtgatggatgataaagttcaggatgtggccctgggagcttgtgtgtcaaagtgaaatggagctaaaggtcattggtgatttatttattttttaaggaggtcagagaactgtaaggctaggttgttggttgaatatcttatatgctccctgaagccagactcatggaattacttgggatagagaaggagactgaatcttgtgccaacattttaaatgaatgtgacaattattaatattagttaataaccaacagtggatgctaccttgccaagttaatttttcttagataattagttgtttaatgtggagatcatgctatggtcagtttatttagaaaagcagaatattaagttaggaaaatgaaacccatataagcactgttcataccataaatttattatgtgaatatttactaaattcttattctgggacttgaagttgcttgcagccaaggggaagagacaaatttctaaacagataattgatatagtgtgctcaatgttacagtaaagcagtggtgtcgtgggaaggacatatcccaaaacccattgggatgggcaagaaaa

SEQ ID NO: 135242 - DNA, 1271 bp, Homo sapiens
ctttcctccccacactgaatttattattcaccattcttattagtgtttactaatattgcatgtttttgaacctttaagattgtttcatactgttgttatctttctatgatttgctttcactcaacacttattttaagattttcaacattgacacatttagttcaagttaattcatttttcctgctgtatcgtattctattgtgattattctgtaatttccttcttaattcttgtgatgatagatattgaaattgctccaatttttcctattataaaatttcagttgtcaattgctgcataaggaatagccctaaaatttagtgactgaaaacagcaaacatttatcatctcatggtttctgtgggttagatagctagacatagtttagcagggtgccactgtgtttagtttctcacaagatttcagtcaggtgacagtgggctgcagttatcttgagagtcacttgggggagggtttgcctctctgctcactcacatgactattgacagtactcagtcctcactgactgatggccagagacatcagttcttccctacttgggccccccattttagggcagcttacagcatggcagctggcttccctcagagtgagtgagtgagtgagacagggaacccaatttggaagtcacagtgtttttgtaacctaatcttggaatcccattacttctgccatattctgtttggtagggtgaagtcattaagatcagtccatgctcaaggggaggctactacatagggtgtgaatagtaggcagtgggaccattggagccttcttagaggctgcctaccactctgggtgaaagggtatacatcatccattttattatttaatagatattatgaaatattcctattgtggctattctaatgtatactttcctaaaaagtaagaatttaagctttactagtgtttaaaataggaatcaatattggtggtttgtgtgttagaagcttacttagagcattcaggattgagaagaaatagtgggagttccaggtttgttttgatagattaccactttctgttcctggttgggagtatttgtattttgtagatgtaactaaactgatgctcatcaaatggacaagttatctgaagacatctgcaaagaaatacgtggattaaaataagaggaataatgtaagtgtataataagaaagtgggagaaatgatacttctactcttgatataagctcttagtcaactgtgtatgagggaaagataattttgatctctaatatctgaca

SEQ ID NO: 135243 - DNA, 1052 bp, Homo sapiens
atgtaaactgtaatgattccaatgatgccttattgcatctaaagaaacccataaatcagattccactattaatatatattagcagagggctttacccagaggcactgttttgtttccttggtattgacactgtaagaccatgggccattaacaccaatacaatttctattttaatgctaatggaaatggaagatttaaaaataaaattttaaaaatttaaaataaacctttaatacacgaggtcccacagcaattagaaaatgatttctttaagtggtgtcctttttaagagttgcattggaacttatgatatgaaagatataaaaacatggtagttgtacatatattgagaagttgctcaaaatttatattgtcactattttgagccatttttggtgtaagagactaagagtcctcttgcatattttggagtgtatttagttcatttgagtcttgactcttaggtgtaaagtctagcttatccttttgcagtattctgcatgtctattttctttatttgcggttatacaattagtaatgtgcagtgaaaatatggttagtgtgggaatagctcagattaaaattagaaactggacttggcatgtattcagttcactgcccagggttaaagtccagcgccacagaaagtggatcttcacctttctctcctggtgttttagctttactgatgatttgaaaccatagcagttaatatgctttagcctttgcttttacagatgagaaatggatcttatacttatatcaccaggtttcaaaactatttacactaagtgggatggtttactacctcaggggtagtgcattaagcctattgctcttgagaatccattttctccaccaattgatgggacagatatgacaagcctttaaagttgagtggaaattttctgtggggcgggctgttgtattaaattgttccttaccactatcatggatgttgtaaagacttgtgagtgggtagcctatggcgaggaaaagagatatattgtctgcagtagggaggctgtaaggtctaatatatagggaataat

SEQ ID NO: 135244 - DNA, 1194 bp, Homo sapiens
atttcctgatgtttttggggttgtctgttgtttagtaatcataaaactttattacatctccattctgatattaaatcaccattcatcctgaagttaaatgtttcagttatttttttgttcttttcacattaagggaatgtgttttatgttgtgatgcagtatggagatgaccagaagtaacaataattaaagaagcaggccggttcagtggttcaggcttgtaatcctagcactttgggggccaaggtgggcggatcatgtgagtctaggagtttgagaccagcctgggcaacatggcgaaactccgtctctacaaaatgttatctgggtgtggtggcgtgcacgctgtagtcccagctactccggaggctgaggtgggacgatttcttgagcccagggggtcaaggctgtagtgagccatggttgtgccactgcactccggcctgggtaacagagcaagaccctgtctcaaaacaaacagacaaaacaaacctcttattttaggaagggtttgttgactacttaagtgtgaacattttttcttctctaaaatattgcattatagtacaatataaatataaaataagcattatagtgtagacaacattttcttttcctgggcatggatgtaattacatgaagacatgtagagcagattcagcattagcagataattctctattttgaaaggcatataagatccagtttaaagaataagataaaaatgtcatgagctagaatttagtggtaattttctatgtgtttataatatctttgatccacagaactgagttttcacatccttctaaatcagggaaactgtactctttaaattcaattctgtctaatttttggcactttattttccaggatatatatatattcagtgtatttttcttgatttcctcttgggaggtgaagcctcacaaatcaagggactgcattgtttcagcaatgcttattattgtaattattaattcaattatttttatgacagtaataataattgtagtaataaatgctacaagatatttgatgttaaagcagttataataaatagaccatcagatcttaacaatttgatgtttggtttttgcttcaactatggactcagtggtgcttactgatctgatagagagatgttccacttcaaagaaacatcacagatgtctactgaaaagataagtaagggtg

SEQ ID NO: 135245 - DNA, 1009 bp, Homo sapiens
gtgatcctccctcccacctcagcttcctgagtagttaggattataggcacgggccaccatgcctggctaatttttgtatttttagtagagacggggtttcatcatgttggccaggctggtcttgaactcctgacctcaagtgatccacccgcctcagcctcccaaagtgctgggattacaggcatgagccactgtgcccggcccccactgatgtcttttataagaaaagtaaaagtaaaaaaaaaaattattttccaggattcaaagtatgaacatgaactacatttagtttttatgccacttttgtctcctttaacttggaacaattccttaacctctttgtcatgaccttggcataaaaaaatgggccatttattttttagaatatgctttcaatccaggattttctgatgttttcttataattaaattgaagttatactgttttggcaggaatatcacaagaatgatgctttgtcctcagtcattagatcaagaggcatatgatgtcactttgtcatattactagtcatactaactttgatgactactctcgtttattttttacacgtttattgaagtgtaatagacatacaataaactgtactcatctacctctaatttttaatataactgatgagtaaagttaatgaccttagagtgtagtcttatgaactctctgtttgaattaccagaaccttatgaaatgtcagggccatgtgctagcctggtttgctagcaaagtcagtgtagactctacatgtcgtaaaaggtgaataactggtgtaaaagaagagcaggctttctgactttggggtctttatctagtctgagtgttgagcatctttgttgtgattttatagcttcttcatctcttgctacatttgctgtcatgagttttcatgtcagtagcctactctcagatcagtcttggggataacaaaagttactagaaatggtgaagactaaataggttatagactatatgtaggtaatcagtggtagggttt

SEQ ID NO: 135246 - DNA, 1070 bp, Homo sapiens
gaaaagaatatttttcaactagttagcaggtaattttaaattataaaagtactctccttgcacagttgaaaaaaatgttgtaacctcttgctgttcttctccttcctatagtcccactcatcagagaagaccacatttcatctttctcttttttgttttcttgctagttacccaccataaatttaaataactgaaattgttgactgtatatcatttttccatggtaaggaatttggcttatttatataatctcccacataatttccttctcttcctctctggttttgttgttgtattattttttgttctgctgtaggttcctcgtataacataagcaatgtgttctctagctttgattccatcaatatcagactgtattactttacttttatatgaaacaggaggaaattagtactcccttctttaactgttgtacttttgatattacctcttaattatttttggagaatggttgtctgacttctcctttgggcaaatgttctttgcagtgactgggtgtgtgtgtgtgtgtgtgtgtgtggaaaatgtgaggagggaccaaatttctcaggtgttactcagaccttcttttaatttactgccccatttcctgttgctgttctctgtccaaggttggagcctctgtcagtctttgctgggaaaaccggctcctacctccttctcattgtagatttgggcctccttcactgtgatgcacttgtcattgtggtgtctcatttgttatctgtgttacagaaatttatcaaaatctggtcttcttcagccccaccccctactctttctctctgcctccctccgtctctctctctctctttttgttttttgagaccgtgtcttactatgtcacctagactgcggtttaggggtgcgatcatggctcactgcagccccgactgcccgggctcaggtgattctcccacctcagcctcaggcgaggaccaccacgcctggctaattttggtttttgttttttgttttttgtagagactgggttttgccatgttgcccaggctggtcttgaactcctgagctcaagtgatctgtgtgcc

SEQ ID NO: 135247 - DNA, 1020 bp, Homo sapiens
cttgcctgagtaagttgcagaactgggatagagattagtgctcgaatcttccaactcagggttcagttctctttatattatactcttttgactggggaaagggttgtgtctgtcctcaagttttagtctgtctctcttttttgtgtgtgtttgtgtgtgtgtatatacacagaacatttcaacactgaaattgcttggcagtttcatggtctttgtgccataccttctttaacatagaatcccagtttaatctttttatcctttaccagttctcttcttttcttgtaatgtctcatcatttagattatcagatgattggtcctttttgactatttttggagacaccagagttcttatatggtttcatttttttctgcagttaatgtatctgtgcatgcgtagctgatcttcaccttgttaaaaggtgaaacaatttttttaatcaacattttttgcttcttagtctttccaaaatcagtcatgaaactagagtgaagaattattctgtgttgataacctcaatagagtaaagaattggtctgtgttagcactggtctgtaaaggctacctataagtagtttggttttatcagtgtgactagtttctttaaagtagattagagatgaagtttagatacaacacatattgaatcacacagatttgttgtttacttccaatacttatttattaggtaaaaataaacctataagagatcttcttcaagagtatttgcatcccacattccaacactattcaaagccttattttcctagagatcttggaggtggactagaggtacttgtgacttatgtgatgatgtatttttttgcttatagattaatccactggggtttgtgcgatagatacatgtcccctattctgaaagaaacacacacacacattaatttcattgagtctttctttacattcatatttgctgagttgcacaactccaggttgcatcatttataatacactttgataacggtgcattctagaattgtgcacaatggctacccc

SEQ ID NO: 135248 - DNA, 1506 bp, Homo sapiens
ccaacatggagaaaccctgactctactaaaaatacaaaattagctgggtgtggtggttcatgcctgtaatcccagctactcggaaggttgaggcaggagatcacttgaacccgggaggcggaggttgtggtgagtcaagatcatgccattgcactccagcctgggcaacaagagtgaaactccatctcaaaaaaaagaaaaaaaaattcaattctagctataatagatcagctgaactatatggaaatgggaaacgtgcaaatactactgatatcttccctgcttgtaagaagagggtttagatatagatatgggcaaagcttcatttatgaatagatttatatatcttcagtgtacatatatatccagtgttttatatatatataaaactggtgttttatgtatatatacacaatgtaaccctgtactcttcacttttaagtttattttagttagaatcttttaatacgaaaacttagaatatgaaatagcaaaatactacaaaagttgaaaacaactctgagcttttttgtgaatattatctttttttctgccacatttaattagttatcttttttgtatttcccatgtaaattttatttcacattcttggaggattaatatggaatttgtatagattttggaaaagaaattttaaaaaaccccaaagaaatctattcctattcattgtttctttcacctggatctcctagtacctataaatgggtgcatgaaaacgtttgcactgcactgaattgaagtttttactgtgggattgaaagaagcactgtgaaaaagatgaagaaacaattgaccacactggatctgtagcccaagctattagtttagtcttagtgtagtctactctgaattttgacttactggatatttaaggtctctggttattcctaacagactggttggctttgcttcacccaaatagattgtggtgtgaaacaagacacttgataccgagattaaggaatgtctcatgacagtgcttgtttctattcagcactcccctccactttaaaattaactgtttagggcttaaatgaaatgggttttaaaagcaagacaaaactttgttctcgctccctcactaataaacctgtagcatctcacagtagaaaaaagtatagtgggacttactggcaccatggtgcacagcattgaagaatttcatattgtgacaacacatcaaaataaattgctgtcaacagaccaaaacaccaagtgctgtgattctgtctgacgtgtgaagattcagacaggctgtcttgacaagttgtggtggagcacctgcatttgacagaagacagtgatataaatctgatttgcctgatacgaagcacctagatatagttaatgctggtgacagtaagtctgcataaaatttccaagctgcaagtctgactttattttgcctctattaagtagtagtatttttttggtcacattttgattctcacttattttctatttgtatttgtagtgtggccttga

SEQ ID NO: 135249 - DNA, 2204 bp, Homo sapiens
gattaatttttaaaaatggaaatgaagacaagatcatattaattgtgttattttttacttttctgtagtaactaacttgttggtagtatttcatggtaagatttgttattgtctaaataaagaaatctatttggttttcccagatctcaaagatgctactatttcttaccgaatttattgcttaactcatttgaagattagtttcattttatcaccaattgttgctctggtggttcccctgtgaaacacagtgaaataattcaaggattctcaaatttgagaaattttgaaattagctctgtccactatatagttttaaaaagtacaaattatttgtttcaagttactattcattcttgactgtattgttgttttaccccttaaaggctgctaatgagaaatagagcctcattatgattttaaggatgagagaggaaggcttttaattaatgatatgtaaatggtcttgaattgattatgttagaatatcaagagagatgggtagaagctgtggtgtaatatattttaattaagaattaattaaaaatgatggcaatttcataaagcctcacagaaaatagtggaatttactttctgtcaggagtaaattagcctgtgattaaataaagggcctgcattaatagtggagttatttttaaactgtgctatgaagaattatgtaatttttcctaaataagtaaaattaaaatttaatatttaaaggtgggtagtaaatggtggcagagagctaacttatttttatgactcaaatatattgtttcttctttataaaattttgtgtaaatatttttaacctcagcatatacagcatatagctttaaaagaatggactttgtctgttctattgcccatttggcattggggataaggaatgctcttacacgtagccatggcagtggttttcctcttgtacacaagatctgggaaagatctttactgatgactgaaaattatttttaaaggaggtactcttctttttttccctgttctccagagtttaaaaacgtttcttccttagatgtggtttttcattgtaaataatactctttctttagaaactctaaaatgtgtatatttctttacgttgaaacctgaaatttccctgagcataccgtttattcagactcagactacactatttttataaacatttttttccactagtttagagaaatgttttaaaaggaaacttgtctttgagttcaacttggattgtaatttgaatgtagaagaaaggctgcataatccaatcaaagcatatatttcattaatgttttttgtacattaatacagggtatctcagtatagtagcttattatattgagttattatttaaaaccccacataatacattatgataccctcaaccttaattcagtacttcatacttgtgaaacaccccataatgagtagttgaattttgggattttatggatcatccatatcaatagttatataacttgtggggttttttagtttttttgttttgtttgctaagtagctaaaaaaaaaaaaaagatgtgagttttactttgtcagaacctcccaccattcattaattctcctaactcacctatgtttgcctatttagcaagtatgcctcttgtatgtgtaagtttgtggtatggtcatatttgatgacgcttctgtggttcttgaaactccaaaatacagttgtgggaaaagtggagaaacgaacattctctggttccctctgcaaatgctgaccattgctgttgattattgacattttcaaatttacttcagtcactgtaatatataaaaataagcatcacaaataaaagttgtcatgaccctgtgaggaaattgttgttgatgtgctatttaacttttatttacctgtacatgctgctcagaaaatggtttttatgtaccagtgtgtgttatgctgttcattgaagtattaccatagcaacagtaatatctcttgctttcatcttaatgctgatttcaagatacaaagatagtttttaaaagactgaatttaacatatataatgttaatatggtcctttttaaggaggataaattacttttttttttggtaatagtgttaaataaagttttaaaggctaaatagtctgttagtgcctcaatgaaatttctgtgttagctactttggatcagtctccttttttaaaaaaagaaagaaagaaagattaa

SEQ ID NO: 135250 - DNA, 1051 bp, Homo sapiens
agtacagatccaatgggaaacagttaaaagatttggaacgtgttttgactagagaaaagtaggctaggctgggcgcggtggctcatgtctgtaatcccagcactttgggaggctgaggtgggtgaatgacttgaggtcaggagttcgagaccagcttggccaacatggtgaaaccccatctctaccaaaaatgcaaaaattagccaggcatggtggcccgcacctgtagtcccagccactcaggaggctgaggcaggagaattgcttgaacctgggagtcagaggtcgcagtgagctgagatcgtgccactgcactccagcctgggtgacagagcaagactttgtctcaaaaaaaaaaaaaaaatgtaggctaaagggttaaaggatttttatgagcttgatgccaggtgtttgacctctgtatacaactactattattatttttagctttatcaataaaggatgaaacataaggaagtgtcctgaaagtgaaagtaagaaagattgtggtttgatttgtagaggggctacgtaaccactagagtgaaaaatgactggtccgtttgtgagtctctgtacctgttgatctgtcttgggtgtgtgctagatatgcctggaatgaagaatcttaaccagaagcatgctcaagggcctgtccacagttccgttattccatgatgccttattgatccagtatttcaaaggaaagtatacctttctttattatgagaatgcatatttaattaatttgttgtgcacaggacacttaggcttctcattgctgttttccaggtgtctcaaaggacaagataactctagtctccaaggtatattgtaagtctagtcctaggccttcctagtttataaggaagttaacagggtctagaaagatacagtctttcagactaacaggttcttattgattgtattagaatttaaattagaatctatatgatgaattacatttgatgaatcagttggcttttttttttttttaaatactcattgcttactagacagtgggggacaacaaagtctccagaaatggctg

SEQ ID NO: 135251 - DNA, 1021 bp, Homo sapiens
ctagaatgtcctggaaggaagtctgtttaattttgcattgggagatactttataaatgttagctgtgggtggcagttttcaaccagttaaattctaccattatctttgagaaaggcaataacgttaatatttaactagttccagaagttaggatagaacatttaattccaggagaaaacagctaaaattgcctgtagtgaatagagattctcgcctagtaaattcctttatttaccacaatcttaccaggttcttttgaggcatgatttttacctgttttaacatttttcatggctcaattattttacatataggattctttgaaaaagaagtgcttcctaactttaaattcaaataatttatttactattctcatatcttgattatttgtcacaaatgatatagtaataaccttcctttctcttcaaaatgtttttatgtgaagttcaaacagaattgaaaatcagataatataagtcttgtcgactctagcttgtctggaatattcacaaattaatgaagggtcattggtgattatgggattttttcctttgaaaatatatctaatgaatacataagatatatttcataaacataatatggtaatgtcactactaagtatttagacagttcagcttattgggtgatgacacacactttttttctttgaaaatatatgcataagatatattaaatatttgaaaaatataataaaggtaatgtcagtactaagtatttagatggttcaacttattgtgtgatgactttattcagaagagtggattgctctgacccttaattatggacatattttttaattgacacataatattttctatatttatggtgtacatgtgatattttgttgcatgcatagaatgtgtaatgatcaagtcagagtatttaaggtatccatcaccttaagtatttattatttctctgtgtttggtaacatttcaagttctttcttctagctactttgaaatataccacacattcttgctaactgtagtcactctac

SEQ ID NO: 135252 - DNA, 1021 bp, Homo sapiens
ttcacttgacaactttactcaattctaggcaacagtggctatgctctggcctgcagagacagtgaatccattctggctctgacactcaattttattgtaaaacacattcatgttgacatcatatcagttttctgaactattacatgcataaaagaattcacccctttccattcagtctttttcagccttccggttaggagaaatctgcacacccagtgttttcattttgcatttaatgtggtctagtccagaaaatagcagcttcagttaaaaaaatgtttttcttgaggcacctttcagagtgtgttagcttaatggcattcattagtaggagaggactaaggagaaatgcacaaggcagtttttaggagagaacagttgaagtttagggtaaaacaagtcagtattgacccaagattatggggtttagttgctcgagttcttttgcatgcaactgctgtttgaaggattccttgctgggcctcatccatgcccaattttgtgggctttgcctcctacttgatctttttggttgtgttgtttttgtgaagtcctttgattgctgatttttttgtttacttgttttacttacattggaatttgctagttttgcatttggagtttgtttcaaatataattcaaatcttcatctttagtttatgggggaaatgttttttctttacaaaattaagctcttttatttttatgtcagttctagctttgtactgagttttgctgaggctatccttggttttcacgataaagaaatttcaccttttcactttttacagggcttgattgacttacttggtttcctgatcctaaatattaagatgttttattttccttcttctctgtgaatacaggtctccctaaaatatccacaaacctatttggggaatttaataaggttttccttgttatttggttctactgttctgagactgcccattgggaatttcatttacccataagagactgacattcttacatggagtgattgcaaattttgtttttaaac

SEQ ID NO: 135253 - DNA, 3177 bp, Homo sapiens
agaaaaagtcctaggtatatatattttgatatatttataatggattcatcacattatcttttcaggcattaaaatatactatataaaatgtcaaaatattaccataatgtaagctagcattctttgagtgggtattttggttctgaaaagtatgcttaaatattacaggtgtttaaattaaaaatgtcaaaccatgaaggcataatggaagtaatcatttttacatagttttaagcagtacagggttgaaaaagctttgcatgccagactattgtgaatgagtggagttcataagaattcaaaggacaaaagagatcattatgctttgttacctcagctagttcattaccttaattgctgagtgtaatccagtcttggaagaaaactctggggctttaagaagatcaacaccagcaccttatggcacagaaaatggaaaccctttcctgtaccattgctactccaggaacactaaaccttgatcaaaggctgaacttttcttaaggtcggccatgtgaacatcccctggagctgtaccattcgctgaaccataatgaagtttagtaggttcagcaccatttctctctgactgtgaccgtcctggatcactggctagcaatagcatattatcagcctttcagataggtgaggtttaaacataattatggttagtagtataatatgcttttttaaaaatactgctttcatattatggaaactgaacaaactactgtcactatttaactacgttagtcaggaagcattaatttttttccttccttttgaagggattgctatgtctccgtacctaaatctttcggaaaaccttggaaattccctaaccggtatacttttcccgaaaagtcctttactatgcagtgtggatgcaactgtgaaatggttgactcatctgaagcatttttatgtatatatttttctcacctgtgcagcaatttagcttggctttgaagatagttttctttttaggatgcatacagttgcatacattacgctttgaaaaaattacgctaaaacaaaaaatatgacctttaaaagcatggttgagttgcattcattttataaccatcaaagcaactctgtactgttgtaaggtagaaaaatcaatgatgcaatctttttccttttgcctcgtgcaatccgtaattgaaatggaaaatcaaatgaacggctaacagataattgttttatcaatattccctgcctgccctacaagggtcagcatagaatgatcatgagccagggatatgatgaggacaaaatgtgaaattgaacagcaaggaggcaataaatcagccttgacaagaaagagtgaccagcatgtagctgttgtaggcagctttggggacagtttttgtctcaggtgtctgccctgatttaaaaatgtgagtttataatatttgaagctttgccaccactaagcttggctattttggggttatatatgctactaaagaaaatctgagtagtaatctgactgtaatttatcttaaaagacaaatgttgaaataaataaatttccacaaattcagatattctatatggtatgattaagaaagtaaatgtataaaaatattttattgtattgttgcatttatgcaataggccttgactctaaagtgaaaatgattcactgaattagtttttaaaaaatatattctgtaaagtttgtaaaaaataaagtgaatattagtttctcttgcctaaattatgagatttatgtgggttgaagatgtcatttgaggaaggaggatccaaacaaaaattaagactcatctactcatgttttaattttctttattttcctattagctagaaattattatataaatgacagaaaaacacagttataaatgctcagtagtagtaccatgtaatgtgtaggattgtgggataagtgttattgttcatgtccacattaaaatgaaataacttcagacattgccaaaatatggttgctgggagttaagtttattcacataagacataaaattatgttggtgaatgtatagggaaattttcaggtcattttagaaaaatattttgagagcttaaaaagatttattttcaaataatttacctaattaggaattcatactgaggaaatagagacatttgtaaagataaacacatgaagatggttaccactgcaatattctccccacctccttctctcttaaatttttattagggtgaattttgagtcacatcacagaagacagaatattacagcaccaaacagcaaacacagccaacttatggccaatcctgccccattgtcacctccatcagctttctccttctacattttaaaaagtaaatccaagacatattatttcacctgtaaatatttcatcatgtacccctaagaaatctttaaaaaaccataaaatttcactgtatcattattacaccaaaatatgaaccataattccttgatatcatatatccaaattgtttgtttgaacagaatgcaggtaaggtctactcattgcagttggttgatatatcttttacgtctttttaaatttaaagcttcttttccattttttttttaaccctttgtacttttttgttgaaaaaattgggttgcttgtcctgtaagttcccagtctgtattttgctgattgcatccccatggtatagtttaacatgttcttctgttctttgtatttcctacaagttgagagttggatctgtaggcttagtaaaattcaggtttaattatttattttcctggaagaattgcttcataggttgtgttatattcttatattaggtggctcatattgtctgcttttctctttattggtaatgttggcggctattggtgatcaatgcttacatctattagtttatttggggtagcaaaatagaaatattctattatttcttttcaatttatttcttatactaatttgtgaagagaaaatttcctatatctactacttagttactgaggggtctagtttgcagcattattcctaaaaggacaaattggaaacagttgaaatgtccaacaataggtgaattgattaaattatgttatagctgtgtgatagaattctacataattattttgaatcatgttttagaagaatacccaatgatatggaaaaagtccaatgtattaaatttataaagcagcaataaatagta

SEQ ID NO: 135254 - DNA, 1038 bp, Homo sapiens
atgctttgccttttgaaaacatagtaattatgatgttatatatattaattttcagtgtttcctacatattatttaaatatccaaaccacagaaaacattatttttaagtagtagtctttaagtaaggtaggatgcaattggtataagtatgaatttacattaagaaattagaaattttaaagatttagtaagaataaagtcagtattgtactgaaaaattataatttgtaaagcttctccccttgttttatgcagaagtctaaataagcacatgaattaagtttgtaagccttataaaaactaaagataaaactgtttgagaaaatcaacattttaaatcatgctaaatctcttcctatttttactcatcctcttgcagagcattgacaaaaatatgaaattgatttggttgaagggtgttaaagagccgacagccaaatgtcacaaacaatgaatggctgcagtgttgaaaaaatcaataggaaggttaagctggtcttgtgaaagacttggcagactgctctgttccaggaagatatctgtcttctggccttggttgcatgatcaaaaggaaaacttgataggtttaatgaaggaagatactgtaaaactgacagtagaaatatagacactgtggtaaaccatagtgcacatcagtgagtggagctattagatatatttttcagcctgaaaaaatacttatgggtagagatgtcaaaaatattaacattcttttactttttcatcagttcctctatcagctaataaatttgccttaagtaaacaaaggtttgcatcttaaagtgcgagacacaataattgctgtgttaattagtaaaagaatttcccaaatctgttgattatgtttaaaatctaaatcaacattatatctttgccattcgcagattgtgtccaaggtattaagaaagatcgacagcctaggtaaaaaagacagccattgacttatcaatgaaaatagaaagtccgtcattgaaaaccaaggtgggatttatgattcattagtacaccccacaggcc

SEQ ID NO: 135255 - DNA, 1133 bp, Homo sapiens
caaattaacatttcttctctagttatctaaatacacctttgtaatttttagtgaatgaatgtgtttcattcatcttactcagatagctttagctaattcagttgtctcagattttccaagagactaaaatgtcattgctttctttccccattttcatagtcatattcatttgtacttaagacttataagcattgcaatcattgtcatttaggacaattgaaagggaacttgggttgaaagagtttgtgttttggttatcaagttgccatgggttccaaactcccagttttgctatttattacagttatggctttaaactagttactggacttttctgagatttggttttctcattataaaaaatgtagataatatctgtttgtaagggtgttatgaaaagagcttgggaaaaagtgagtactctgtaaatagtagatatttttatcatcagtaagcaagattgtatcagcatgagatgactaagtcaaattaagtcagtttagttttatctttctggcttatctgcatggagtgctcttgacatgaattctgtctttcaatggttgattcacttcagccatactgcattatttgcagatcaggaaaagttagagatctcatctgcaagaacttaaaacaaaactaagcagaatggaatcaacttcagtttcattttagttgagaatcagtccaagaatgaataactgtaatatatttaattttatagattgagtttaggatatttttattaacttttttttacagtgacctagtttttcagtttccttataccaaataatttaaaaattatttgtaagttatttataaatctagtaacatatttacagaatttatacagtactttaatatattcctataaacttcttctaatatgtagtattagtgcttcctattggtatatgttttattctaattgatcttgacttactttcttcaaggtaaagatttttttctttttaaaaaaattccttcaaatgataaatatcccttcatcaaattttagatgtcatgttgacagtatatcaaaactatgcttttgctagggcacattattacttttggttaagtgtgtgggttttgttgtgattttgctttcattctaattctatagg

SEQ ID NO: 135256 - DNA, 1096 bp, Homo sapiens
gtttaaatctatatgatttttttaaataaaaaaatttacaacataatatcatgtcatacaatttttatggacatataatataaataggcccaaaccatagccttattggaaaaaaataactataaaaatatattttaatgcttagtgcattaaacatttttgctatagaaacaatggacttggtaaagtaatttaatgaatgtcataaatacgaacaatctcagatgagagatattaacaaataaatatattaataaaagatatattatctggtttctctgtgtcccaagtggggcctctttttgaatcaatgtaaaatactctgtatagagctagtgttctgaactggaagagtatgagaaaaatgttgctttctgcgctgctttatttctgtcacaggtcaggcttaaaatgctgtgtgatacagttattgactctaatctgggcataaacacaagtcctcaagcaccagcccaattaataatttgcataattaacacgcatattaaatagggactggccttgcatctgtatttgcagtgatcggggtaatgagggctaacggagcggcgcctcgggcctgggttagcagacgtgtggcagtagtaatttttgcttggattgacaactgctagacaagcagtcccagcataaaactaaaccccgtttggcagtattaatcgttgacaaactgctcttaaagctgtaacattgtttctgtcagttgtttggtttgatgtcactgttagacataataaatcaatagtgtcagaatttgggaatgtttgtagctagcaatgtttattatttcatatgactgtcatgtacaaatagtggttatcatggttgcctctaaattatcaaagacagaatattgctttgaatatacttctgtaattcttgtttcaatgaattctttgccatctggaaatgcttttggttggtatgcctgcccaattctattgtaatattcattgtaatattggtgccatatgtcctgttccatgatttttaaaggaatatacagtttaatttcttgaaagttcatttagctataaatgaagaagatatacctagcttattcagctttatcttc

SEQ ID NO: 135257 - DNA, 1051 bp, Homo sapiens
gagcataagaagtgcattagttttaaaaagatgtagtcaattggagtaaggctgcccttagcttgtcataagaatattttcacctaaaagaggccatgcataaattcagaaaattattagagtccataggtagaaaaacatgaaattatgagcattaacagcattaaggctgggtgtggtggctcactcctataatcccagcactttgggaggccaaagcgggaggatcacatgagcctaggagttcaagaccagcctgggcaatatagggagaccccatcactagaaaaaaattaaaaaattatctgagcgtagtgttgcatgcttgtagtcctagctacttgggaggctgaagagcatttagtaaggcatttgatgaaaagcaagtgtggtctgctcattatacctctcgtttgtatattgttatgctataattttaaagcttatttcccatttattgtatatctgtacatgtgcatatcgtatacatatgatagcataatgctaaatggcagccatatgtaaaaggtaacaaggggattttcaggatataaatgaaatgtcgtaagtaatatgactgtttcttaaaaatcaatacactggaatcagtgaatttaaatgaatggggttccattcaaaagtggtatttccagaaagtaaatgcatatttcacttttggggaccctacttttgaaagactttggtccatttttttttttttttttttcaagatgaagtttcactcttgttgcccaggctggagtgcaatggcacgatctcggctcactgcaacctccgcctcctgggttcaagctattctcctgcctcagcctcccgagtagctgagattacaggcacctgccaccatgcccggctaatttttgtatttttagtagagacagggtttcaccacgttagccaggctggtcttgaactccggatgtcaggcaatccaccatcctttgccttgcaaagtgctaggattacaggcatgagccaccgcgcctggccaactttggcccattcttttaattatctttaatagtggtaa

SEQ ID NO: 135258 - DNA, 1021 bp, Homo sapiens
ataataataatgataaaagagcagataataacaagtgttggtgaagatgtgtagaatttgaaatcctcctacacagctggtgggaaaggaaaatggaaaatagtctgtcagttcttccaaaggctaactgtataattaccatatgacccagcaattttatgcctaggtatatacccaagagaaatgaaaatatatctgcagaaaaaaaatcacagatgttcatagcagcattactcataatagccaagaaataaaacaacccaaactgattaatggataaacaaattatggtatatccatacaatggaatattattcagccatagcaaggaatgaagtattgatacatgctacaacatgtatgaaccttgccaacattttgtcaagtgagagaaaccatttatcaaggaccacatattgtaagattacatttatatgaaatgtcctgaaaaggcaaatctaatagagaaagaaagtagattagtggttgccagggactgaagcaagggacatagggtgatgaggagtgactaatggggaattttgagagagggtgatgaaaatgttggaaaatgattgtgattgttgcacaactctgtgaatatactgaaaactattgaattgtatactttaggtatattgtataataagtgaattgtatctcaacaaagtttttataaaaaatagcctgggggaatataaggagacatatcatttcattgatactaaaatgcactttaaataaacattttcacatttctgaaatcaggatgccttttacagacaatggtgtcttaacagttgctgccagccagttggtagtcttgttgtggttgcattgcctgtgtatacaagaacttggtgtttttcctggtggcgttactaggtatatgtagcctcttgatgtttcagtcaacaaaccatttgatgactgttgcctggttgtgcttgaaaaccttcttgtgacatatggtaagagcaaccagcatcaaaatttcttacatatggtaagaacaccagca

SEQ ID NO: 135259 - DNA, 1047 bp, Homo sapiens
ccaccacactcagctatttctttgttttttgtatttttagtagagatggggtttcaccatgttggccaggattgtctcgatctcttgaccttgtgatctgcccaccttggcctcccaaagtgctgggattacaggcgtgagccaccatgtctggccctgacatatgatttttaaaattggtgtttaaaaagtctaaaaggccttttcagtaagtatagtagatactttctaagagttaagaaacattgtaccctagtgtaattgacagagtttagattctatgaaatgctatagtaacaggttaatacattgtgggaagattagatgaagtgatgaagaaacacctaagaaaccagcatttcttatcactggttactagatgtttcttcatcactctttttttctatctcacacaattttccctgttcttaatacttagctttgccccgtgtttttatttccttctctttttactaatcatacctgagcaattttttttctaattatgtaattccccagttaagaaccttttagttccaaagtgggtgttattcttgaaatttgagaagcccctgtctccttagagaagcccctgtctccttagagaagcaggcaacgatggggagaatggcttataagccagtagagggtgttccaaagtgtgttccatggaacaattgaaggataatgaggaaggagaataaactgtccagggtcagagtgaacttgagaaatgctagactaaacagaatattgcagaacttctcagagcatttaaaatgatgatatactttgggattccccatgagagtaatataataggcagcatttcttaaaattttgtgacttggaaccattaaaagaaaatctgattagtatcctgagggaccagcatcaagataacacactctttttgagaagaattttgggagtcaattattagagtgtactgcctggctgtccagcatctcctagatcagcactccccaacgtttttggcactagggagtggtttcatggaagacaatttttccatgaatgggggtg

SEQ ID NO: 135260 - DNA, 1098 bp, Homo sapiens
ataaaaatataataataaacatttctagagataaagagggacactatatcttgataaatggtccaattagacaggagaagtgtaacaatactagatacgtaggcttaaaaacagcttcaaactataaagcaaaaattgacagaatttcggctgggcgcggtggctcacgtctgtaatcccagcactttgggagaccgaggcgggtggatcatgaggtcaggagttcaagaccagcctgtccaacactgtgaaaccccgtctctactaaaaaaaatacaaaaattagccaggcgtggtggcaggcacctgtaatcccagctactcagcaggctgaggcaggagaaggcggaggttgcagtgagccaagattgcgccactgcactccagcctgggcgacagagcgagactctgtctcaaaaaaacaaaacaaaacaaaacaaaacaaaaattgacagaatttcaaggagaaatagattcctaattgtggggagatttatcatatccctgttggcaactgatagaataatcagacaaaaatctgtaaatatacggaaaaatttaataatacaattaacaaacttgactcagtggacatgtggagaatatatcaccagcaactatagaatatgcattttttcctcaagaatatgtaggaacactgaaaaaaacttaactatgagtcaaactttaacaaattggaaagaatcagcatgacacataccatattctcttatgacaaaacaagtggttataaatgaacaaatgtaactaaaaaataagtaattcctacaacatttggaagtttaaaatgttttctaaatcattctcaagtcaaagaaattgtggagaaattgtcaaattctttaactgattaaaaatgataaaagtatagtttacaccaacacttaggaaatatgactaaagctttatattatttttagcttcaaatgtttacattataaagatttttaaagtcttcaagttaattagctaaaatccaatagaacctaaaagaacagctagataaacccaaaggaaaatagaaaaaagggaataataaaaacttgaagatgagttaaagaaaaagaaaacaaagat

SEQ ID NO: 135261 - DNA, 1004 bp, Homo sapiens
gaaatcttaagcactgctgtcaaaacttttccagtgaatgttgcttttacaaagacatgctattcttttttttttttttttttgagatggagtctcactctgtcgcccaggctggagtgcagtggtgcaatcttagctcactgcaacctctgcctcctgggttcaagtgattctcctgcctcagcctcctgagtagctgggactacaggtgcactccaccacgcccggctaatttttgtattttgtagtagagatgggatttcaccatattggccaacctgatctcgatcgaactcctgacctcgtgatcagcgcacctcggcctcccaaagttctgggattacaggcgtgagccaccgtgcccggccaaagacatgctattctttattagaaggtatatgaacacataagtttgcttttaatatgatagcccataggaaaggtcttttttcattccaaaatcttttctgtttactgaaaaagttgattaatttcaaacttgtggcaagtgggttgaaagtactaaaagaagttagaatcataaaacagaaatatagggctgacttcaggacaatctttaaattgtagaacctaagttatcacaaattattagaagaataaatgccatattttgttgattaaaaggacattaagaaagggaagggaagattgaggattattgatgtaccagtttcaccaatattaagctattacttcaatagatcctttgaggaacaccacatagatgtgaacactagttatttttatttttaataccttttattatttaataccttttattatttccaaatatgcttttggaagatagagtttttctggtatagctaaatgattatcagtctgaaaatggtttgaatactttctctgggaaagtccttagatgttttatatgttacctaacttctgttagttaccagacttcaggtaatatacataaaagctctttgtaagctataaagaactataaaaatgtaaatagtaat

SEQ ID NO: 135262 - DNA, 1033 bp, Homo sapiens
tttcaatattaattatctgacttttctcttcatcacctggtgctgcaaatagcagtgtctccagctgacagtaatgttcttgtaaagaaagttctggagggtgttggaaacactctgattactacagaaatcatgctttttctaaattaatttcagtcttaactgacattaaagataggcatctgaaatctagtattctaagtctgtatattcaaaaaatcttttgctgtaatttgtggtaatcatttaaaaatcaaacggttatcttttagaaaaaattttaatatatccaaaatgttaatgaaaatgtcatttttctcacttaaatcgtgtcatgattttcaaatgctggattttcttttagagtttccttactaaaaattaaaagcaaggtgtacattttttgtgcaataaagtagaaataaaaaactgtcttattgaatagaactagttttttaaaaacagagttatgctttcttgaactgcatttaggtgtattgtgcattttactgctatagagcaatgttctcaatgtgttagttaatgtttttctcattaagtcttttcaaaacttaagggtttcactttgacaggaaattctggatctttcccagtgataaaataaacttgacacttgttccatgaaggcatctcttccttgcttatcagctcttcaatttatggctgtgctttgaaatttgtgcctgtgactctcatctttgtatttactccaattaacacataaaccctaattagccagatcaagggacttgggagtccataaatggaaagtgacatggcagagcttggcagctggcatcaaggcaaggtgacaaaaatagggaagtatcaattagatgacattgattgtaaagctgtgtgttgggatggtagattttaacagctctctgtgtcactggctgctgactctaggataggagtataggaattagttggtaaattgacagctaagttaaagtactgaacttctggcagaatttaaaaacaataataactcatcaccaatttaatt

SEQ ID NO: 135263 - DNA, 1342 bp, Homo sapiens
taaaataaaaataaaaataaaaaaatagccaggtgtggtggcacatgcttgtaatcctagctactatggaggatgaggtgggagggttgcttgaacccaggagcttgaggctgcagtgagctgtgatcactgcattgcagcatgggggacagggagaccctgtctcacaattttttttttttactaaattccagactacagtttttggattacagatgtaattcagcaatgaaaaagtttagaactttgtaaacattatttcagttttagaaatctaatgttacagagaaagacttgtgtctcaaatgaagagttttatcaggctttgtgtatctctcattacttgagacggcagtagacgttaaatatataaaagctgagctgcttctctggttttgtagtttcagctgcctggtatttaacattggttctattttttaagtgggtggttgggtatttgtaaagaaggcgctataggttattggaaacacgctctcttatcactacagaaatcatgcatacttcaacagatttagaattgaatttagaaccaaagaatgaaggagtttattctttcctcttaagacttggttgaaattgtgttgtaaatacatgttgtcaattggatattagatggtagaagttatatattgagtttcttcattttggatagccaatggctctgtaagcctagttggtattttgcctgcatgtagatatggtctgtagttattcaagcagtgtattttaaacttaggttttaaactgaaattattttagtcgctatataccccccgtttcaaatactgcagaaaatggggaaaagaactctgaaatgatgtatttgaaaagttgttgttttagagaagtatttgcaacattagaaatctgacagaaggtccatttacataaatgtttaactgaagacacacaaacatgtaacaaaatgaaaatgtttcatacattaatttgctgcagaaggaactaacataacaattagaataacattctgcctacttagatttaaatttcctagggcagcgataatacatagtgttgatgtagtttaagtcttttaatatatacaatcatttattctgttgttaaaatgaattctagtgttttaaaacattcaaacacggtaaacttagataactagaaaaaggtgttaggcttacaatttttagagatttgtaagttctctcatcagctcagagtctatcagaaatacttaaacagtttcttttctagcttggcaaagaaatgatgtctgtattttgtgattgtgaaaataccagatactgtcatgaaaacagtgaacctaagtaatacaaaagtaatc

SEQ ID NO: 135264 - DNA, 1032 bp, Homo sapiens
tttccccttgaaataagcaacacattcattttaatatgtagaatcagtttgctagcagggcgacagtttaaaaaggcttccaactgtgacacaagtgcaaccatattgcttcctattactcgcgaaggtagttgtttagaagagagaatgttctccctggaaatgtttaaagtgctgtaattttatttaggataatgaggatttataaccattttgccatatgaaaacctgcctttagacagagtgaaataggctgttttggttattgaacgttcttaactgtaggggatgtgtgtgtgtgtgtgtgtgttagttttacagcaataagtgtttacattggggattgtgctggtttattctatatgttggcctgtgttaaatattaaaatattaaatgataccatttaggtttggcccatgtaaatgtttacatttctttgtacatgggatttctctgtattgaaatgtaactaaacagaaagtctttgttcttgtttataaaaataatgttaatagtgactgctaggtatccctggggccctgagtctttgcaactttgctcatgtaagttgtactggaggaagttattttgagtgatgggtagatagtgcatggggaaacagttgtgattaaaaagtgtatagcaggatctatgtttttaatattaagtgtgacattaatgtagtgtatattatcattaaaaactattctagaaaatgtaaatttgacttattttgttaatgctatattctatagcactgtctcaaaacccactgtggaatagtttatataggcctctgcctctgatatgggagggggaagaaaggaacacaacagttaagagatttttatcaggtttttatctcctcactgaaaatcttagttctcaaaacatttctaatttccctcatttgaaggttcaaacagtttcaaattactgcccatggattgttcttgacatcccgaatggtaaatttgagctgtggaaatgctggaatgtgtttttgtgcttttcctgaacaagggaattca

SEQ ID NO: 135265 - DNA, 1069 bp, Homo sapiens
gcggctccgcgctgcgagaacaatgggcgcgcccgacgcccgcccgcgctcgcgctgcccggcgcgccccgaaagccgcggggcagagcgccctgagcggtcccccgcgccggcggccccggctgcgccccgctgtagcagctgaccttagccggctgcggccgagagaacgcgcgttgcccgccgaccttgtgccctggggtcagcacccactgcaagtcagaacctctccgtggtcccaaagttagtgcttttccaatccaaaccagaaacttgatttgaggcctggcgatggtagaggatgcattttcttgatttcaaacatctgggctgctgccgactccggtttctcagaggaggactgcataaccaccatgtgaacattttcaacagataggaaaaaattcccaaccagcttcaaaacaatggtggttgagaaaaaaataactaagccttcaccataagtatgaaacatcatctgggaggttttcccacggtaattggctctgaagtatcctaacttaatggttgtgtttttcaacgggagactgaattccaaagggaattccacagggaatttaaatgtacaaacattttttgagtacctactatgtcctaggtgatgggaaattattacctcattattactggttggaaaacattccagaaaaccaaaattattgctctttccaggatttaaatacggacaccatagaaagattgctgttgtcaccactgccttcccccatcccacccccagtgacttggctctagtcaagaaatattggggatggtggggaggataaatgtgctttctctattctttttatacttttaaagaatatcagcaaagattattgtgcagtatttctacaatgtagtgtatgcatctaattgtgtgggagtagaattgtatgtttgcaaggaatgactagccaaatatcagagccagcagaacaacagagcactgagatttgaaaagattaaaaaaagaagccttgcccctttttagattaacaaaacagttccatggtaatattttgtgcttttctttaaaataaaggattgt

SEQ ID NO: 135266 - DNA, 1026 bp, Homo sapiens
ctatctaaaatgaatgccaaatcattagaagttgatatctgaccatttgtgacttagaaaatggcagttccgtgaggttcagtcaaatggacagtattggtaacaggaaaatgaaatgaaaaagcagagaggaaagtacttaggtacttacagccattgtgtaaaaatgtatggatgtacaaaagattgcaatgtgatgttacacaaatagaataaaatgtttatagagttaattttttctcctactacgttgcttgaactcacaatgaaagaaaaattcaaaagtttgttttcttttaagccttaggaaaaacatctctattctttaaaaatgacaaagttaaaaacatataccaaatttagccatttaaccatgagcccttggaattttaaccatgtgtatctatgtatcattatctgtacatatcctaagtatgtagtcccagaattttgtattttgactctgtttctattctatttaagagttaagggactactattatgtgcatttcatctttaattttacccgtatgtaaagggagcttccgaaattaggcctacctgttcaatcagcattttattttattttattaatttttttgagacggagtctcactctgtccccaaggctggatgcattggcgtgatctcggctcactgcaacctctgtctcccagattcaagcaattctcctgccccggcctcccgagtagctgggattacaggcacttaccaccatgcccggctaatttttgtattttttttagtagagatgaggtttcactatgttggtcaggctgatctccaactcctgacttcaagtgatttgcccaccaaggcctcccaaagtgctgggattagaggcatgagccaccactcctggcctcaatcagcattttaattggaactgtatttacaactatggctcaactttttttctacccattcagaacagtttgtatcgtaatatcatttacataatggtttgcttttgatgctatcatctgtgagatttttatctctgag

SEQ ID NO: 135267 - DNA, 1032 bp, Homo sapiens
agcagaagtgataaattatgaatatatttattttaaaaatatttaaataagatacccaccaaaaaaatcatattcttacatggtatcattagctttgacatcactgtatggtgccagattatagtgatatgaagcttatgatactatttcacatttttatgcactaaataaaacctgccctgtgttttattacaaagtaggtggcctgaaggaaaaatatatgtattctttccttttggtataaaatatgcatttgggcttctcatttcatccccaatctgtgttattccttaaaaatgcagaactgcctgaagtcctctttaatatttaattcaacaactttttaatctgtcattatgctgtgatgaagtaagcatcaagtgtcgctgaaagagattaaattatacttggaaataggaattgaaatgatttaggtttggaggctgaatatttgctttgcacaagtaataataatagtagcttgggtgaagaagggctttggtttggctttaatgtctttgcctcgctgtgctcccctgtggctccccctgatttacgctagcattacagagctttattttatttaaatggaggtagaaagtggaaattactacactacaatacattaattactccatactatttctttgtactgatttcccttttttctgtaaacatcataaacaatggtgcaacctacccaatggatagcagctgtaagcaatcctgtagttcttgttaacaagcttattttagagaggaaaagcagtaataattaatatcagtctataccaatagtgagaagcaaagaacatttatgctttccctttcatagggaatgatgtcctacataagaataagttgtgacagtatatgttaatattttaactgttgcattttacttcttgcttttaaaatcgagactttaatctgtggactcttttgcacttagagacaaaggtataaactttcagacttcttaggggttcttgagttgctcaacaggtgatgaataaaggctaaactctttgg

SEQ ID NO: 135268 - DNA, 1048 bp, Homo sapiens
tttttttttttttttttttttcctgtgcaaacatgacattcattcgcattagaatttttttcctgttaggctaacatttcttaactaggttgcagattagcattggaatgataggacattttgcaaatgtatcttaaaatatgaattcattaatttgtggaagactaattcatttagaatagcttcttgagggcaaaaaacattcgtaagacagtttgcttgttatgccatccaatcaaactgaagaacttattaagagtaccagaaagaatagagtacattttggattggcaaatgatctgagtgtgaagtgatgaagccttttctggattctcaaaattatcactattatctcattctggccaatgttaattacaatttttctttaaaatatttgcatcattctcaacaaattagttagaagactaaaccattctaaaatgtcacacacaccagcaaaatgtattcacatgtctaaaaaaccacatactaaaatttattgtacttctagtttatatagggaaaactgctatttgagggcatctgatttaaaagtattggattgcagtaagaaacagcattaaagtttatgggagctttccatagaagtgcatgtttgctctgtattagacatggccagaattatcattctcatagcgtcctgtaactacatgaatatatatttaccactagccgacttaactaagccctaattaaggactgagtgttttaataaaatttaaagtatacttatttcacttagtcattcttaaaataattaagatactaatgcgacttactttaattgaagaattacccaatatactacaaaatacatccttctttaacggatatggccatttaaatatagtaatctacacataagaattctaacttgagcctcaagtcaacagtaaataattatgatggaattgataaataatgaggtccctgcttgccctttagttctttggacctgtggtctcttagctagaaaaaacagatttgagctcatgaagcagtggttttgcatttttagaataaaatt

SEQ ID NO: 135269 - DNA, 1065 bp, Homo sapiens
ttggagctggagtgggatgggctttggggccatgagttgtgatgggcaactagatcacctgccatttcctcataatcttttaaaaattggttattttacagttgttttctattgatgtctacaaaataacatgactatttctttcattacaagcttcatctttagacctaaggaggagagtgtgaaattcaggtgcaaatattccagatctttctctggaagtgttgatatcattctgttggcctttttttcattttcagtcagtccttacttaagggtctgcctttcctggacttggcttcttagcccactctctagtccacccactgtttaactgagaaccttaccctcccaaccccaaatactttagtttagacagtgatgccttgagggtttttcagtgtctttcaccactgtttccaaattatatcccagttttcacaaccaaaagtaattgtttcaaatgagatctcatgaccatggggcttgtgaccttcatttcatttccagatgtcctgcctcctattttgactgcatcttacttaaggatttcagatagaaaattattttaccttttttatgtttggggagaaaagtagcaacacgtctgtcttaatctttcttcttcatctatagtttgggttacacttctcaaactgtggctgacttgatttttaaatgaagaaagcacagaaaataaagtaggtatttttactaattagctttgtgacttctgaccactatcctgcatgttactttaaaataacagacacaaaagaaaagctatgaaaaattataagaataacagaaaacattaatattaaaattgtcgcttatttcaaagcagtcaagaattcagggcctgctgaaaatatctcatctggccttgttttacatggcactctgctaaaacatttttctctgagctaagactgtggtgtggtagttgaatgaatcaaaaaacaagtccatcagaaaacaaaattacagcgacgtcgtaggcctaagcttatgaataatttggggcctaaatttatggtatgctcattaggagaaaaaaaaatc

SEQ ID NO: 135270 - DNA, 1044 bp, Homo sapiens
gccacaaagcttagttagtgcactgtgttgtttgcacctcattcactcaggtcaagccttcattgtgttacagtgttcttctgttagaaaggctcctactgtacaatctagccaatgcagatttctaatctgcttatttataattcaaaagcttgcctatatattaatgaacccttaatgagctgttgaaaatgcctgaattacagtcagattattaaactcaaacagccccgtaatcataccatttgagtgggctttaggtacttttcacatctgcagcttagaattgtgaagggtatgcgtttattcggagaaagctttgtaataattttgacccgtaatttatttattgccctccaaatgcagtcgtctatgcagatgctctctcccattatctgtggggcaggtgcacagcatgttgaaagacagctaattaggatttgctgaaagatatgcaaaaactgtaggcttataacaaagccaagttcattgttaaacaatgttttactgtgtttgtatgatttgtctaaatcttagggatacggaaatgaatgttgtgattataagtagattgcaaatagggtttattttttaaactttataatgttgtgatgaccaaagaacctagatgtaaacctttataaacctctgtatgtttcattatacatacattttggattaaaaacaagtacaatcaaattttaaatgattgttttaccatgtttcaatttgaagatatcaagatattttgataaccacacagtctgattcattctggcccttgcaaatttagacccattaaaatgtttataggtgcccagaggagtaggtattatgactaaaagccagtgtaactctagaaagttagtaaactaagtaatagtgagtggctaggtaggtaggatgaggaataaaatggtaactaaatgtttttaagtaagaaaataaatagaaatattcaaattgaaagtaattttggaaaccaggtattagtatttaaagatcccataatcattactttgcttaataaagaaaagaaaccga

SEQ ID NO: 135271 - DNA, 1026 bp, Homo sapiens
aacacacaaaactgtgggcaaaaattcagttgaaaatggagaaacttgagaagtcctcaaacaagaataaaaaattaaacaattcaaagtgcagcataagagattgctcagtaagctctcattgcatgccaaatgcacaaaaaacttgctatgtgaactacaagcatgtacaggtcgtgagatttttaacatttaacacagtgaattaaaagagaggaaaattaaagatttaaattaaaaatgcaaacttaaccaatacatggcagttctagaacaatattaggcagtcccttttagttatagaagaaacagcaaatacgtttgcctatttttaattatcagcagtgtgttggtacgcattttatgagttatctttttgctctcctaaatgaatatattgtcttagtatattatagttttcaaaccttatttgcctctgaatagacaacagataaaattttaaattatggtgagttagttttattatccagttgaaattattctgaagtataattttaaatgaaagtgacagctttaaagtgttttggggaagaaattaaagttttgcatttgtgttaaggcaaccaagagctctgtcatgccatggatgtaattcagggcatctaggaatgaaatctgttcttaaaagaattgacggtagctttaggttagcatataaaatcagagttggtgatcagttgagtacttggcagcttatagatgttatgtcatgtaagttacactagacacaaagtgtgtaccactgtggataaacaacaacaggcacagactcaaaagagaatccaaatacaaacaagcaaggtgccaacttccttttcccctcttccccaagaagccttgtaactagtgtagggaacctgctttgaagcagatttacagaggttaattgggctgggatgttttagattatgttacacattaatgaaaatgctgattttgagctgtcatgactccaatgctttttataccatgataattattttaaaactttgtcttctgtgttgt

SEQ ID NO: 135272 - DNA, 1018 bp, Homo sapiens
aggaagagtagaaaaatttgtatagctttaagttaaaaagtagtgtaaattaatattataaggtgttttctatttttggaataggattttctgagatctaaaattgtatgtctagtctcatttgtaagaataacttcttgtggaaaatgtacaaataagaattttggaaaaattatcgtgtgtatgtatgtaaaaatcccactttctgatttgacatatgaataattgagagtaaacaaaataagtcatggttgaaaaggttgcccctgagcataaacagtagaaaatgactcttatttgtagtataatcctaattgtataactttatgctaaaataactataactacttactagataaacactaccagtcaccttgcatggaaagagatataatattagaggccaaatggcctgagttttttggctgaggaattaaggtgattccttactacctcttgccatgtgtctttacacctgcctccttactttctccatacactctggtggaagttgtgtgaagctggtgtcagtcaatgacaaggtcctgagtctcactgttttagaaatatcctacaaaattttccatgagattttatgtaactttagccccagcttataccagcatcaaatcaccagggtttttttttattgttttgttttgtttttggcttttaaaatatacatgtatatgcatgttcttcatacatttatctctttttgtttgtttgtttttttaaattgaagatcaaattgggaagcactgagtttaaaaatatattcatgaattatttgtggatataatcagtagcctaataacgatctaaatatatagttcctttttcattttaatactttcagatggaaaaatatagatatataaaatctgtacagtagggacaaatgaatagatggggtatgaagactagttggcagattcagcagaattttaatttacacattttctcctgtaggtttggaattgttttagaagtgatgtagcagcacttaattctttta

SEQ ID NO: 135273 - DNA, 1030 bp, Homo sapiens
tacattttttctcaccaaaggccaggcctgcatcttgctcatttctgtgttccttatagcactggcaagagtttgaactttgtagttgttcagtaagcatttgttgattaaatgtaaaactccagagaaaataggtggtacttagtattaacaattaacatatatttttacttgtatatgggaattgatagggagcatcctcgaatgggaaaacatcattttggaactggacaggggtgggtgggaagagtagttgaatgctgtctccttgcacgtctgaccatgcacggtttcagaattcttgctgccttaactactattactaccattttacaagtgtcttagttttcattttaccctacacactgtataatgctattggtgaatgcaaatgaggtgtaaattcagatgagtgaatgtcttcgtgtgatagtagatagtttccaaaggagtgatttttttttcccattacaggcatgtaatgaatttactacacatgtgatgaaccttctccgagaacagagtagaacacgtcccatttctccaaaagagattgaaagaatggtgggcatcatccatcgaaaatttagttccattcagatgcagctcaaacaaagcacttgtgaagcagttatgattttaagatcaaggttccttgatgccaggtatgtgaagccataaatctattgcatggctttcccccgtctgtcactccttgtgtattattttctgtaaaactgaccagttggtcttagattcttttggccatatgagtcttttgtacaatggacaggtaattcaactcatggttcctgtgctgtcaagctttcctgtctgggaatggtaatgtgggttagctgccagtttagtgactcaggaaatgaataggattagtgtctctgctaatgactttaggaatatgtagcctttccattctgatgctaaaaggtatttttaaggatagttttctgcatataactgttttaacaaggggtattttgtaagaatttcttaatgttacacgggttgt

SEQ ID NO: 135274 - DNA, 1012 bp, Homo sapiens
cacacctcagcaacccctaccccagtgaagaagccaaagaggagctggccaagaaatgcagcatcacagtgtcacaggtgagaaaggacccatgggtctgtcttgttccctgtggagacaggaacctcattccttcctcagggcattattatcaaatttcatatccaaatgttctatcatcaaaaaagatataaggaaaatgtagatatttccacagttttaggcaagattttaaaccttagataattttgaaaaactgtaagtggcgaagaatcaagaccaccaccacccccattccccagtgtaaatcttctctagagaggacataaacatgccatggggagagacgcagtttacacttaagtgactctccagtaaatggcatgtattcctggtttccctgatttagatgactgacctaagcttctaccagcaagaaaccaatttatttgttgccaaaaggaaatttaatataactctttggtgaaagctttgaggaattcaccaggccctttcttggtaacatactacaatgtttgaatcccaaggatttctttgcttccttattatccattaaacacaagaattaaattcatgctttcagggtttctgattttggggtttttaaaaaaatgtttatttataataatttctgaccctgaagttagttgtcatcttctaacaaaaatacatttagttttagtcagatagactggtatttggactgaggattggaaacaaataaattaacaaacaagtgtacctctttagaacataaatatatcgtattagcattacctctaaaatacaattttgtataaatgttcatattattgttaatagattgacatttgaagagcatttctttatagcatgcaaaagcagtagtttaccaaccagtttttgtagtgaaacttaaggaaaaactgacgcttgtcaaaaatttcagtgttcactaggggtcacatgaaaccacttttaaaagtagtttctaaataaatacttgtactgt

SEQ ID NO: 135275 - DNA, 1042 bp, Homo sapiens
aataaacatttattgaataatgctgattatgtgccaaatactgtgctagggatgaaagagacatcagtgaacttaaccagacagacccatgtcctacctgatagaaatgtgtacacatactcaccaaaagatatgtataggaatatccttagtaacagtatttgtaatagccaaaactagaaacaatgcaaacgtccatcaagaggaaaataggtaaaccagtatggtatatttatgtatatttggaatgttatttaacaatgagaatgaatgaactataactatatgtaactacataatgctaagtaaaagaagtgcttgatttcatttataaaaaatggaaaaacttgatttcatttataaaaaatagaaaaacaagagaaattaaccttgggggttagaaatcagattaatagttatttttgggggaatggtgattggaaggaggaagaactatttcttgatctaagtgttagttccatgggtatgttcactttatgaaaattcattaaactctatacctatgatgtgtggcccttttttgtatatttttattttatttgactaaaaagtttactttcataacaaaaacaagcctgccttcatggaacttacatttttgtgggagtatacatataagtaaacaagacagtcagttacaaagtgatagttgctcttgacaaatgaaggagggaagtggttagaggatgcaatttttaatagggtggtaaagaaagcccctcctgaggaagtatcttttggttagtttgaaggagatgaaggacaagtcatgtggataatcagtgaggaacattctagcagagggaacagcaagtacggaggccctgaggtagaagtgccctgagcaagggagcaagtagtaggagatgaagttaaagatgctggggaccaaataaatggttcatgggccttctaggccatggtgatgacttgggctttcactgtgagatggggaactgaggagtgacatggatctgacttaagttttataggatcaccatggcagctgtactgacattag

SEQ ID NO: 135276 - DNA, 1043 bp, Homo sapiens
ttaaaataataattagagcaggaaaaaagaagatgactatcaaattacagtactttttttcagctatacataaaggccttttcagttgctttggcagtagacagaaggcagaagtagattcctactgcaagtatgcagttggtaaaccagaaacaagttgaaggaaaaggcagctattttgttaaaacggttctttcacatgtcttaaaagaaggctacagaccctctgttctaaaagctctgattgtgtatcccagtggaggtgggacatcattaaacagtgcgcagagaataaaagagcaggttgtaaaaaatgggagctttgaggatgctatagcatgaagtacagatgaggcatatctgcaagatttaaagaaaacagggaagcttctgatttttttgttgctgttgttctctacaaacaatcagtaccatgattggtgtggtgcttaaagcttgctccagtgatgtcaggtattatatttattttagaattgactattttgaggaaatctctaacactcagttgatacgatacccaaacaaggataaagagacaattttcaggctgggcacagtggctcacacctgtaatcccagtgctttgggaggctgaggcgggtggatcgcctgagctcaggagttcaagaccacctgggcaacctcgtctctactaaaatacaaaaaattagccgggcgtggtggcacacgcctgtagtcccagctactcgggaggctgagggatgagaatcacttgagcctagaggtggaggttgcagtgagccaagatcatgccattgcactccagcttgggctgcagagtgagactgtctcaaaaaaaaaaaaaaaaaaaaaaaaaaaaaaaaaaaaaaaaaaaaaaagaaaggagagagaatttgcagcttagatttagggtttttgagtttccctatacctggaagaagtcataatcagaactgtggttcctccatttttgtcccctttgccttcttttacctattccttctcttcttctttccaattgagtattcttatcagttttt

SEQ ID NO: 135277 - DNA, 1417 bp, Homo sapiens
aactgtggcaaagaaaggtcagtaagatagggttcttctccccaagaaatactgaatttgttgggggaaacagacagatgtgttactgacagaatataaaagttacctgaagaagcacacaggcacaaatggatgccatgtgtggaatatagtacaaagaggggtttactttctattgagaggatcaggaaagaccttctagagaagatgatgtgtagaacctggagaaggatgaataagactttgggagaaaggatattctaagcagaggaaactcagaagcaaaaaacagatatgttaggagaacagtttaataagtctggagcctgtgttattatgtggggggtgggggattttattataagacttaaggctacagactgtgaagactcagacaagcctgaactaaaaccccaactcctccccagtttattagctcagtgaccttgggcaagtcattttacctcactgtgcctccttttctcaagtgtgtagttgggataaaaatagcatgtactggctgggcatggtggctcacacctgtaatcccagcactttgggaagctgaggcgggcggattgcttgaggtcaggagttcaataccagtctggccaacatggtgaaaccctctctctactaaaaatacaaaaaattagctgggcatggtggcgcatgccggtggttctagctactcaggaggctgaggcaggagaattgcttgaatccaggaggcggagtttgcagtgagccgagattatgccagtgcactccagcctgggcagaagagtgaggctctgtctcaaaaagaaaaaaaaaaaaatagcatgtacttcctagggttgtgggagtttcagtaagataaagcacgtgtaaagcacctagcagagtgcctatcacagagtaagtgaagatataatagtaattattgttacgcagtttctcctgcttggaattgtttatccctgccccctgccaaacacatagagatgtcttattaatttctactccttcaaagctcacttcaaatgtcagctcttcaagaaggctttccttgatacctctagttcctatcctccattgtatattctcataacttcttttccccatgattgtaactgaacaatgatttgttaaatgctgttcccctgatagatggtaaactcgattttggccagaactgctatcttattcacccttatattctcaaggcctagcacagtgtgtccagcacatagacatttactgaagatgatgatattattaactgatacaggaaacacataaggaaaagctgttttgatggaggggacattaaagcttggcagcagttatgctaggttcacattgccttcagatctgttgggaaatgttcagtttggaaatataactcagaagaaaggtcaaggttaaagataca

SEQ ID NO: 135278 - DNA, 1062 bp, Homo sapiens
aataaataagcgtttcccttaaacaagaggcgtgactataggatttcttttcataggacactgaatgcatgttgatgttcttatttacagggattagatttacgtgaaacttgtcaggacaaaaagtctggcccatcattatttggagtgctctgtgcattcattctgggatgcggctgtgttgcctgggagatggctccacctttcagtgtagctgatgggaggcatttccacagttgtgatgtcagtgtttcaaaatctgtcaaagaggctctccatagagcctaggaaggaaaactattgagttgtatacctaccacatttttttttctaatgagaaaaataattttaaagaaaaaaaaactcttaactgtaaatgttgtctgtggtaatttagaggcacccctcagcacgtgttttagggagctgaacagtgtcatccattttctatgtactgtggccgcaaggctgacgttttatacacttttgcagatgaacctctttgtgaatgtcatgagcagttatcagtctatcatgcagagtagaaagggcaaagctgaactgtaagggcgtcagcacattatggcaataaaatttttcacagcctcagataaaaaaatactgtacttgacaagtgaatctgttttaaattatttcaaatgctatggaaactgaatttctatttgttcggttctcccattaaaagtgggatgttttccaaaagttggttttcaagtcagttgttataaatttgcaacttcttttttttttttttgagactgagtcttgctctgttgcccaggctggaggtgcagtggcctgattttggctcactgcaacctccacctcccaggttctcccacagttctcctgcctcagcctcctgagtagctgggactacaggtatgcaccaccatgcctggctaatttttgtatttttagtagagacggggtttcaccatgttggccaggctggtctcaaactcctgacctcaggtgatccacccacttctgcttcccaaagtgttgggattacaggtgtgagccactgcgcctggccaa

SEQ ID NO: 135279 - DNA, 1114 bp, Homo sapiens
ttgccttgatattaaagattaagaagtattgggactagcagaataaaaacgatctgatgtcaagcaaatccacttgctaaagcttccccaggctgctggtgatattaaaattttactgtgagaattaaataaacctttattagtgatgactgttgtttgattggtccaggggtatgcataaacagaggattcttacatatctagagatgagaccttcgatggtacagagattcctcaattatgaaactgttaataaagctgtaatctgattttccaggctaggtttcattaatgtattatagcttctctgattgtcaaggtaatattaactacaaagtactgaatccaacagagaattgtttggaagaagagaattctaagatgggcctttgttgctaaattcagagttggggaattttcattaattatgcttaagaaataccaaattccctctcaaccaagactatcctcctttgcactatagatatgttcaatatttaactctttctaaggcctgacagtcttagtcagaaacgctagagtgataattatgtattaaaagagctttttgcaagccaactctaggtctgtctcctgagctgagagcatgcattgggaaacatgaggtaaggtcaaagagaacatgctttaagaagcgtaatcagaacccatacctttatagtccttttccaatcttgatttagaacttttctgtttttagaatcacataattctggtatggattctaatggtcactgaggatttgtcctggtgcagaaattcctcccaaatatctgtctccatcctgctcaaggcctgggcaccacacctgcatcgtctctggcttgtccctctccactgaccccagagctagtcagtggccagattctgtctgttcctcctccataatatgtgccctctccactcctactgctctgcctggctcaggccctcatggcttcctcgcttatatactctcctaacttcctcctgttgccacatcctatgcagttataatgcacacctgctgtgagcatatggggctcaaggaagggaaggccaagaaggctaatagtaggatggagaggtcccttggggctgagcctgaaggcct

SEQ ID NO: 135280 - DNA, 1025 bp, Homo sapiens
ataggagcctcagccacagataattggaatacagattttaacagtgtgtgctgctctgcggctcatgcattttcattctggaagatcctatttggagggaaattctggccttcactttccaagggttacagtagctggctgtcaggcgtgtatggaaaaagggtgggcaactgcttctctatggaaatgatgattaagccggggtgaagtttagacttcatggagccctgggtttcgctgaggcattgcattgagcttctccactgctcccttctgaagagatttctttttgagtcactttagttttaccagcagatcaaaggccgagctcgatgccagcatgggcctcgctgaagcccttcttcggcgtgttgatttattgccaagactttacttgatgggatggatttgttttacatgcatttaatcccactttaacacatgctgccaactcctgccacagtgggtttagaaaatacattttgctaatgcatctctgctctcatgttgtcatccgggtgttttaaattggggagtagaattaatatgtagacgtgcacccgttgaactgtgtttctcctttcaggctaatggaggctggcaggacgcaacaactccatcttctgtgacttctcctacagaaggcccaggaagtgtgcactcggatacctctaactaatctctggccacacttttccctgagctacatgccttgataagtgcattcagagcaataggaggaaaaggaaagcgtttttgtagcccaccatctacagctttactgtaaaaccttgtcttattcgagaacttggtaaatctgttttttaaggaatcataatcatttgtatttatacttaaaaacacacaatgttaaaaaaaataaagcactttatccaattaggccaagatttaacattgttgacagtcctgtagctattttatcataatttattatcaatattttacattaatggtttcacagttgccaattacttggccttaagggtaaaaagtacaatatacac

SEQ ID NO: 135281 - DNA, 1085 bp, Homo sapiens
gacacgcttctggcgagatgcagagcttgtccaggcagaaatgtgagagccctgtgggcctggagcccaggggttgcacatagtagctttgtggctcatacttcccttaggactggagggccatcttgttggacctgtggcaggagtcaacatgagtttgttctttctttctttacacacacacacacacacacatacacacacacttaaaaaaaacagattctaatcagcagagcagaatattcaaaagaatatcccctgatcctttagaagagagaaataaatgagtttgtaatgcactaaatatgcctgtggtgttgatgaaaatgcagattctaggacctcatactcagactttattgagtcagaatctctggggaacgggacctggaatctgcagtcttaacagacaccttgggttatacttcttcttactgaaattagagacctacagttcttgatgctttctaaaaaagtgttaaatacacgtaacataaaattgaccatcctactcatctttaagtgcacagatcggtggcattatgcacattcacactgtggtgcaactaagctccagaacttttcatcttgcaaaaccgaaacgctgtgctcataaaacaactttgcatttccccctttcctgacccctggcaaccaccattctgctttgtgtttctgtgagtttgactaccctaggtagtcaaactgtgtgatcctagtggatcatacagtatttgtctttttgtgactggcttgtttagtttagcatactgtcctcaaggttcatcatgttgtagcatatttcagaatttccttcctttttaaggctgaataatactccattgaatatgtggaccatattttgttcattcatccatagatggatgcttgggttgcttctgtcttttggctattgtgaataatgttgctctgaacatgggtctacaattctctttgagaccccgatttaaattcttttgtgtagatacccagaagtggaattgctggatcatatggtaattctatttataattttctgcggaaccaccacactgttttccataacatagtggctgtgccatttt

SEQ ID NO: 135282 - DNA, 1033 bp, Homo sapiens
cagctgggatggcacaagtttccccattttgcttccccctcctcctgattggccctgcaacttccagttggtaatggagcccctctgagctgtcgatcctgctcgcaccgtgccatagatcaacctattccctcctgtgcggtgcttggatctccctcattaggcctaaatttacctccatcctacacaaacatggccttagctcatttttattgttgtaaattatttatgaggggaatgttgaatcttgaaactgaggtgtgaggaaaattaatcccgtgttacttttatccttctgtactttttcccccttgcttgacttattgagctgtggctagagaaagaaaagctttggcattttaaaatataattagtgttgaaactgctttctcaattggatgggatattggtgcctctctgcctagtacaatagaaaacagaccagacctagggaggaagaccagccgtcccattcctggaaggtgacccggccacctcccaggtttgatgtgagcctcaactgggaaggagcctgagaaagcttctggagagctgcaaagcgctgtccaaatgcaacagacctgttagtgtgttttgcgggcagtttgggctttgagatacagatggatgctggatgaggagctgttgatacaacctggggttgttgccagtaggcctccggatttgatgtgagagggcccgcatgaatggcctcctcgagtccttagccgcggggccatccttcctggcttgaggctccgcgcggcctgggaaatgtggagcgctagttaataaatggccttttgttaggaaggtcaattgaagtgccggtagagacgcagttaaaagtaatttgcagtcagaaaatatgtaattcagggcaagcggctttgagtgatggcccctgccatggatatcttgggcgtttctcattaaaagctgccttggctggtgatggcgcttcctggatgggtcgactgcagcccgcgcggcccggagccatttgtccatatttcacaaaggccgcctccgt

SEQ ID NO: 135283 - DNA, 1087 bp, Homo sapiens
ctttcatttacatccactgtctttgactctcttggtcctcacagcagctctgcaagggtcagtatcatgacctccttttatagctgagaaaatgaagggtccaggaggttaaattgcttactcaaagtcaccagctagtcagtcatggagcctggactccaacaccattccttcacctgagcccagaacacttatttctgtgtttgcaacattccttgcttctttgcaaagctctgcgtgctgaaggcctaaccttggctgtgggtttggaagtctaggcctccgtaggagagattgcaagggagagagaggaaaggtgttgttaagcttagccgtgtctgacatgtcttcagagcagctactggtatctgttcagaaatcaagcagctggatggcggagttaagaatgacgtgctcttgggtttgagtcaagctcacctcctgagagtagagacaagctctcatcttagctcagtgttcaaagctaacctgagaagagtgggaaacagaggtgatttgaattcttgacctggggaaagggtcacatagggtcaggactcattcaaccagtacaggtatgtgaaactcagggtatttgccccaagattctggttctgtttgagactttatattattcacataaatgctatgtttgaattttgtgttttctttttcctttgctgaaccaggaccagtccaccatgcctgaagtcaaagacctctcagaagccttgccagaaacgtcaatggatcccatcacgggagtcggggtggtggcttctcggaaccgagccccgacaggctatgacgtagtaagtcaagatactagtttgtacattttgctcactgattctacaagtatttatctcctgtgtccaagaccttctggcccttgcgtgtaagatgtgcttcttccctctaggaacttaatccagggagggcgtggagagcatcctggtttgggagtcagaagacctgagcccatctgggccgtttcctggccttgaccacctctgtgatggtcattttcaccttctgtaaaattaaggagttagattcattgattttcaacttctggttgtgacat

SEQ ID NO: 135284 - DNA, 1051 bp, Homo sapiens
tcaggtgaaggctttcatgtggctgtgtttttattcctctgggataaatatccaggaatgcatttgctgggtcacatggtagttgcatgtttagtttttaaataaaatgttaaactactttttggtgtagctgtaatgaatatatgaggatccagtttctcgacatcttttccagcatttgttatcgtcagtatttttttgttttagccattctgacacgtgcatagtgataattcatttggtttcacactgtatttccctagtggttaatgaatgatgttgaacatcttttcatgtgcttatttgccatctgtatgtcttccatgaaaatttcttcatgccctttactcattttctcattggattgtttgttttttttactgttgagttttaagagctctttgtgtattctagctatgagtcctttgttggatatgtggtttccaaatatttctcctagtctttacctgccttttcatcttaacagggcctttcacagagcaaatgtttttaattttgatgaagtccaatttattactttttctatctgtgaatcatgttttggtgtcaagtctgagaactctctgcctagctctagatcctgaagattatctcctgttttctcctacaacttttatagttttacattaacacttacgtctgtgatccattttttccttaatttctggaggctgggaagtccaagttcaagaggcacatctggtgagggccttcttgcttggtgaagattcagcagagtcccaaaacagtgcaggtcatctcatggcgaggagactcagagtgctaacatgctagctcagatctcttcctctttttataaagccaccagttctgctcccatgataaccaatcaatccattaatccaatgaatgagccctcatgatccaatcacctcttaaaggccccacctctcaatactgctacaatggggattaagtatccacaggattttttgaggggacgttcaaactatagcaggtagaatgattccttctactttattctcctttccaaaatgattttagctat

SEQ ID NO: 135285 - DNA, 1103 bp, Homo sapiens
tggcattttctttcagtactttaaagatgttgctacaaatacaaaaaattagctgggtgtgatggtgcacacctgtaatcccagcagctcaggaggttcaggtgggagaatcacccgagcccgggaagtcaaggctgcagtgagctgtgattgcgttactgcactccagcctgagcaacagagtgaaactctggaaaaaaaaaaaaaaaaaaaaagatgttgctccattatcttatggcttgcattgtttcttataagaagtctgctgtcattcttacatttgtttctctgtacatagagggtttcaggctgtctttaagattttctctttatcactggttttaagcattttgattatgatataccttggtgtagttttcttaatgtttattctgctcaaggctcattgatcttcttgaatttgtgggtttacagttttcatcaaatttgtaatatttctgtttattattaaagtatttcttgttcagttctccctttctgggactccagtgacatgtatattgaaccactagatattgtcccacagcttaaatagctagaaaaacacatggaaggaaataacaaagatataatcagaaattaaaagtaagagaaaaggagggagagatgttaattaagaattgagtctttgtaaaaagcataatagataaacttctggcaaatctaatagtaaaataaaataatataaagataaggaaaatttatttgggaaaaggaaagtaagaatataggaaatttcaaaattataaaagaagatgatgtgtagctcttatgtactgccatgtgtgactgaaattgaaaatcctgatgagttagataatttctactgctatctaagaacaaatcctaaaaagcctgtatccaaggaagaaattggaaatgttgttagagaattatttacaacaaaagcactaggcccaaattgctttaaagtaacattctctcaaattaccaaggaacagttaatttttacatcgtacaaactatcctaaagctttgaaaaaagattggacgcttcttcatttgttttacagagctaatttaccaaggtcagttttacaattgaccttgctaatgtaaat

SEQ ID NO: 135286 - DNA, 1031 bp, Homo sapiens
ggccctgtagtccaaaccaagactttgcagaccatcattttttacaactgtaaaggagggatgtggggtctcaagactggacagattcttaattagctgacttgagactcccaatgtaggagttttgggagactcctttggaacccaaattcctttcccccaataatgctattaatacagaaatctggctttggagtgacattgcttcctggggaaggatcgagattaattgcacttttcatgccctgtactttctgcattacctgtaataataatgtacatagattaggtagggaggatattaaacagaaggatttatgaacatttgaatattaagttggttatctgtggctaccttaaatgcaaggttgtcaaaaataattacagtatactagcaaatactggctaccagagacaatataaataccctgagtcagtgcatattgggcttttggcatgaatcatttgctcaacaaggattgggaatacgttcttcatatttatgaggaggaaatgaaagagagaacagatgggggaggggagaggaacaggcaaaattaatggtgtcgcagacccactgtattaaacccagtacagtggcagccctgtgtgaggagggaccacagttgggctgtggggagctctgacagtgcagcctcccattttgtatgcatgcaagggttttttgatgctttgtttttaatggccacaccactgatgttcaggttttatgatcagggacattggtagagtgtgtggagggtgaggtcactaagtggtttgcagttgacttctgtaaaacccaacttgtcaagcagaagacatttgagaaggatattgatgaatgcccatccatctgcggggcaggaaaacatgcctagttgttaatttctcaatgcagaaagcagtgatgacatggaaaagcaactgccatgaaaaaaaattatgatagattagaccaggcgactctgaaagcagctgatgtttgcaagttaggttaacagttcaaacccttcctacacggtcagaga

SEQ ID NO: 135287 - DNA, 1085 bp, Homo sapiens
tcccctcattctgttcctcaatttgaatgtgctgttgaatgtcttacttcctgccacagaattgcaaggtcttgaaacccaataccaagcacaggcataaattacatgctagaggcttacttgtcaataatgacggtaagatcccacacagctgttctttactgagcacttactgtgtgccaggcactgggctaagtggatcatatgtgttggcacagtgcatccaacccacatccctgtggggtgggtttcattaactcccttttacagtttaccaagactcagagaaattaagtaacttgcctgaggtcacagtgccaggaaatgttggtgttgggatttcaacccagatctgtctgactcgtgtattaaatggccgcagttggttgaaactcaggtttaaaagcacaaacaaacacacacctcccgttggtcagcactggaggttgctagagcaccaactccttactctaaggcttgataagtaagagaaaagaatcacgtgcttatcctttttttcctatacaaaacttatttcagggagaccaaatagttgatgaaggaaagttattttttacatatagaaggattctagctaaaaaatgcagaaggaggccaggcgcggtggctcacgcctgtaaccccagcactttgggaggccaaggagggtggatcacgaggtcaggagttcaagaccagcctgaccaacatggtgaaacaccatctctactaaaaatacaaaaatgagccaggcatggtaacacgcatctcagctactcaggaggctggggcaggagaatcacttgaaccccggaggtggaggttgcagtgagccaagatcatgccactgcactccagcctgggtgacagagtgagactccatctcaaaaaaaaaaaaaaaaaagagcagaaggaatgacagagttcaaaaatcaccattgtgaacctttaataaaacatggatcttagcaacagtcatcagagggtgagaaagtgctcagaggatggcagttggggaactgtgtgaccgaggtcctgggccgacgccagcagagctcagcaagaatggcccagccagactctgg

SEQ ID NO: 135288 - DNA, 1024 bp, Homo sapiens
ttggtataaggattgtaacttaagaaactgaaaactcccatgctttaaaggagtataggctttgatatttttctgcggaagcattttcttcactcatttaaatcttcctaggctgagattaagcattcatcctgaaatgtacacttgaatagtttgaaattcaacacaagtgtatatttttagtgaagacattttctcttgggttatcagtggtcagtgatgtagtggtggttttgcttgaccccagggtatttacagaagcctaggatctgagcaaatatctagcccaaccccaagttgggactaggtctcacttattggtacagcacacctaatgttttatgcctttcacccaaaaagcgtttttacggccaggatgtgcccgtagtcaccaacagtaactgctgggagacacgtcagggagaggtagctgtggtcactgccttgtacaacagccaaaagcccaaagcaggagggaccctggccttctcccagcacacaacgagtgggagctctgtgtgctggccggcatttcctgtcacgttcaataggacacgttcactcttcatacttcttcaattctaaatttcagaagtaatttgtcactttagaggagggcgtcattaataaccattatttagaactgtcgagtcttcctctctgtgagtgtctgagttaagcatccccaaaattggccttgttggtggcaagcagtgcccccacactgacagattgagactaccccacccccaccgacgccctcacaacccagttcttccccgtctgcctttaatcaccgcgaggggggcgacagggaatggctacggcatgtcctcctggaattcattagcgttattaccaaagaccgtgttgtaaattgagattttttttaactgctaggaaaaaatttctccttaactatttcattttattgtacttaaaaaaaagaaagaaagatttttctcatcaaacttttggagcagaatggttcagaaacctgacttcagatcccactgggtgtgga

SEQ ID NO: 135289 - DNA, 1011 bp, Homo sapiens
acctccttccacacgttctctgtcttctcgtgggatctgtctgccttacctctcttttcttccctgcaggggacctgttccctgcagggaccaggccttccctttcctttgtgtcgccacagcacttagagaagggccaaatactcagcatgttttgaaactaatgatgaaaaacaatgtgtggatttcacagggttgaagggaggtttccagagaatactcgccacattgttcacctgccagacccgggcaggcttcccacggggcctcgggagcagcgccgagctgagccctggtcggctcaccctcccatatccaagtctgtcctcacctctcatttctcacagccaggtttgtggccagcgggtacactggcggtctcccctcacacccctggagcatgagtctgtggtttctgaactcggccttgaaattgatagtgttaccttggcaggaacttcatcagtcctagttttccttttcaccttcacccagggaggggaaaacttacaagccttattacagaattgagattcattaggtgcttggcagcacaggtgacttgctaagagccgaggaaacccacaaactcgcctccgattatcctgggccgccagtgaggggtgtttgtgtataaggggaaagtggcaaatcagtgccacttaccagcacacacccttaatggtgagtgacattttgaacacaggaacatggcattcattcatgttccataatgaatcggttatttaaaaggtaatcttttttctaaaaattgcaactacaggttactaaatagatgaaatagaacaatggcataattcttgtcagtattagtttttctcgttatgatcactccctaataggtttggaagtataagcaaaagccagttgttccatttctgggtgacattcctgctgagaaggggaggaacagggatgttcttaagcccccatccctggctccactgcaggagccaggctctccaaggggagagggaacgtgtttgtcta

SEQ ID NO: 135290 - DNA, 1027 bp, Homo sapiens
tcagtggctgcaagcaccaaattgctctgccagggtccaggactgctttgttgtgttgctgccagaaataccctgcaggacctgctggctccataaggcctgcaagctcagcactgggcaactatggtacaactgggaaggctgcccgcccacccactggcagcctgcctgcgagtcattctggctagaagggagcagagaccacctcccttacccccatatgaacagtatttggcactgagtggcctatctcagtttggtattgtgaagttagggtttccaatggtttcttccaaaaacagttaaggcaaagtgtgccccaggccctagcccttgcccagtacccatgccttgatagctggagttctgctgataatgaaatgaatcatcaaaccgttctgcctctgaactggccctggcacaggttcactgcagacttcaggagctgagcctttggtgcagactcctggcgggctctgtgtccctcctgaagacattcgattactgctcccttagtgttccatcccttcctaagataagtaggtttcaaaacagtgtaattagaaatttgaaaaacagcccacacttaatgtgtatgtatggttgttaaagtatattaacttttaaatgttttctcagtggcatacctgctagtagattccttttcctgtatctttcactaagacagttggctcccatcatgcctgctaagggtgagacgtggcacagagttgcaagagacaccagtggagacgatatgtagtcccatccctggcacaaagcagtgctcatgatgtggtcatggaaggaaggaagagacgaagggaatcatttagcctcctgtctgccttgcacaggagtaccctcccaaaaccctgggccaggtagtcatcctgattttgctgcttgaatgcctgtggtgtctgggaccaccacctcctaccagcccacccatccctgtgagatccttcctcgttaagcagggctctatcttcctgttctttcacatccactcagcaatttgaga

SEQ ID NO: 135291 - DNA, 1634 bp, Homo sapiens
ttgcagaagtacaaaattgctgttctttgtcctccagctctggagctgagctgccgtgtgggtgggtttctcgagccttcccattgttttagggtgaacaggcaagtctgaaaagtccagcccagcccaggagtggcatgctgtatttgtttgcttgcgtaaactccatagtttaattttttttaataggaagctgctatgtagttcggatatttaaacagttattaaccgaatgacaattaacagattgcatagacagattttcttttgaaaacctctgaaattgagtacagtttgcaaaactatcacggcatagtaatgacaatgaattttgatttcccggaactgatattagactccttattaaactatgtgcatctgcttttaatttactccaaataattggaaaatgcaatgaagctttccaattaaagcacggctttatgctgtttaataatacccccataatattatagcttatgaagtgacaggtgagttggtgtatgaataaaacataaaggcagcaataagggacagaaaaccggagacagttgtggggattttaaatgctggatgtaatttgcatatattaatctcttcttttcagccttatcaggcgttcttcagtatttgaagttaaaatagcgttgacaggcgggagtacgcttagttttttcaaggatttattacttgtataatttctgatctttaataagcagatatgactgatcctcatagttctatagaaatcagttaattgttccagatggcgtgtactgattatgcaaaattacttttcacaccattttttttgtgatggagtttggagtaaaattaaattttttatagccttcttatcatgctgttttacagtggtttttccacagaagttgaatttaatctactatattacattgaccaacacagttattctaatgtagcattttgtgatttgacagagaataatagaacacattgctcattgttcattactgtgtccctaataaaaaggaactcctgtgtatagaacatagctgttatttatgaagaatgcctaattcatacagttaaaaatgcaaaattgtattatgaagtagttccttttggggagagaatatctggaaaaagcaaatggaaataggcttgttgctgcagattctacatgctaagggaggagccttcttttaatgaccagcgtgtttaaattgtgctactttctcctttgaagaaggaaaaacccagataatcttattctattaacagaggtgtcactggttgacttgtcttgatttacataatcccaaaagtctttcataattgaatagcatttataaaaggtggttacactttagtgtaaagtatccaaaaaaaaaaagtctaaaggtgtcaatgataattcgtctctaacattttccaaagtgtctgtttatcaccaaggcccttgtgttggtgtcggatccaagtccaggtggtgtgtacccctaggtaacattcatgtaggctgatcctcgtccaggttctcagataacactctctctatggctcagctgctagtgggatatgaagtactcagccgactcactccaaaatgggactgagggactgtcaccttgatgcaggagtggatgcagttt

SEQ ID NO: 135292 - DNA, 2675 bp, Homo sapiens
atgggtgtgctttcatctttcaggcattcatcctagctgaaatacatgtaataaagtagtcctgctaattcaacatcagaaagaaaaaaaaagcccaacaggaatctccgtgagcccctcacacgcgtgaaacagttgttctccaggccccacttctaaacgtgtagcaaaaaaaatctgttttggtatttccctctttcagagaaatattgaaaagtacattttttttttgtttcaattattttaagggaggaaaaaaaagaaccagtgagttcagagacttttctaattactaaattggtttgttataaaaagataatagcaaatttcttcttttcataattggacatttcttccctgtaggctaatgcaggcacagcccgtgcatgcacaataagttatgcttttgaaagccataactagctaataacagctacagtgtcatcagagagtaatggtgtgctgattagcataattaatgacaaatggtggtgcggaattggtggattggtttagcggatgatgaatgcggcgaggcctgggctgaggcctgccaactaggcctcgctggctgtcagcccttctgttctcccgatgcagccctcattagtcacgatgggaggtgccagtttgtattccgtttggagcacagaaaacttaataatccaagcaaatgtggctatccctttttcctctgtatttactcacaaaaccctctcactcattcccattgtggctgaaccattaagacacagctatttccagattcctctgcgaggcttgaaggcgaaacaaaagggagcataatagagagaggcacggatcccagagctttcatctgaccatcaatgaattactctcactaggaagacttctgtttggtgaaccctgtttatctgtgtactttataaggggaaaagagatgaactcagtaagcgatacattctgtcctaaaataagactagcatatttatctttgacttgattaatcagacctaatttgcattcgcaaatgagactgataaaaatggatttaccttttaacctttagaggaggaaaggtatttctctgcaagatttctggggctatcgtttcttaaccgataagaagccactcctttatcaataaagatgaaaatccgcaatttgcattagtgaatgggactgattattatatagttaattagcatctggaaatgaggattatcttaattacaaagcacaatttccctaatagctacaaaactgtaagtttgatccatgtggaaattggtaacattattatgtaattagtgataacattaatagtgtagaatatttagatgtaatttgcatatgcaaatgtgatttacctgagccaaacaagtggaccattaatgattagagcatgatgtagctgactgaaagttctagatagctgaatggtacctattatgcagaataactaaattatatagtggtagagtcagcaaggaccttttatatttaggtggtcagggtggattttgctttaagaattagtagctgctgggtttcataatggagctaactgcttggagaaatagctagcccataatcatctccttgactttgattttttcatgcttccctatatcccttgaatctgagatgtactttccctatgtattttaacaattctgaattttggatctgtcttacaattgatgtgtacttttaaagcagtaacacacataaagaataatggtgcagtttacagttcttcaggggagaatcagacctttctgaattttatccgcagggccctagaggctcctcccatcagaaatggttctttgtatcttctggggttctatctaacttcctccctcaggctgacatatgcttcccaaagccatgtactcatggtggggtggattttagagtagacatggatgaccttttgaaaactgtcattcataatagcttatcagtggatatcattgttcagaatgggactaaagtcagtgtattgatcagtctttgcttggttatcatgccagtaacaaacacccctccagatcacaatggcttacagtttcactgttttgtaaaatggaacttggaaatgtaaattggaacttgagtgacatatatcaccatgtcactcaagttccaatttggtgaccgtggattggctggaaccctgctccttgtgtctttgcactctgggacccaggctgaaagagcaggtcccaactgtaacttgctatttttatagtagagggaagagtgagacctggaagaaacaaccagtggctcttaaagcttctggccatggtggcaaggcctacagccggccaacatgagttgggcagaagtgtatcctcttcccccaatgtgcctttcacacggcagtgggcagatggtcatactgttacagggaagtgggaacacatactcgggaatggtgacactacccactggaggaagctattttgagtttaaaatgtgagtgtgtgctgtaaaaatataaagtcagtaattatactggaaaaaaataagtgaatctgagacatcaggcaccttcctagagtctagaaaacactggtggccgataatgtctgtagcttttccctgtgcagaattttatcttcaacccatcaagagtttgtgtcctcctggggtgtttgggagagctcagggattttgatggg

SEQ ID NO: 135293 - DNA, 1046 bp, Homo sapiens
tcaccagtgagaggcagttcttcactcccaaatactaataaggtctttaaaacatcagaggcagaaagtctggggaatgaatggtgagtgggttctgcaggggagcaattgccagggcctgtgcacagtacctgggcgtgcagagaggactctgctgtggaccctgctgtctgtctagcaggcaagagaagctgtggaagagatggatgtgggcagagagtgggaagtgaggaccatgacaggtgaagagtgggcttcgggactttactggggaggtcaagtagcctgtactatccagagctttggggccactgctgcctacctttgtgaccccagcaagcaccgacttctcagagcctctgcttcccaatctctaaaatgatcggaagtgttacgagtgcccggcccatctcagcagcactaggaagggcatggaagtcaggtcaggcagatggtggtgggagctggcacacctcttcctggatatccggtgggacttgactctgcccttctctagaaggctttgtggctcttccagactcctttattcattgctgaactttttcatctgtgaagcagcatacacgcataggtacttagagttcacacacaggtctgcacgcgggatgtactgaacgagattgaggcccaaatgcgggacgtactgagtgagattgtttggggccttcccctcaccccactttctggggaagtgttgcctgttcgggacttttgtcccatctcttccgtcagctcacagcaggttgccagcaccacctgaaatgggagaaggcctctgaccaggagtctctgtctaagtccagcagccacactgggcagcggcccttccaagagaggagggcgcggggaatgcagcgactgccgccacctgtgctgtgtctttttcttcatgctgatccaagaaggtttcgtttctttccttccctaaaataaagtgtgagcagagttctatgatgttttatccctgtatgaacgtagcatgagccattcggcttttcttgctgattgggaggatccgttccagg

SEQ ID NO: 135294 - DNA, 1076 bp, Homo sapiens
gatgcgagtcaacgagtcgtcctggcacgaggagtgtttgcagtgcgcggcgtgtcagcaagccctcaccaccagctgctacttccgggatcggaaactgtactgcaaacaagactaccaacagtaagcgcttctcgtcctccttccccgccaccgcccggcactcgagcccggtcagccccctgccgggcccggcccgcgcccgctctgccgccggctctgtgcgcggctgggccgggcagctccaagggttccgagagctgcgcgtcttggggctggggcggaccagcccagcccagcgggcactgatggggtcctgggagcctccggacggcccccagttgccatccgttgtcccggaatcctgcgctgggccggccgagggatttggtgcctgggtcctgggatatagggtctggcgctacggaggcctgaattgggaacccaaaattgatttccaaaggaaaataatgttttagggagccaggcctggcggactgcttcaagggcctggtgtgtgggggtttgggattcctggagcctggagccaggagccaggaggtggagtgctgggacactgaacggcctgagcggcaagggaggccccctttctgccaggctcactgctgcacttttagtccctgatggagagaaaagaatgtccatattccccaaaccgttccatgcgggaattttgcacttgcagttttctttggttggagaagcactctaggaagaggatctcaaaaggtggcaagttacaatttggggctcccaatgggagtgaggagctgactgagtcagcccttcccacaaggcctcctttctggtagtgtgtattgaggagggagatggcccgctctgccctggtataacccaaacctcagggctgaggccagagatgtgggttgagcccttcttgctaactagtttttagctgagactggatttgtatggccggggttggggacagacaacaggacatgcaggctttttcttttgacctcctgggttttctgcctggcactgcaattgggagggaggcagtgaggagccacaactgaaagaggggtgtg

SEQ ID NO: 135295 - DNA, 1063 bp, Homo sapiens
cagagagggctgtgtatgcccaagcctccagggaaggaaaagctgggctgccggcgcctcgtggtgagtgcaacctacctgttctgcccagggattgtccccagtccagggcctagtggaaagcagcgcagcccaactgtttaactgaggcctggaaacagtgcaggccagagccctagagagggcatcggattctaccccaaaaggctctggctgtgcctggtggtctgggggctgagcctgagctgctttttgcacctagctctttcttccggctgagggatctttgggtagggattggagtccattcagaggttcagctgttttgctggtcccagagtgcagctgaggccttcctctcagtaggaagcaccccagatttaggcacactgccgtaggtcggctttgtgctgtgctctgaactaatatgattctagttccgggagagggagacgccagtccgttcagtcacagcccaagcatagagcagcacaaattgaatggggaaaatagtttggggtagatgtggctgtgggctctgggctggctagaggagcccctctgtagggtgcaccagcctctagccccctccccaccacgccctgcacccctggcctcactctgcttgcctgatcccgagctctggcagtgccacttacacccagctcagccaccagcctttacgacaacacatgggggaagggggcccaggaaactaaaaccggcctccaaatcatttgcacagcttaaaaaaaagaaaaaaacttgttaatatattgaaaagacttatgaatcgcgtgtacatattctgccctccccccactccccataattatttacggagcttctctttaaaaaaaaaaaggaaaggataacccctggttcttcaggcacagaatggtaaagtcacgaaatttcagctggatgttgccttagagatgagcggctcaccccctcatcttacaaaacaattaaacgttaagcatttgctactgctttgtccaaagtatatttgttttaaaaagaaaaggaaagagtcacctaacagccagcttcttcagtg

SEQ ID NO: 135296 - DNA, 1186 bp, Homo sapiens
ctcaccatgagcatggcagggaataccttgtctccaaggacacacaccacactgccaacaggttctctacccaggttccatggtacacagggtttaccatgagcctctccatgcagggaggatgaggagcaccctggggaagccattgcctttcccttcgtaggacactgtaaaagtcttgccttcctcagccatgaaaagagctttagactcggagtcagacctgagttcacctcccagccccaagtcttagcagctgtgtgatcttcgctaagtggttgcccatctctgagctggggcctcatcaacaaactgggggtgatgatgtgactttgcagggtggttgtgaggattacacaggcacctggtggaactttaataaatattccattctccgggggatccattatcctctcctgcacctcaagagaggtggaaaacctgattgtgtgggtgcgcacaggtgccaactgcattatcagaaagggccacaacagggtggccagctgtgctgggctctttctcctttgggggcagacgggtgtgctgtgctctttctccctgggggcagacggagggtggccgggtgtcctgtgctctttctccttgggggcagacggagggtggccgggtgtgctggctctttttcctttggtggcaaacagagggtggtccagagcaacagtatttccaccgggaaacaattggcatctccagggcctccatatagcttggaaaagcttaataattcatatttgaagaactgtttgtacttactgttttgtgattgaagccacagaaaataaagctcagccaatggagaagggggtaggtggaggagaggtctgggggatttgtctatttctcagaaggaagatgaggtttaaaaggtggagaaacaccattccaggaactcagaaggcccctccagctcgggctctgtggccttgtgaggtttccacccatgggtggctggcgatgcttctccaaggagccgcctttgtcctgaggctctggagtttctaaaaaataaagaaaaggaagaggaaaaaaaccagtcctactttggcatcagttaggctgaaggatggaggatactctcaccgacatgagttataacttccaatttgttggacaccacagtcaagcctcagccaggggagggaggaagggagggatagtctac

SEQ ID NO: 135297 - DNA, 1061 bp, Homo sapiens
ctctcttgggctggggtcggggtgccccgccaggtggggccttacgcggtccagaaagagccagtgattctccttggagccactgcaggctcccgctggagggagtaagactggcggggagagctggcattttcattccttgttgagcacagccctcgcccctccccaagccctcctgccgaccccctcgggctggccaaaagcagcaagttcgggaggtttgtttattgagagaacagaaaattaggggttgcgggggagaatctaagacccttttcccgcctgagaaacgtgcgaagtccctcagctcctggaggcaaccaggcggcccgaaagccgagttcccggcgcggatgctagggccgaccccagccccctccctcctgcgccccagcccgagggcggcgagtggcaggtttttttttatcttgtttttttttttttggatttggtttgcaggggggaaatgtggttgtatcaatccacaaatatttactcttaacagacttgtatctgtggagatttcgaacaaagacagtttagggggattacaaaaaccctaaaccccgtttttctcccggacttggtgctttaaatgccaattataggcgagccatatccaacagcaacggggaaaggcgagcaggctccggggagggaggtggggggagagtccggccattaaatgtaacttttcattatgaaaaggatttcgccggttttatcttctaataagattatgtcacgaacacaagtacctaggatggtgctgagtgacagggctctgtcgtttaatcagaggctgtgccgctcaaaccgcggggccctttgtcccacggagtgaacgacggaaacttgccatcctaatccccttattcatgtcaagcacagaaaagaagccgagcaccttacaaccgtgtcccctccaccccttccgaggacggcgggaagagggggctccggccctgtagccccctgacgcttttcgtttccgagcgcgcttgggcctcaggagccggagcgttgccgtgggggcgggggaaggggtggttttgcgggtg

SEQ ID NO: 135298 - DNA, 1714 bp, Homo sapiens
gtggctcttgagattaagacaaaaatcctttaaatggcccacaagaccgtcaacagggcatgggttaaataagttagggtttgccctgtaatagaggatcaggcagctgtaaaatcaggtgctgttgttccaacgtagagtcatctccagtcatggggtgggggtggcggttgtagagcatattagcgtttgtataaaaaagaaagtggaaaaaaatcccaatcagtcctcattaccaaaacaaaacaaaacccccccaaaatacacccaaaaccaggccgggaggggaatgacagatgcactcggcttggtgtatgtgggcttgtgtatgtgtgatacgtctctggaggagggtcaaatgaaagacctggattgcctctggggaggggaccgatggctaggcatggggtagaggaggatgcagagaacgcccttttgtatttgaacatttcagtattaaattatggaatgcattacctcttcaaaaacaaattcaataatttttaagataaaaaatgttggccgggtgcggtggctcacgcctgtaatcccagcactttgggaggccgaggcgggcggatcacaaggtcaagagatcaagaccatcctggccaacatggtgaaaccccgtctctattaaaagtacaaaaattagctgggcgtagtggcacacgcctgtaatcccagctactcaggaggctgaggcaggagaattgcttgaacccgggaggcagaggttgcggtgagccgggattgtgccactgcactccagcctggcgacagagcaagactccatctcaaaaaaaaaattaaaaaaaaaaaaaagataaaaaatgttcagtaggccgggcgcggtggctcacgcctgtaatcccagcactttgggaggccgaggcgggcggatcacgaggtcaggagatcgagaccatcctggctaacacggtgaaaccccgtctctactaaaaatacaaaaaattagccgggcgtggtagcgggcacctgtagtcccagctactcgggaggctgaggcaggagaatggcgtgaacccgggaggcggagcttgcagtgagccgagatcgcgccactgcactccagcctgggcgacagagcgagactccgtctcaaaaaaaaaaaaaaaaaatgttcagtagacagtgtgtaagaccctgcacactcaggcaggctcctgtactccccagcttcctcttgctccaggcacccgcccttccctcgcaaccctctgcaccttttatttctcattgattctccttgtttctcaggacctttgcacacagtgtttctctcctgcctggcctctccgtcacctcccatccttgcctggctgatcgccctcctctccccgtctcagcccaaatctctgtcttccgaaaagtggccttctctgacttgctccccaccacagtccccaggatgggctgtctcccagtggcttgttcgctgctgtccccagcacccagcaccgcacctggcacacaataagcaccgcatcagtatttgggggaatggatgaagtggcaggaagaggaggataccctgggaactccatgccatggggcttgggacgtgcccacctggcctttgaaggatgagaagcattttgccagactcacagcgggacagtattccaagtagagcatggacaaggtacagagaccaggtggctggctttctctagcaacctgtctgctaccc

SEQ ID NO: 135299 - DNA, 1117 bp, Homo sapiens
ttactgggcacctggctctgggcctggcctattctggccatgcagggccccggagagaaatccaaaggcctctgcctcccgtggcccggggtttctcaccttccacgtgcgttgtcagccctctggactgtgggcgccatcatccccccataaccctggtgcccccagcccaggccagaggcccagcagctccgtgctgatgaagcaagtgcagagttgttttgggaggtggccagggcagatgaggttaaagcaggaaagggcttcaagaacagggaggtccaggaaaccaagcacagagactgggaggatgagcaggagctgggaggcccagtgtgccaggctcaaaccccagctcagacactaagcagctgtgtaccctctgcaagcagcactttcctctctagcaaagagagtgatgttgcctacctcgcaggggtcttacagaggaggagtccatgggcaaataaagcccagagcttgctatgtgggcaacagtcaatacatcttagtaagcaataataatgataataatgaatgttggatttggcaaccaggagctgctgacctcagtgagaatgggggaaggtacctgggactagctcaaaaaggtacctgggactagctcagtttgatgagcaggtgggaggaggaggttcctactgcagaccaggagagggcctggctcatggtaggtgccgggtaaacgttagatgaatgggtgaatcaccaaatcatcaaatgtattgaattcactagtgaaggggcagaaagaagggggaagagggtgaactcaaaggtcatgaaatagtacaggtaaagcccttcgcacagtgcctggcacatcatagctcgcagcctccctgatgcccggttggtccaggatttcctgtggctcttctagcctggactagagtcccaagttcagccagaaacgatgcagggaaggatggtcagagggatgtgatgctccacctcctacctgcacctgacctgtctcgacaatggcaggagggctcctgcctgtcaccagggaaggtctggtccccacagaagcctcaatatccccaccacccatcggaagtcagagccccaaaggtgggaaaccagttgtcag

SEQ ID NO: 135300 - DNA, 1041 bp, Homo sapiens
atgtcaccgttaactaaggaaggactgcggtaacttaccctgcagggctgtaggttgcctgcaggcgctccaggcccccagcctgttgattccgatttctaggtctcatcttcctctggtcccttttggccactactttaaaagcttgcccaaagggatcccctccattctagtgggcatttgctgaactaacctgcccctaaggctggcttctaaccaccggggaaagctgcttagcctccagggctccctccttgagaggctcacacacccccaagctgctgtggagtgaatttgagacggagcagaagctgcaaagctgtgctttccctggggaaggggatgtgctgcggcctcctgggtgggcgtggagagggcgccatcacaacgagtccaggtttttgcttttggaaggtctctgataatttaggggtgctggaaaccagcactgtgttatccccaatccctcctgtgccaccagttttgtgatttaggttgctttagtgggtgactaacttttgttcagtgaaaccagggtttgtttggggtttttttctttgctacttacatatttaaaggtacaagtttcttatttcaaatctctactgatagtgccctatggggagatgctggaacacattttgcaaatgtgacttttttttttttttttaatttttgcttgaagcctgtgtcatgttagttgctgctgccttctttccttttgtgaggttcccaatgtttcgtccagaaaagtactttatttatgcaagtcaggtgactcttaggccacaaaaccatttgatgataaacagattatcattaggtgcatatcttattgatattttgtgaaatgttatgcctatgttgcaaaagttgaatagttttgtctttatatattgctgtcttcagtgtacagcatggttttacttaattgaatgttaatgtttaatattttcttcttatagaagagatcatgcccttttgtatgacatgttttaataaatgttatctgtcaactttgtaaaagttttgtttttcact

SEQ ID NO: 135301 - DNA, 1023 bp, Homo sapiens
tatttgcagtgtggaggataataaaatccaatgaactgtaaacgaaaatggaacgaagtagaaaaatgtgcagcacctagtaactgcttagtacattttcattattgttattgtcattattgggtgtacatttatcaaggtggagaaatgataagctgctgaactgtgtacctactgagttttggatttctgcaccgctgtgtccccccacttttgccttccatttgaagcacttgtctaaaatgtcagtaccatgaatctagttacgttttattcccgttaatgttcatgttactttagtttaaattctgcttaatgtttttcaaacttcttaattgtgtctatttaatgttttgtagctgacaaactgctgaatttagcttagtgaaggtcatcaactgaacgcagttaaatttctaatggttattttctggttgatgttgatggcaaggaaaacctcatggaagaatgcaagtcaaggtgagcttttctaatccttttgtcataagaggcaggacttaatgtattttccagggccagtgcccctgaaatgctagccagcagtaagcagataagatgctgtgccttactattttttagttatttgccttaagaaagcttattttatctgaaacaaatcctctcaattaatgattaaaatatgaaacatcttttttcctacttcactgacagaagtaaaaataagggacattttgcaaagaaatgactgcaaaccacttgaagtacaacatattgtgaccccttaatcatcacagtgtcagacccagcctgactttgtctgtgtggtggaacatccttaaatgagaattctctttctactcggagttgatcagtaagaatccagcaccaataaaaatcctgcatctcaccagtatgcctggattaaaatcttactcttataagagataagagttctgagtctgagactgacaaatctaggtccaaatcctggctcagccagtcattagctgagtgaccttgggtaagtttctcagcctctct

SEQ ID NO: 135302 - DNA, 1037 bp, Homo sapiens
ggattctgtagcttttttgagtgggatcttgcgaagatgtcaagcagcattacttaccaagcctgtcgtcatatggtctcgcatcagaccttaattttcttttcagcgcatccatgcctgcttatttccagagcccccgctttggctttggacttcaggtctgtgggaggagtgtcccaggatggctcgtgcggtcatttccaggcagtgccgctctccctgtggcttgtacccacagtgcctcactgtgtgagtgtcctcctgctctggttgcccagccggccatcactccacagcgtgtgttcatttctcccaaagctgctcgccttcagctgtgctcacctttgcagtgtggcttccatgtctgccgtcctctggtgctttcagacttggcttcgtcactgcttggtcagtcctggagggcccctcacagtttgctgttgctttcagggcgccggtctcaatgctgctttgaattctgttgaacttgggctgaaccctgtgtcttcttggcagcatctgctctctgtgactttcaccttcaaacaccaaaaggaccggtttacttgagccctagatctgtggtttctaattaattgaggctttcgcatgtaaagatagctttttatttaaagcaagtagagtgagccagggtccggggctctgaggaggaaagggggatcaaagctgtgaatatggagggcatgatacacggtggccgcggggcccacctggaacattcttctcctcataacccttctgctagtgattctggtctagaaaagagggagattttgctctacaaagagggtgcttcactaaactcctacagctgaaattgcttggtcacagcgaatatgcagatgtaatcttgatggatattactaaaatgccctcatttgcccttctctattctgggcagcaatagggaggatgtttgcccacccccaccccccaccccatctccatccctttccttgacactgtcctagggcaggaatgtaacacaggtccagctcgctagggataaggggttg

SEQ ID NO: 135303 - DNA, 1052 bp, Homo sapiens
tgtgggggcggctgggtgcctggaagtaggagaatgtcggtcctgcccacatcagaggtggtccttcccagaagctacctgggagaccagtggtggccttgtgtggtcacggcagaggctgtgtgtgaggtgaaagctattccacaggtgtgaaattattctctttctttgtaagaaagtaagattttggaagtaagaaattaaagaaattgaaagagcagaaagattgtctttccattgattgagtgaacagaagagacctgtgaagaagttgaggaggtgacaattttgaacttaccaaaaaaccatttcaacaaagttctatccatgtgtattttttaaaagaagtatctcacattctttttccagagtatagtttttataaacaaaaacagaatttttgttaaaatacgtatcgatactgaaaataaatccagcttgtatgtgcttgttttttaaattaaaataatagcagtgtaaatgtctaatttgggtgtggtttttttgcctagaataatgtgacagaaacacctatgattaatctcctgaattaaagagttctggttctgatggttttagtgagtggaataatcaaattcatttttgttttctgaggcagctgcaaacttaatctaaatgaaaaactaatataaatcactactctgcattatcaaaaatgaattccattcccatctctctctgagtggggaggaatctgcattaagcctctatcaaactgcaagactgggacttgtattcatctttgaattccctttggttttctgtatgtaagagattgatattgagtgaatatttcctataaatgtaggaaaaataatttaaattcccagtcagtgtgccatttagtgattgcaattaaatctaatacttgcagcgcatgacaaaaggctaatttccttaatttgcgaagagctctgacaaatcaataaaaaaggcaaataagggcaaaggatatgagtaggcagttcaaagacaaacttagacaaattgccattaaacatgagaaaagatatcaacctcatttataatta

SEQ ID NO: 135304 - DNA, 1554 bp, Homo sapiens
ccaagcagtgttgtggttttttttgtttttgttttttttctttctcttttcaaacagccagttcaggtgcacagcaactttttctacatgcagttcccagggaaactgcagaacttagaatttgtactttttgtaaagctatactctatgggaattgcaagcaatatatctatcttagtattgtgtgtgctaatgagagcctcagtggctcccccactctctcagtgtttcctgcttaaagaaccaacagtttaaaagccctctaagatactctgtgtgtcaccaaatctgtgtgtcaccattttttggtcatgtggtgctatttttgttaagtgtctttttaggtcagtatagttgtagaaaatgtgaaatctgatggtaataatgaattataattgttttcctctcttgagttcatagcttgaaaagagacctcaaaagcatgtgctggcaaacacgttactgtatgaaaacatacctgagtccatttgaataatgttttattagtactttcggaaatgtcttcagttctgtattgtgttcacatacacaaacaggctttacaagattgcttcggtactgtaaactctggcagagagtaattttgtaggcagtttggtggtgagtttgtgctgcaggctgcctgtgggatgtcagcgttctggtatctgcctgagaacctgggctctgagacgcacaaccagtgcacctccataggagaacagtgcagccacctaaaagaaaaacgaacgaaggaccagcctcagaggctagaagttaaaggaatacagaattagatgtttgctggttttctgtgcttttttggctcctaaaataccaatggtggatttgtttttgtttttgttttttgttttgagaaataaaaagtcattcaagccctttgtgtgtaatagcccccaggggtggcagctgtgcagtcgcatctctttggcacacaggatctgttcacgtgtgaactgctgcgctacacatcagtgttaactccctacagattacactctaatcccgctgctcccgaggagcggctttgctaaatcgggtatatagtatatgcctttttcctcgtcaaactgcctaagtaggggttcgttctctccctgaagcacttgttcaactcctgttaaagccgcgtgcctcaaggggaggctggaccccaagtgtttacccacttaaatatgttctggggtttcaggtaaatgtttgtgggtttttttttccttacatgaataagtttggttttgatttttttttaattgaatgcaaaaaatttgtgttgtgatacaaattaagtttgtgacaagaaatgcccaaatccaaggacataagaggtcaagctcagggaaggaacctccttttcactcaggcttggggcctccagcgaggtttccagagcattccatggtatgagagacagtgaggagggagggcacctggcgcgggcacttccagcgtcctggctcttggcattgtccgtcttaaccttatttacatggagttctttgtatttgtgaatctgtttaactggtttgagtt

SEQ ID NO: 135305 - DNA, 1606 bp, Homo sapiens
catgcttcccaggggtgtgactggtgagagattaactccattcagatcgggcagcagcaattaattgtgccttgccgcatgaggatgtgtcaggaggattaacatgaccacagaaccgaaacattctctccctgaagttcacttcacgtctccgcagacgaagtacgctgtgtaactccttagagcaactctttttggaaagcaaagtccctatttctgtacagttttaggttaggtgtttcatttataacagatgcagaaatcaattaagataaagtgatatgtgaagaaatcttttacagtaaaatatatcctgaattcatataggcttgttcataattgagtctcttcttgagctaccttttcaatattagacaatgtgaagacagtgacagcgtccttttctagagatatttagcctgttattacaaactgtgaagacaaagaattttatacttttactaatgtttgtggttttaaacagttattttcattctaatcagttctctaccctctaatttctactaaagctgtaaatacatttagaaattatatttgtaaatacagtatatggagacaagttaattttttggtcagtggaaaaagcctcccaaccaattggccctgccttggcagttgtgttttttgttgttgttgttgttgttttagtttagtttttttttttaaacagcagaaaggatactgtcggttcactgttgagcagaatatactgtagaacgaaaatgataatttttaaatcttccagagcatgagtaaatgtcttttctaatgatagcaaatataaccaactctttgtttttcccttagcccagaccatatagacctgcgtattttgtgtgtggttttgtttttatttttgttcttacagcctagaccctaggaaaaatttgcaggaacacgaaacaagggctggggggaaaatcatctatgtgaatgagctttactttaaagagatcaatgtattttattttatcaactttttctcttagttactgtgatttttgttgttgttgtcctcgttattgttaaattctgtaatggtttcctgtgaagcctccactgaaagggactcaaatatgcaacacctaaactattttccaagggcacatgccccttgaatggtgcttctagactggtcagggttatttattaaattttatatatgaaagtattggggaattatgtaaattctttatatgaaactatctagttcataaatcatagatttcatattactcagtgcaactgaactaaaagttcagaaaagtcattcacattgttccaaatttgtaatggttgtcacatgtcacatgcgtctttttcagtaagtgccagagtgttcccactgtttctgcccagtgcttgacttctcggcccggaagagaacctgctttctctggtttccttcctgagtctggcacagacggggctattgtagttcttgatcaagtcctggagtcagccttgcctggctctccttgtagcagattcagtccacagacctcttgctgcccctcagtgacaagtatgctgtgaattcaacctttggacttgctgcccaagcctttggttgctgccctgacta

SEQ ID NO: 135306 - DNA, 1054 bp, Homo sapiens
ggattagtcctctgtgcatctgtttattttttccttctaggcaccatatctctaacactttcagtccactagcatttatagattgctctcctactgggctcccacaactctctcactgtgtgccctgccttagcatatagtacaattgtgcccaccagtgactccctcatgacctttctctagactttacagagtgagagtccacatttgttcttgcgtattcagggcctaccccagggctggtacaaggcagccagaatggtctgagcatgccattccctttgcttaaaagcctccagtggcttctaatttctgtcagaaaaaagaccacatcattagcatggccggtgaggtgtaagaatatgctttctagggtaattgctggatatgtctgtctctcctggtgcagtacagtcccatcaggtcatgggccgtgactgttttgcccaccagcaggtcctcagtgcctagcctagcatccggcctgtagtagatgctccttaagtgtttattggatgaacaaatggagtaaatagtgggctcccagtgactgatctgaatctataaaatgagaaggttgttagatcggaggttctgtccattatacaatatctcaaccctttacaacacttaaaaaggtctcttcacactttttattccagccttatgttgattctgcaggtagctagggcaggttttgatgtgcatagaagacaatggaagcttagagaggttaaacacattgcccaagatgtagctgtgagagaagctgagggtcctaacgcctcaagtgcctgttctcatgctcctggctgcctcaaggtgtggcttctgacacactcattgtagaagtcgcaggtgagataaggtgacagggcttcattggaaaaaggtacttataatagtttttcttggttttagatatttcagtttccagataattgaatttgaggagttgagttaaatttggaatgatgggtttaaggtcttgtttcatgcttatgggtcagaaaatactgaactttcctgtaaatggctaaagtatagtaatgct

SEQ ID NO: 135307 - DNA, 1022 bp, Homo sapiens
gggcctttgttgaatctgcagtgtgactgtataggaaaaggatgcaaacttgacttagcccacagctccaatatctagtccagtgttggtggctagttaagaaaagacagtgcctgttgtggtctgttaacatgataatcatttcagggggttcttaaggactaagagattcttggaacctagttttatcaatatagccagtagtacttgttgaacagagaagcagcctggtatatagaaagatcaatgaatatgaagtcagaatgccaaatgtgtccatttgctttgagactcccactttccatgtaaacaggaatatctttggtgtgcatgcatcctttttcagtaggaaagccccagttttaatatctgagattgtgttatgaggcttaagtcagaacaaagagagctggatgatgataaaggattgtaccaataactgaaggtagtcttattccttattcttccctgtcctccgtaactacttgcctactagcccatctggccatccatccatccatgcagttcttgtccagggtctactgagtgccagtgctatgccaagtgtgaggccacagtggtgaaaaaaagacaggccgggcgtggtggctgacgcctgtaatcccagcactttgggaggccgaggcgggtggatcacctgaggtcgggagttcaagactagcctgaccaacgtggagaaaccccgtctctactaaaagtacaaaaaattagctgggcatggtggcacatgcctgtaatcccagctactgaggaggctgaggcaggagaatcgctttaacctgggaggtggaggttgcggtgagccgagatcgcaccattgcactccaacctgggaagcaagagtgaaactccatctcaaaaataaataaataaataaataaataaatataaaaataaaaatacagatctggtccttgctgtcctttagcttacagtctagtagcaaggttaaataacaaaaataataacaagtacatataaaggtaattacaggggctgga

SEQ ID NO: 135308 - DNA, 1037 bp, Homo sapiens
ttgtcgctctaaatttgccttttctggacatttcctaaaaatggaatcacacagtacattccttttcatctgtcttctttccccgagcatgtgttttaaggtttgttggtgaagtggctgtatcagtgcgtcacctctctgttttgctggatagtgctccatcctgcggtgtgtcgactgaattctctgtccgtttaccaggtgataaacatttggagggtttgtagcttttggcttttatgaataatggtgctataagcattcatgttcatgtctttgtgtggacatatgttttctttttttaggtagatacctaggagtagaattactgggtcatgtgataaatttatatttaactttttaagagaataccaaacgatctttcaaagtgcctgtgccattctgccttcccaccagcaacgcgtgagggttctgtctctgcacatttttgccaatacttgttatggcctgttgttgttgttttcttttgtttttaattatagccatcctggtaggtgtgatgtggtatctcattatggtttcatttgtgtttccctgatggcatttctcttgttagccattcatgtatcttcttcttcttttttttttttttttgaggtggagtctcactctgttgctcaggctggaatgtagtgtgcaatctctgctcactgcaacctccgcttcttgggttcaggcgattcccctgcctcagcctcctaagtagctgggattacaggcatgtgccaccacatctgactgatttttgtctttttaatagagatggggtttcatcatgttggccaggctggtctcaaactcctgacctcaggtggtctgcccactttggcctcccaaactgctgggattacaggtgtgagccactgtgcctggcccatatatcttcttttgtgaaatgtctgttcaaatcttttgtggagctgctttttaaagctgcaccagctgtggatctgtggttcttggtgatggcaaacgtggcttctctcaggacaaaaatgactatcaaatgagacttc

SEQ ID NO: 135309 - DNA, 1040 bp, Homo sapiens
tgcaactagggtgtgaattccagaatactcttaacttaatgcctttcttcttacagaactgttaagacttgacaaagagcatatcttaacacaaagtcacagtgttcaagccttccgagagctggcacctagtctactaaaaattaggaggaaactagtaccactagctttgttcagcatttatgtgaagacgtggcagttatttgtattattgtattattatgtgtgtgtgtgtgtgtgtgtgtgtgtgtgtgtgcttgtgtctgtgtgttcattagggttggggaacagagctttgtttgctttttttgaattggctgacttccattctttttctgttttgttctaatgtggtatgatccattatttctaatcaaaaacaacatcaaatcactgcctcttgaagccctttggtagaataggtgtgtgatggttgccttagttctcagctgaagctgtttctgattatgttctctgcttagctctgatctggagcagtttagacatttagggctttattcttcatccgaacatcaaggagggcagcccacctgccgtgagccctgaacctgcatgtgcccaggagactgggatccttgccaggctgctggaaggagggaggcgggtgggggcttcttcctcttcagaggcatagccaaggccagaccaagacttttccccagggtgctgcagtttggaaggtacctcatcaacacataccttagttcaagttgtgacaagacgttagagtggagatgttttgttttcaagactgtagtttgtagcagtggttcttaatcgtggctgcacatcagaatcacctggacagtcttggaaacatgagggtacccagagtcccctccccaacactcccccacagaccattgaatctgaacttaaatctcttgatgggggtctgaaacctaatcagccctattttgtaaaagtttcccaggtaattctgaggcagagtgaggattcagaactagttgctttaaggtatctggagaaaccccagacttgaacattttggatctata

SEQ ID NO: 135310 - DNA, 1127 bp, Homo sapiens
tcttcagagaggacttgtcaccactccccagtctcctttcccaaggccttacgtgatggactccagacacggtcagggttgggcctgtctcagctcacctcaaggcgtctgactcccagacccctaagcacaaaaccggcagctagtggagtgagcctcatggtggggtggcccagagcagctttgcaggggcagctgaaaccagtgttgattcttgctttcacctaggaatgcttacaggtgggggtattaagactaagtttttttgcacagttagggattatttccacagtgtctttgtgataaacattcttctttgactgtcagatgaatgtctaaatgaattttttgttgttaacgtgttttttatttaaggcagctggtcagatacccctttggttctgggcccactgattttgagttgtctgtggatgccaaagaaggtatggccaggaggcacctggctatcttggacgggagctcaggagagaaacttgggctggacacagacatgtagttgaagccacaacagtcagtatatgtgatcttctagggagaaatatagaagaatgtagaagatgaccttggacaagttgaggtggagattgtgtcagaaaagaaaagagcagccggaaaataagactaagagtgaggggcccgaaaggtggggagacaacaggagaacacagtgtgcaaaggcaaggcagaggacaacaaatatggtggaggctaagagcggccggtgaaggggcgctaatttcctagttgggaagttgtcttaggggaaggaacagttacaggggagcagagagcagggaaggcaggtaggagaggggagtgagtttaagtcgttctcttgcaagggagaagagtgagcaggagctggaggggacagggtctgggagaggtgttttttattgttattaatattaatgggagaagcttaatgcatgttaaaatgctagcaggaaggagaaattggagaggaagacgtggaaggtacagggatgacagagggcatcagagtaaggtctctgagaaggcagaggggtgggatgggggcaggaagagagcgaaagaagcccctctttcattaaagccagaaggagggagaggatgcaaggaca

SEQ ID NO: 135311 - DNA, 1763 bp, Homo sapiens
ggaatgctacagaatgagtcttctaagacagggctaaaaaagagtcctttgattttagcagcaaggacagttttgcagggatgtagcaggttgagtggtagatgtgaggcaatgaagagagcaggtgtaagtgattcttacaacactggctccaaggggagctgagaagggagtggctggagagtggaggagtcaaaaaagtcctgggaggtggttgcatgcttttttcttctttgaagtgagcagatccttaaggatgtgaaggagccagtggacctggaaaagttaaagatgaggagagggaggaagtacttaatgaggtaaagtctcagaaaaggtggaagaagccaagacctgggtgcctcttcagtgtaagagatgagtcagcagaaaggaaaggggcagatgtagacccatttgtaggtgcaatacaaggagagtgatggcttttcttcgtcagtgaaatgggagggaaagggggaaggagtggggcgagaagattgatgggtttggggaaagcttgaaaaaagctgctacacaggaaaggagagagagctgactctggaaatacagcaagactcttgggcagtgatggtggcccagatgaaatagagattgtgattttctaagtggccccagtgcatgtaggtagtaggtggttttctctagttgcacttctcagcctaggagtaggtgcatggaagagcaaatggttagacccatccccttaggggttggcaaagcagattttttggaagggtcaagatgcaagggaagttaaactagtgtcaaagaaaaggctgaagtaggccgggcatggtggctcaagcctggaatcccagcactttgggaggccaaggcaggtggatcatctgaggtcaggagttcaagaccagcctggcctacatggcaaaatcccatctctactaaaaatacaaaaattagctgggcatggtggtgcacacctgcagtccaagctacttgggaggctgaggcaggagaatcacttgcactcgagggggcggaggttgcagtgagccgagatctcaccactgcactccagcctgggcgacagagtgaaacgctgtctcagaagaaaagaaaaggctgaagtgacaaatgataggggattggtctgcttaagaggaaaaggatgccaaggaaaagggctgccagggaatccaggacatggtgagaggaaaggtctgacacagtgggggtcaaggagagagtaaggactagaatgtttaaagattgtagccccagatggaaccgaaattttctgacatagagcaggtctgggaaatcaagaagaaagaggtggctgaggtggtagggaggtctagttgctaaagttgaagtgctcaagggatctgaggccagggtcatttgcagtgatgttgaagttgcccaaggaagaaggcaggattggtgtggaggggaagatagcaatccagatcctgatctgtttaccatctctaccgtggaatcataaacatgtagccttttcacacggacttttttcacttagcgatatgtagttaacattcatccatgtctttatattactttatatgtcttgacagctcttttgtatgtgtatattccattgtatggatttaccatccatggtttgttcatccattcacttactgaaggacatctcagttacttagttacttccagttttcacaactatgaataaagctgctacaaacatttgtgtgtgtgtgtgtgtgtgtgtgtgtgtgtgtgtatgtact

SEQ ID NO: 135312 - DNA, 1052 bp, Homo sapiens
atggttcgcagctgccctgggtcactagccataccgctaagtttctctggagaaacctgtgacccccgtgtaggaaaaaacggatttttttcctaaggccctggataatttcagctcagaggtggagtctgatagttacataattgagtctgtaggaaagtttttctgctgtaaaaatactttaaaaatatctcagacctctttatgctccttcgcttggcatagtgcctgacatgggggaagtaattgctatttccatagctcattagcattcacctcctggcctgcctgatctggggtctctcacagccacacagcgcaagccttttaagacctgtttatatcccacggaactgacaaaaactgtatggaattgtcagatgtgcttctgcaactcatttccgaactgctttctgccagtctgtggggctgggctctgtttcctacttggctggttcaagggcttttaaaatactcagggattatgttgtaggtgatcgaaaatgagccttgtttctttaaattgctgtttccatagatctagtcctcgcaaagtagagtgagaagttttagcccagtgtcagaaaactgggtttgcattcaggtgccattcagagcatgacttctgtgcgacttattttctcatatcaactcggggaggttggcctagattcttggttttccatcagtgcttcgtggagtcccaggggttccttagagttgccttgggtgccgccaggggctgagagagtggagagatgctgccaagcaggcagtttgggcactatttccaccagagcagctctgtttgtatcagttttatgtactggacttctgggtgaatttcaactgagcaatggctttggaggtcgaaagcaagtttggaagccaccggtcttagcagttgctgccagccctgtgattccaagtccatctgaccagtgaggctttttttcaaaagttgcttggagattctttttcaaatgaattttccatcacttagatgctgttattgttttttggactgccgggagctatgtgaggacccagca

SEQ ID NO: 135313 - DNA, 1082 bp, Homo sapiens
cctctctatatagctttccttgacacttccttttcccataattcatttataataataataattattttacagacagggtcttgctctgtcacccaggctggagtacggtggcgcaatcaagactcactacagactcactacagcctcaacctcctggacttaagcaatcttcctgcttcagtctcccaagtagctcatttattatttgtctgggttatcagtctctgtttacttaccacattgctatactatatctctctcctgtgttgaatcaagttccccaaagatatttggaaaagttacttaatacttgtgattatgaactggaaatggaggtaaaagtccttgctccatttttaccactgggctttgtgaagattagatgagttatatattacagtgtcttacaaacagcaagtagaagatggtgtttttccctgtccattttagcagaccagttaagcagccattgtcctgagcatctgtgtagcatccccacactgagatgtcctgaattccctagtgggaaaagaaaagttcacttttattcttcaacttcttcagcaccagaaccttcctttcagcatattcttctgcctctccttaccgaagttcgtaagctatcactgctcctgtgcaagtgggctgtcttatggctgcatcctctgtggtcccagaggctgaagatgaaggaaccaggcagggcctgcccaaagcagcccagggctccctaatgcaccagacatggcctgagtttgggaattgcagaccaggtctcaggaactgcactgcttccccaggtgctaggcagtcattttcccactcctctccattgcacaatggggcttttgaacactggcctacgtcagtctgatggacatggtgggtctcttgttctaggttcttgcacagagcatcaaggtctgaagaacttggccaaagggactccaaccctggggcttctgtttattcatgctcttgggcttagccattgacctccaatcccagaagcactaggccctggcagctagactcacaggtgctgccagcatcagcctcatgctttgcctcagccacccctc

SEQ ID NO: 135314 - DNA, 1177 bp, Homo sapiens
tccactctttagcttcttctggtttacttattttgctatattttcttctcattctagcttttaaatcgaaaagacaagactacctttgagaaattggactacctgatgtcgaaagaagataattacaagcggacacgggaatatatccgaagcctgaagatggttccaagtattccctatctaggtaggagtttgaattggcttatttttttttaagaaacctactcggtgccaaataagatgtttttacagtttctacctgaaaaatttccaggaagcgacatggcccgtagataaagaggcaattggttggctctttgggttggaacaggctgttggtacttcccaaggttggaaacctggattagggtgatatacaagtgatgttctgctttttatataaaagacctgtgggccccagggttccccaggctgcagcccagatgggtcacaatgagagtgataagactcgtactggttcatccacatcctcctgaactggggcatgtcaggcacaaaccctctgttctggttctctgggcattattagtatatttcatatttgtacaaataaaattatagtaatgtttatttttctggttagaaaataatgcatgttaattgtaaggaattagagaaaaaagttaatatcttttgttatctcacctaaagatatttgcttcatatcttattgatttgggcatatctaaaatatgtatgcttactctatcctaaaaatgttatttttatcttaaaaattttatctacttttcgatgctatgactcattcccatcagatggatttgtcaaactcgaatctgctctccaatattgaccatttaaggcagcagccctcaacctttttggcaccagggaccagtttcctggaagacagtttttccacggatggagagtgggcttaggagagtggtttcaggatgaagctgttccacctcagatgattactctgaggaggagcacacaacctggatccctcacatgtgcagttcacagtagggttcgcgctcctatgagaatctaatgctgccactgatctgacagtgggtggagctcaggcagtaatgcttgctagcccatcgctcacctcttgctgtatggcccagttcctaataaggagttgggaacccctgatttaaggtatttctacatttttgct

SEQ ID NO: 135315 - DNA, 1365 bp, Homo sapiens
gattttaattttttattttattattattatttttttgagactcagtttcacccttgttgcccaggctggagtgcagtggcgccgtctcggctcactgcaacctctgcctcccgggttcaagcaattctccttcctcagccttccgagtagctgggattacaggtgcctgccaccatgccccgctaagttttgtatttttggtagagacggggtttcaccatgttggccaggctggtctcgaactcctgacctcaggtgatctgcctgcctcagcctcccaaagttctgggattacaggcatgagccatggtgcctggccgagattttaatattttaagttgccttgatttagtcatgattcttgcaaacagcatttagttggaccgtgcatgagaagccttgccttttagtaggggaatataccactttcatatttgtttcaccttatgccatagattgaattctatttatttctttttttcatgcttttgcatctttccttgttttcttctttggcttaccataaactgcagtgtctttctacttggttactggcaaatccccatctcaggtctgcagatggaaggcatgttgctgtgcagagctcccaagtccatttccatcacacctgaggctcatcaattgagagacaacgttgatggtactaccgtgagggtagcctagtgcagcccacgggttccactagcagaggtgttccagggtcattaaggatggcctcttttctcgaataaggatgatcatgagagctgctgtgcattgtttgctttctctgtgcctagcactttgctaggcatttgaatgcatcatttcactgaatgcgcacaatagcccagtgaataagcaggcagtgagaggttgcctaaggtcacataactggaaagtaacagagccaggactgggcccagatggcctggctataagccctaagctcttgacactgccctctcctgattccccaccctattcaggttattattttcctacacacccttgtggttaccacctgtgtcctctggctatttatgacttgtgggtggcccccatcaggcactgtgtgaagggtataaattattgctcctgtttcttgtgacattccctattgtgggaccacaaagcagtgcagtcttgggcttccaagggcattggtcagcctgtgccagccttcaggcctcttgcccctcagagtttctagacagatgcagccccccatgtccttgatcacctcatctcagctgctgcttcctggcaggtgcttcccaagaggctccatggaggcctccatcctcctgcattcttcctgcttctgactctaagcgagtccagctgaactgctgtggtcttatc

SEQ ID NO: 135316 - DNA, 1041 bp, Homo sapiens
aaatctaaaacattttgagagtcaacatgatgctcaaagaaaagcctcactggaatattgtggatttcagattttcagattaggtttgctcaacaggtaagtataatgcagatattccaaaatctgaaaaagtctgaaatctggaacatttctggtcccaagcattttggataagggatgctcagcctgtagtgcagtggggagcatccttatctgtgtgtctttatcctcctgttaaagtacttctgaaacactgagtgctggaagtggaattgctggggcaaaaactctttgcaactttacagtgcctactgctggaatgccctctgaaatgcttgcagttatatttctgcaaacaggatatgagtatgcctattttttccactcttaccaacactagatattatccaccgtgttttatttatgctaaaatgataggcacaaaatggcatttttttttaaatatacatttctctgcccaccaattctcttgggctctaagataggtagccaggccttcaggcctcctacccaactgatcagccaccctctgcccttgcctctgcttcctgaatatctatccttattccatctccctgtgttcctaccacaggcctgcactgccctgattgatgaggaaaggctgccttgctgttgggttcctgtggagaggaggctgacctaaatccatgccctgcacacttgcctgggcattagtcaaccttccaggcttggagaaggctgtgtgcttcttttaatcgttttcccttgttgagatgacgagggcgtaggcctctgtcatcacatggccccagaagggaattctaattccactccctccacattaactatccttctaggctctgggccattcccagctctgttgaggctcagggcaaatgtggcctgtctttcctcctccaaggagccctctcctggtactgtgagcccttcagcttcaggatgtgctgcagcagtggggagggaacattccttgaccagcccttggagctggatttattaatatcatgaccatcagca

SEQ ID NO: 135317 - DNA, 1017 bp, Homo sapiens
ggaagggcagcgtacccaggaagaggcccatctgggcacagccaggtgtcatgttagttagccacctgggcttagaagggttggatgtgatttccgggatagtgcaggggtcagcagcaggaagggctggggaataggatcccatctgatgagtaatgtctggctggcaaaatatggtcctggagaggatggggaccaataacatctggagtgtagtctagacacctttttggatagacacccagcctgtgacccctccttctctgggaacctacttccgctgcttctcccttggcactgcacgccagcagcagtgttccttccacctagctctgctccacgggcagagcccatagagttggggtggatacccagcctgaactgggccagttggatcctctatctgggagccagcattggaacatagatatgctggcactcagatcaggaggacgtgaactgaaaaatgccatctggtgccatgtgccaggacaactgcagagaatagtccacagatggatgcttgatgagaagcagagaaagagaccctgcaggaaagggaaaaggaaagagcaagggagaggggctgagaaagttgctgccttgcatcttgaaggctttccaggcaatttctggttcctggcccttgtgaggcccagctgtgtccctgcccatggacttggggagatacctcgtgtccttatgtaaccagcttattaaatgagctggactcaatcaggtgtaagaagaaaccaaactcattttttccccagtgtccttttgagcctactctgtggacttttcttttcccagtcaaagctgagaacttagcaggtcctttggtctttgaggtgctaggcatgaagcagcccaatccattctaacacttcctcattccagacagtccagtgtagtaattgcaagtctggactcctaaagctgaccagctgtggaggtctggagtgggggaagacagatggtcagcttgtttgtttgtttgtttgttttgagacaggg

SEQ ID NO: 135318 - DNA, 1045 bp, Homo sapiens
tgggcacgccataaccagcctcctctttgccagcggaggtcccacacacctccagggacaaggaccttgccagctactgattttgctgctggctagatctgagtttggatcatagaatacactttccgctccctaaggaggtggccctccagaaaggctgtagcagcccctgtgtcccagggtctgaccagctctgaaggttatccttctgccctgctcttctagaagcctcggcagcccctactgcttcagaatgagggcctgttcctcttccagggccccttcgggccaggccagttcagtgtcagtgggcggacagaggtgtctgtgtgatacagggatgggcaggtcatgtccctcctgtcccctgatgttgggagaattacccttcagaatgtggctgctatggggacctggcatgaggatcccctccaccttagtatgtaggttccagggcctgcctgaagtacaggccatttgtaggacagtcttgagagctcgcttctcaagtgggagggagtagccttctgaccaagaccacataggaaatggaggcaggaggggactgggtttgcccttgagagcagacagcctgagcctggaggcagcatcggccgtcaggtggtgccagcctcagggaggagcatggcagactgagaggccttcatctcaagaaactgggtgttggccctggggaggcattaactgtgtgggaggctgatatctggactcagggccagaccatatctctgtttcttctgattttctgtttttttctcttgttttttgtttaataaagacttcttagtaaagacctagatttgaagcatgtgatcttagacaaatcactttctctctcctatctgctttcctcttaatagcttcctctcagcactgcactagcattacatgcagtaacagtgaccatgaagaaagccagtttgtatggagccctcgctatgtgccaaatcctagacaaagcactttaggtacattctctctacccttctccctactctgcaatgtagttcttgtccttacttcc

SEQ ID NO: 135319 - DNA, 1182 bp, Homo sapiens
atgtaaaggagtcacccgcattgccatggtagcgccccagccgcagcttataatactcgctctcaggttccaggcggaaactggcgtattctgcaaagactttgcggccggaccagtcctccatggtcaccaggagtttgtagttgccttggttcgtcagccagtaaatgttctccaggcccagccagtattcgccgtcaatgttcccaaacccttgctggggaaaacccaggagagtgttaatgtggagcctgcagcacctgcagccagcaggcttggctgtcagacactcagccctggatagaggggcctgggaaacaagcagagcatgaagcagacctggttcagacccctactccacctcttaatctctccatgactcacacattattcaaaaatatgtagagtgcctaccctgtgccaggcatcatgtgaaccccagattccttgttcttacatcagggaggctatattaccttccccacaggcttgctgcaggaacacgtgtgctgtggcaggtggagggcctggcactaagtaggcacgcagcaggcattcctcagacaaatctctgaccttcactgagcttcacctccttctctggagatgagctgtgtgtgagggtcacgtgtaagctgtaacgcaccagacgggtgtgagctgtgacgcatgtgtcccatccaccggcgctcccctctaggtctaaaacccagtggttttgtggttattgtttttttttgcatgtggttttggggtcagcagctgagttacggccactaaagtcttgggaatcggtgattcattaatacaataattatttagtattgagcgcttgtgatgtgctggcactgttttaagaactttacataggttgttttactaatcctcatgtcaactcgaagaactaagtgctatcattatcctccctagtatggatgaactgaggcccagagaggctcagggtctcagaatgcctgagggtgaaccaggatttgaaccaagaacccagtcttaatcattgcactgtattgcctctaagaaaggaggagtctcccgctcctaatgtaggtggaagaggagaaaaaagcagagacacaggctgttcaggaggtggggtgggggacaaccaggacaggagactcaagaaggggcatggcagagccatgtgtgcaaggcatcatg

SEQ ID NO: 135320 - DNA, 1177 bp, Homo sapiens
aacagaggttgtgcctgcttggggtgcagctgggggtgcggcctggtgacaggcaggtctgtgatgtatatgcatgtctgtgtccccaggcccatggagagactgcctgcaggccctggaggatggccacgacaccagctccatctacctggtgaagccggagaacaccaaccgcctcatgcaggtgtggtgcgaccagagacacgaccccgggggctggaccgtcatccagagacgcctggatggctctgttaacttcttcaggaactgggagacgtacaaggtgagactcggcaggggatgtctgtgctgcccacaaggtgactggcccaccccaagagaggcctgagcaaccaatagaagagcccactcagaggtacatgctgaccaagcccaggcctgtgcggccccaacaacacatatacctgaggcgagaaggatgcagacagggccattttgcaaacccaccaggggtagtgaggaccagcgcctcctctgcctgctgctagaaactgctgcaggacaagagtcagtagaccagaccaccacagccccacaggacagggtgagagtttagaaacgctggtatgggggcccaggggtgaggagcatttcactcccaagtggggtttccatggggaaagacccgctctcaaagcccagaaggcgcaagtcccaagaggctcccagttcctgggagaatcccccaaaaagtcctggtagggagttgtggcaatgctcaagtcctaattccaggctcatcctctgggctccctggttcccagggagttgaaatgctcatctgtgtagcagggaaagttgccaggactcagtcatacatcgttcttccccctctaaacagaggtagtactaaggaaggcaagagtggctctgtttgctgagtgcccaacccgtgccagcaccatgctaagggctttcgtgcattattttgtttaatctcgtatcaacctcctgagggaggttctgttatggacccagcttacagatgaaagtgtggagtaatttgctcagggttgcaaagccaggaattggcccagtagtgactgcagctgaggcctctgacactgaagctcacaaactacctgaagccatgatgccttgcacacatggctctgccatgccccttcttgagtctcctgtcctggttgtcccccac

SEQ ID NO: 135321 - DNA, 1042 bp, Homo sapiens
ggctcttctattggttgctcaggcctctcttggggtgggccagtcaccttgtgggcagcacagacatcccctgccgagtctcaccttgtacgtctcccagttcctgaagaagttaacagagccatccaggcgtctctggatgacggtccagcccccggggtcgtgtctctggtcgcaccacacctgcatgaggcggttggtgttctccggcttcaccaggtagatggagctggtgtcgtggccatcctccagggcctgcaggcagtctctccatgggcctggggacacagacatgcatatacatcacagacctgcctgtcaccaggccgcacccccagctgcaccccaagcaggcacaacctctgttgaggctccagctgggagccacaggcccacggtctgaggtaaccaatttttgttttgcgagtttaataagtaattataaagacaagagcctcggaccaggggtcaggatgcccatactccaagctcactttctcctctcacccgcctcacagtttgacttttggcagacttcttcattctcccagcccccagtttcttctgattgtagaaggaagatcagatttccctcatatagtgttgtcaggattactgagatcatttgggggaagttgctggagtgatctttttcgtgttcattatattaggaaaaagagatgtggacctactaaacgtggcaacatcagtcagtgcctgcaggctctgatggctttgcttctgcaaggaaactcagttccactggattactgtttctgggggccaagtacagttggcacccttcaattctgactccacgtctgcccttccagtgacagtgcttcgtgatgactgctgcagcttttactaaatgaacttccacagtcacaggggcctaggccatgcccagaatttggccatgtagccagagactttgggatatttctgcaattcattcactgctcttcaagtgtgtttttagggggccaggttccctttcagctgaatctgtgtgttttccaaaggaagctcagtgagggcc

SEQ ID NO: 135322 - DNA, 1128 bp, Homo sapiens
catgtggtcccaagggaaggtcatgtctactgacatttatacagtcagggctaacatttaaagaaatcagaacttcacacttagctatatgttgaaagacttagctatacattgaaatgctgagtagaaggaaccccagaggatatgtccagatttgataaaaattaaaaattagacttcagttgggtccatttgctgggagtcaggtgcacgttgtactttctactggggagcttggctggttcctgctaggcctagggagggggagcatgatgttggtgggttggtagcgacagtgttttgtgtcattggaaccatgttctaataacaaatctaccacctttgttcccagagctcattttaaggaactgtttggaacgtggtaccaggaagtagagctagaaggtcaggaagtagagatagaaggtcaggtccctgtggcagctggggccaaatcagacattcacggggtgatttttacaccagttcccctccagccttcccgtggaagtgtgcaatatccagagtagttaaaacatactttggtttgagccttggccaagccacttactagctgtgtacccttggctaagttacttgacctctatgaacctcaatatcctgcaaggtacaagtcccagggtcgatctctgctctgccaccaacaggctctgttacaggaaggccatgctaggggatctgagaggcccctaatagttccagtatttcatggttttatggccccttcttcttcactcattgagaaataaagtgaactggttgtattctctttctcaggagagaaaacagctaaaagtgctcactccttttggtctttaaagattagtttctgacaaagcccgtctgtggcagctgctgttggcgctgtcctttcctccctgatcagtctctgggatgggcactgtgcaggagggctggcaaatgtgtggctctgccttgggtggcctgagaaacagtaccaggcctcccagaacccaggtgcctgctctatcctttgcctcttagagaatgacccctggagccttcctcttctaatagcagcagcaggataggtggggcagaggaccacagatagggccatttggcccaggcctcatcacagaatca

SEQ ID NO: 135323 - DNA, 1622 bp, Homo sapiens
acagactcatctccatcagggacccactagtcacttgggttcccaactcccaggtctgcctggtaaaatcttacaaatccttcaagatgcaacaaagaagtgccacgtctatctaatctctcccttccctctaggcagaattagtcatgccaccttactgtcccccagggcacttagcacaccagggtatcaccacagtgatcagacagcccagttttcactgcattcctgattttagaaattttggcctcgacggatactccctcccagagaaatccattgtcagatctgatgtgctgatgttagggactagaaatcatgggcattggacggatcccagatgcattcatgcacctgccgtctaccccagactgagtttctggaggtcagggaccacaattgtcacctacttccccaagtctagtgctgcgactagcatgtagtaggggctcagcaaatgttggctttactacatgacataatgtttcatgcttgattgtattgtatccacagcataacactgtgaggttatgacccttgtccccattttacagaggagaaaattgaggctcagaagagttaaataactatctcatgagcgaacagctaaccaaggggtagagcatggatgcaaacccaggtcttattcctatactatgtatctgccagcttagttcaagcccaggaatgtcctgaaatgttttgagttagaaaccagagacacttaggccagaggagatctgttgagtaaccattgagtccagcctgtctccagtcagggttataacaacattcaactgagcctttgtttggtgcccaagggcacgttttaccctctcggtattctatcaagacaaattaacacaccctgccctctctttcagagcttctgatttaaagcagacacgtgtacagatggaacgccagagctaaaaaagggactgtttatttcagtctccttgttttaagatgaaaagacctagatcaaaggaggcttgtagtttaccgtggacccagcattgtgctaaacatgttttttgcagtatttcgtttcctaaagtgacaggcactattttaatctatcctcaattaacagatgaggaaaccgagcctcagggggacaaagtgacttgcctaatgtcccagagctaatcagtggtggaaaccggatttaaatccaagccagcctactccaaagcgcctgctctcaatcctgcacccaggccaggtctttcctttgaggtgctgcagtggatgctcactttgcatttagctcacctcacccaccccatctgaaaacaatgctgcccttgtcctctgcactggccaccctcctgcactcaggttcagcccctctttggaattagcaagaagctgctattcccagtactggtggttatttttaaaagtgtgaaataagtgtaaagcaggatattttcagtaaaaatctctccctgcctatacaatgaaatggtaccgaaagcactgacttggagtagatacatggttcatttatgcagagatgaatatagttctcatatggcagcccactgggaaggctcaggtgttctggatgaacaaggggctgagcttcaggggactggatgtgtgctgacattctg

SEQ ID NO: 135324 - DNA, 1162 bp, Homo sapiens
agaaaactacaggctctgggttctttcctgtcagaaaccagagagtgtttgccctcttctgaaactccattttttggtaatatctttgaggatccatctaaggaatgtggttcccctgccacccgtcaccctgctggctccagcagctcagcccaagggattgctgggggattgtgcatgtctttggcctggcttcaactggccatggcttttccccatttgtggacacagccaagggaagcctggtgcctggctctgagacccacatgtaacacgatcccagaagcacttacccgacggcttgtcggtggaagatgggaggctggtgagagtgggcatagtgggcagagggggtggcagcaccttcaggttctggtcactctggatctcgttggtagagatctggttgatgatgcggttgtaggtgggtggttggtagacccggggcggggcagcggggggtggctgggggacgggcctggccgagggcaccctctggcagtgctcctcaagctgcgcgatgatctctgattggttgtgggccagtgtggccaggtgctggtacttgtgctccaggtccttgtacttgctggccagctgcagcatgtcggctgtctggttcaggatcctgttctccagctgggagagctccaacgcgttgtcccgcttgcggatgatctcgtgcaggagctgcatgtagagctgcgtgacccgcgagttcatgttgcggctctccttgcgcagcagcttcacctcgctcacaatgccgccgtccacctccaccagctgctgcagcgtctcgatctgccgcttctgcttgagcagctcattgttgagcagctctagctcctgcttatgcactcggttctccagaagcacctcaggctccttggagttgacgcagatggcacccgtgacccgctgctggggcacaatgaaggtgtaggtgcacttgtcctgggactcgcccgcccgcttgtacctgtttaggtaaatgaactctcttggcgagccctcctcagtgccctcaaaaccgtcctcctggcctgcaacagctcccatggcagccagcagtccgagccaccagcatgtcacgcacagtggcctcatggtccttgcaaaatggtggttattctttgtgaatagaatctatgaaagcctg

SEQ ID NO: 135325 - DNA, 1142 bp, Homo sapiens
cgccaggcaggcagagctttccaaaaactctgcttcaggatgctgggttatattctcttggagtcagagaacaggcagccattctggaagcaagaggagacaggcaagccccagcagaggtagaagggaagagggagggtctcagggcatctgaaggcaggaggccatggccctgctactcccagagccagctccaatgcccgcagcccccttgctgaactcctggcctagagcctgagaatcgtatccaggcagcttcaggctggggaggggaggcagagggagggttttctggtctctctcttctgctacctttggttcctcagactgttgagtctccctattctatactttcacaccccctgaactttccccttgtaatacccatcaccgctgtgctgaatagcagttctgtttgatcttctctgttggattctaactccatgagggcatgtcgtctgtctgattcaaccctgtattcccaggatattgcactttgggcaaatatttgataaacaaatgaatcgttagacatgttatggaatacattcagggtttagtggacaatatcagtggaaggatgtgtccagttacgtggctctggtcactgtgttagctaagctacagagccaaaacaggaacaaacaactgagctcttctgaatccaaatatttgcagtagccagtgacagcacagtcctgaccactgcaacgtgattaagttagaagggagcagaacacagaatgtgtctccagatttgcttcacttctattcttggaccattcatcctttcaccagatgttgattgaacacctgtgatttgctggacagcatgctagtggctagggatacagctaccaacaggatggagccagtccctgccctcatggggctttcacatcattatgccattcccaaatgccagaaagcacaactgtcacatgctgtaaaggagtattacagggaattgacctagagggtcaggaatgcttccctgagaaagtgccctttacactgacccttgaggaatgagtaggagttaaatgggccaagagggaggggaggacacgtgctagatcccttctcttgcccactcgagggccttgctccagcagtcctcaccgtctccccaacatcaggat

SEQ ID NO: 135326 - DNA, 1006 bp, Homo sapiens
cgaccctgggctagggcaggcctgctgggccaacgccttcttcaggctgctcacctgaggcagtgggtgacagacacctctctgtgcccatgtgggcgcagggctccactgtggccaagaaactgccagaggcccaggaggcaacctggctgcaagacaaggttggtttccaagccttcctggacctccagatttgatttgcactatttatggttgagttctatcctctcccaaacatgggctctcacagctccccgacagagttcttgccattgcacttgagacctcaaaggctgagtcttttctgtgaaatgggatgatccaacccaccttgcacactaggtgagcagcatggaagtgcatcagaagcgggagattggaataatgtgttagcaatacgatagcaagaacaacaaagctgaaacaaaaccaacaacagtgaggatgctgggtgtgggccaggcagtgtgccaagcactcacaccatctccttgactaatgcttgcacagggctttagggcttccagacccttcacatcaacattctctcatctaatcattccaacactcagagtgacttactagtgttatgcccatttctaggctgaggaaactgaagctcaaaaaggtgtaggggtagctgactttgaggtcatgttgcgagcagtgggacctcttgtaactacattgattctgagtcctactgttacacctctgtggggcctaggcttagtgggggtgactcagaactgattgggttacaggaaggaagggaaggaacagggcactgtgctgggcgcctgacatacattgtcccaggtaatccggtgggttgttattcacccctgttttatcaacggagacattgcaacccaaacaggctcagtgatttgcccaggaacacacggcagataacagccaaaggtgactgagcctaggacttgggtcaacctgataccaagggccatgctccttgggcttctctttgagcctcagagtcatttat

SEQ ID NO: 135327 - DNA, 1034 bp, Homo sapiens
gtggtggggccacacatcatgtgtccgcatccctctcaccactgtggtgccacagcccaagcaaggggccactttgtgggaagagctgtcattttcatcagatggagctgtgtgttctgccctgcagcagaagctgccggcctgggatcctcttttgagttcaccccaaaggttagaaatgagaaaagttccagcaattaaaagaataacaacaataaattgtcactatggctcaagcactttatatacattatctcacttaatcttcccaacagccctcggaaggcggcctgttatttgagggccgccatgcatggtggccccacttgagcactgtgctactctaggggacacaactcacattcatagtctttatgttttttatatttatattgtagcaattttctgatgcccacaaagatacttttaaggctaacagcaaagctgacatttatccctatttgcagttgaggaaactattgagatttgaggatcgtgagtcatttgcccaaatcacaaattaataagtagtagagccactaacagatcccaaaataacccccaaagataccatactgtgaataaagagaaaccaaagtgccaaagtgactggaaacccaaaagaggttgttctctgaccctctaggcaggacgacgacaggagtgctcttgccgtcattaggcctgcagatcccagggaagcctccaaattaaatccggatctcaggagttgattcatcatcagtccaggttgtagtcctgcctggaggacttacagaaccaccccctcaccacccgtcctctggtcagcactgcccattggtctgtgatcacagatgaaggccaataatgggtccacgccataagaggcatcccagcactgcaggaggcctgagaagcgggcctctgccaaggcagtcagggaatctggaactgccagctggcccctgacgtcggggttctgggaagctagaagcctgagctgtgcttgagtgagtctggtggacctgagcatgaatcaagtttgtgaaact

SEQ ID NO: 135328 - DNA, 1120 bp, Homo sapiens
agtagtattgctaataatggctgtcgtttgttgtgaatttgggtgcccagctgtactctatctcattggctcttaatagctctatgagtaggggaccatacatcctggttggccccagttgaggtctgttgtcttacgtaattattattattattattattattttgagatggagtttcgctcttgtcacccaggctggagtgcaatggcaccatctcagctcactgcaacctctgcctcccgctttcaagcagttctcctgcctcaacctcctgagcagctaggattacaggtgcctgtcaccacacctggctaatttttgtatttttagtagagacagggtttcgccatgctggttgcggtcttatgtagttattaatagcacccccttttcactctcaatattgtcctgactgagcaacaaactatatgatcccattacctaagagaaaggtattatatctgcatttggcagtagaggaaacccaagtctagaaaggttaggtcgcttgttcaagatcacttggaagtaaatatcacaactgggatttagctgtcaactgctaggtccaaaccctgccttgcatcaagattgtctcttcaaccagtatgaataaaaggtgcttgtttgtttaatggctgagatgcagcttgcatgttactcactgttgactgaataagtagaaatagctttcaggtcagcacaagggtgtgttttgttggatgttggaaagagctgcttgatcacgcaagtggtaagaccccaaaatgggcatctgggatgagcagtgacaccctcaccttggagaacctggtgaaaggactgtgcattgtttgtcctggatgattcaccatcagcccggaggccagggagggcatatccagatctccagctgccctcccctcctggctgaggatgctatgaatgattccccaccagaaggcacctggggagtctggagtcaattcccaaacccttctagttcagctctcataagaccattgaatgaaccatttatccatccatccagccctccatcacccacccatttagccttcccatgcagctagccattgtgcattgctactacctgtcatgggtgatgggagccatgagtca

SEQ ID NO: 135329 - DNA, 1028 bp, Homo sapiens
cccctgcctcaaagagctaccgggatcagtgaggcagacacaaacattggttgtcccagtgtttgaggaacaagtccatccaaacagccaaggtggccctggtgccaacttctcagcctggtccagaaaagcagccccaggcaaggcctggacttcccaagaaagtcaccctggggcagtgctgtccacccagcccttgacttctccctcttgtctagggctttcccagttgtagggctccagagcacactaggcactgccggaaatgcagcagccaactcagaagctggactctgaaatggcttctgcagactcttccccgcctctgctctgttggccaaggctcctggcacagaggcctcagtgcacagactttgggggaatctcaaaatggttcccaaataacgcactgtgaaaaagtaacagcagtgtccttgtcccccggaaaaggcaaccagctcccccactccctaaccacatccccctctaccctatgatctcatggtgtgaccacaacccgcctcctccatgaactcttcctggagccagcaattcaccaatggcaggagcacaagagcccaaagcatcaggcagattcgaacccccagtgctactcctccaggcaaatctgtcttaccctgcttctctgactcatggctcccatcacccatgacaggtagtagcaatgcacaatggctagctgcatgggaaggctaaatgggtgggtgatggagggctggatggatggataaatggttcattcaatggtcttatgagagctgaactagaagggtttgggaattgactccagactccccaggtgccttctggtggggaatcattcatagcatcctcagccaggaggggagggcagctggagatctggatatgccctccctggcctccgggctgatggtgaatcatccaggacaaacaatgcacagtcctttcaccaggttctccaaggtgagggtgtcactgctcatcccagatgcccattttggggtcttaccacttgcgtgatcaag

SEQ ID NO: 135330 - DNA, 1370 bp, Homo sapiens
acctcagggggccacagcacagaagctcctctcctgggctaagatgtatcagtgttgtctggtgtaagatccaccagacatggccaccatagtgccagacttggtgatggccattccttgcctcttcctctgcaactccggggcaaacctgactatggatcctcctgattttgtgagcttcccacagcactaaggtagctgcattttcttatccactatggttctgctggggagatcaataggcagacaggcagtgcccatgtgggaagcaggatgcccttcctcctgtaaggttggtattagatccttttgttaatatgtctgcactttttcttagtatggacttctaggatgcaggcatgctgcaggtggccccaaacccaaaccccagacataaagcccccctctcctcaggctcctggaaagccctccagtgtgggcagtgatagtagccacagtattatctctgtctcgtgggattttctgaaaaccctagcaggatatgtccagaacagggaaagaatttgggtctctggccgggtgcagtggctcacgcctgcaatcccagcacttcgggaggccgaggtgggcggatcacgaggtcaggagatcgagaccatcctggctaacgtggtgaaacccgtctctactgaaaatacacacacacaaaattagctgggcgtggtggtgggcacctgtagccccagctactcgggaggctgaggcaggagaatggcgtgaacccagcaggcggagtttgcagtgagccgagatcatgccactgcactccagcctgggtgacagagcgagactccatctcaaaaaaaaaaaaaaagaattcgtgtctctgctcttcccttccctctgtgccagtcctgattgttgtggtttgtaatcatcagtgaccaaggtttgctcagggtttgctgtgcaccaggcactaagccaaggccttcctaggcatgggcgcctagctttctcctagaaagcagtagggtgtggttgagtggctccggagccacaccactgggttcaagtcctggtcctggcacttactagccatgtagccatgggcacattactttacctcagtttcctcacctataaaacagggatgaataataatgcctgtgctatagggtggtcatgaggattctacaagttgagtctggcatagagtaagtgcaatataagtgttagctgttactctctggccattgttaccacctgggcagtattatcccatttcacagataagaaaactgaggtttagaaaggctaagtgttctgccagagccattggctagtaggtagaagagctgggatttgaagccagctcatgaggactgccctactctgcctccatttgg

SEQ ID NO: 135331 - DNA, 1034 bp, Homo sapiens
tcactccctgctatcgcttggagccaaacgaggcatgtccggggcagaacctgtggacatttggtggtgtttgggggcacatgatcatgggctggcatctcgaggacttcatgagtaagcctcactctcctcttttggacaaagagcctttggggtgccggccggcagctcccggcacggcagagcagctgggagtgtgcgtgtgtgtaggtgtgtgcttagagggcagcgtactgaagagctgcagaaggcaggggtggcccaaggacttgggtagtcactttgaagctttggattcctatgcccccaggccgggacaatgtgaggcaaaggcaagcgctgtgctgaggcgctgggagcccctgctcggagagttacaggagctgggctgcctctgctcacaccctccagctggcgaggagagcagaggcacccagcacgggaacggacgcatcacccaggggctgctgcactggatggtaccccgggtctccaactgagtggatgtggccaagatacagggaggatgcggcttccctggtacccccgcaaggggacagcaggggctccacataccaagtcgcctgaaagcactcagtattagataacatttccaaacaaattcttcactgatccttcccttctccttctatgatatgtgtgtcatgggtcagctcttgcctctgctgtaggattatgagagctcccagaggccagttcagttacttggaaaagcatctcctttcaccccactctctggggaaaattgagaatgccacttccaaagccggccaaatgctccccacatgtatttttccaaatggaggcagagtagggcagtcctcatgagctggcttcaaatcccagctcttctacctactagccaatggctctggcagaacacttagcctttctaaacctcagttttcttatctgtgaaatgggataatactgcccaggtggtaacaatggccagagagtaacagctaacacttatattgcacttactctatgccagactcaacttgtagaat

SEQ ID NO: 135332 - DNA, 1010 bp, Homo sapiens
agtgttgacctttggccagtctggcacccagaagcctgccctttcaacctcttcgttatctgcctatgtgatggagaaggctcagctctccaggccctggggaccatgtcattttagacaattgaattggctagaaagctacagggttatctctttcaacatacagtgttttaaaatttgtatttattcttgttatgtttctgcacagacccacacatgcatatgtgcactcgcctccataaacttggctaattacactattggccgctccttggtgactcagtcgtcttgaatagactagcttgactgtgggctgtgggggtggagggcaatgttgacaggagccctgtaagccccaggcagccgtgtttgttggtactttcctagcagcctctcatccctctcctgatttgttgcttctcacccagctgagattccagaaagctgacaagagttatttgtaaataaaaataactggtcactaaactagtctaaagggctctcctgtgagtaaagtaactgagactcactgcctggacttgattacatcaatattgggtactcacaggcctttgaagcttgcaagacctctgttcttatgtaacagccaacagccgccatctgttacacactcaccacatgcctggcactggggaggcctcctgtgtggattacgtcattgagttctcaaaaacggagcctctcaggagaagttctctttgtccgtcttccattttaactgatgaggtagctcaggctcagagtggtgagggagtctacatctacgcagccagtaagcagcgaagtcaggattagacatgggcctgtttgacccggagtccacactcttaacagacttcagtctctacagcttcccagcagtgtgaggttgggcaacttagggaggctcctgaccctcgtgtcttcatctgtaggatcatcctgtttatgtccagaactattgtgaaggttcctggaggtgtgtgcttgagatatgcatagcaggcacc

SEQ ID NO: 135333 - DNA, 1028 bp, Homo sapiens
tgcccggtgccccggaccctcagccccagtccccaaggggagagaagggcagcctagcagagagtgagagtgggtaaagaaagatcctcaggcttctgacactggaaaccccctcttcctggcagcccttggaagcgcagctcagtcttcactgtgagttgacagactcagctggttttgtttactcagcgagcttgagagcatgccgaggtggcgtccccgtctgcagagccgcctttgcctgcaaatatcaccccctttctgctacctgccagccagggctgtgggtggggtggacccagtagggacaagccccaccctgccacccactcacccaccggcctgcccttgcctttcttcctctgccaggctctttctgggcagccccaggtttggccctccttcccggcattgtcagagaagcttccaacacctcaaaatccaccctagggggaccctctccattttctttaacatggaaccaaaactctcctggtttctatgtgtgcagaaacgtttggtaaacagaatgcttaagccgtgacttgctggaaggggcaaatcccagctgacaccccagacactcggcctattttgggcctggtctctgtggtcagagtgtttatctttgggcccccagcacccactgtgggtgtcagatgctcctttcctgactgagtgttggccctgcctggtcccctgcccctgcctcctaggctgctccggataatgcccagtatccccttagtaaatgctcttgtcctcgctcccccccccgtgaatgctgtgattcagcacacacagagaggagcttcacgtaagaaagaaaatattcacggccgccatccagctgcagcaggcgccgggagacagctgccggctcctgcctggccacgatgggatggctgcccaccctccacacacagggggggtctctcctcctttgtttttttaaagacccacagtctcttttggttgctacactaaatgcaatttaaatctgtattccgaacacctctgataagcag

SEQ ID NO: 135334 - DNA, 1070 bp, Homo sapiens
ttcctgcccttgaggcgttaggcctgatggggagtcagatttgaaatacacaaatgatgcaaacaagtgtctgtgtgcggttgtggggtgtgccaactacatgtagagctcagcactgtgcctgacatggtacaagtggaaggtggttattcttacgatttcattatagtttaggcttatacatatctctgttgtggactaatacagtactgaaaagatttctgtggatttgtgcagcgttaactgtaggagacttgctgcttgtgctgtggttttcattgtgggagtgaaaggctgtttatagggaagttctttctaggcattgcctaggctcaaggtctccccacatcactggagccaggaggcttccttttgaggggtgctctacccagtccgcagcaggtatggccttggctcacactcctgggtcttgaggagtaggcaggtgtgggcatctgcacgttttgtagaggggaattatgaactctgtgggcctcagtttgcagagcaccactcagggatccacttccaggaacccaagaggaggcccagtgtccggcacctgttctcacagggcagcacagggtgcacctttcatgttgagggtgttacttgagaaaaggcaactccctctgtgtttctgatgaccagtggatgggaacatgggtgcagcagcctgatagacctgggttcaaattccatcacccttgctgtgaggccttgggcaggtttcttaatctctttgagctttagttttctcctcctactttccagggttggtggcaggatcccatgagacaggagggaagtttctgtcttggatttgatacccagggagcaagttgcctttccccccatcctgctctccagtttctctgcttctaggctgagctttcactctgccactctgagccagctgggccgaagtctgcacattgcgtctggaataaagctgccctatgtcccacatctcttcactccctgccatgcactagaggatgctttttgttgtggttgaagcagtaatagcatttttcaggattgccgttgctgacgcttcagggtggtaa

SEQ ID NO: 135335 - DNA, 1023 bp, Homo sapiens
ctgctacaagctgctacgtggtgccacacctcccctagcccgttgacctgctcaagccactctccccactctctggtgccaggccaacctctgtaacagctcctgctggacacaggaccacagagcccatagggccagtgtggcagcctctcatgagccccacccagtaaggctctgccctgattcccaggggggactccgggctgcttgccttttccagcctctcctggctgcattggacaagccagaccctgcctccagcacccctgggggcctctgatatcttagagagacatgctggttgattctcggggtctccggaaatgctattgtctatacctcaagacagtcctggcagaagcttgattttcacagggtttccataagcccagtattaaaatatctcttgcagtcttccaaatccattgccttccatatgtggcaggtgacccccagcaaaggtggccagaaggaaagctcctagtgctggtcttgtctctactttgtcatttctgccattctagaacaccttccccctcggtcagcattgctccttttaggtgcgcagtcacctacaactgacctgtgggggacgaggagggagcagggcagggttcctatcagaagactgtaggagacagcagttgttaagagctacagaaggaatgctagcaaagactagcctattgcatcgggagatagtgccagaattctggagcaaaatgaaagtggtggtctgtccttccgagtcccctccaaattagtgtgaataagaggcctgtttggcctttgcagcctcttcagttcaatagccttcacaggatgagccacatccctggacttctttaaatgccaagaagtctccatgccacacttgctgtccttcagacagctctggaatacccatctcccggtgccccttcctgctgcctgattccatgctggagccactgagcagggagaggtgggagagcccagggtcaggcacaggatggtgttcgccttggtgtgagccaactctgc

SEQ ID NO: 135336 - DNA, 1053 bp, Homo sapiens
tcctgatgagcagatgccagttgccccttggccaccggcctccatctccatcctgcactgcttcttacattccctgaaataatccacactcgcaaaagcaaaggagcattctggaccttcctggagagtccacaggagagtcggaggggaagattgacctcttgcagcttgaaaatcttcattgcctgtggctctcttctttcagttactcaccttcatgctctttcctgggtcttctctattcctgaccttcatgggcccgatgcttagctcctccaggtcctccctccactcccagctctcacccaggccaaatcctcctactctaatggggagcagactccctctccctcagaagactgagtgtcagcctgcctgggcccagaggccagcacctgccctgaaagagcttcccctcctcggagaccccacgagctgttccctgcagatgccgtaagaacacagctttctctgcaggccgcaccgctcgagcagacagaggccgtggagccagagccaagggtgcaggggaggcctgggccacgcagagaagtgaggtgtgagagaggagagggggaggcttggccgtggtgggggagacagcatttcgccccacagctctgaagcgcaggggccacactcttctattgaagattgccaccagccccctgcccctcaaccctggtaataagcctgcccaggctaggaagagaaatagagccagatgccaagacgaaagccaggaagaccccaggccagttcctccacaccacacacacctctggtgggttgagggcacaccttcatcactaagaatgccactgtcagcaggcaggcaggagtttctattgtctggccaggggtgagactctgcatgcccgtctggtgaatttgccttccctgagtttatgcacatagatgtctcctctttgggtagtagccagagttcaggctgcagatgcccagtaggtccccatagtgttcggccataaagagcttccacacgggagctggagcccactgaggcctgcggagctgctgtactgccctcgg

SEQ ID NO: 135337 - DNA, 1111 bp, Homo sapiens
gagaagtgctgagcaaaagggggaagagccccttagaaaaccatcagatcttgtgagaactcactcactatcatgagaacagcagcatgggggtaaccacccccatgattcagttacctcgcactgggtccctcccatgacacgtggagattatgggaactacaattcaagatgagatttgggtggggacacagccaaaccatatcagggagggatcctacttctactaagaccaagattaccaaggcctcaacataattattttctggggaggttgctctccaacctcctagcccagaaacagggacttagggctttatgaaatgtaagccccaggatacctacaacctaatgtgtacctagaaaatgatggagtgaagatggcctttcagacctgcttgactagtctgaattctcatgatgctgttggctcaggaagtgccctggccacttccacctcaatagcaccacctactctgcctcttcccagtgtcgtgatcttgggcaagtgactctacgtctccaagcatcaggttctttatctataaggtggggataataatagtgcctacctcacagtgttatatgaataaatgagatgctgagcgaatcctgcttagcacattgcctggcacccattgtctcatcaccaccaccaccgttaccaccatcaccatcctcatttcatcctcccacttttactgtcaccaccaccaccaccatcatcgttatcccatcatctcattgtcccatcattatcatcatcccatgaccccatcctcctgctcatcatcaccttgtacaccccttgggactgaagtgttctactttgttgccagtcgatgtcttccccagacccaggttcccacaagctcctggtctgggcaagcctcaattgcctgttgcagtcctccttctgactccacctaagatccctgagagggatcttagtcaaacggccttcctaggacactgtgttcagccacaggttctcagaatgacactgggaaaggtgtctgtggttctgggctatgagcccctatgtcagttaccaaaaaacaaacaaacaaacaaacaaaaactatgatttctggggttcctctgataccac

SEQ ID NO: 135338 - DNA, 1021 bp, Homo sapiens
ggagactgctccactggggccaccaagggaccaggagacctggaggtggccctattctgggagatccccaagcctaagaatcttgtggtcattcggtctcagacactgacaaatcccaggcagcgtgagtgcaggtggggacccacaagtagaggtgcctctgagaggataatgccagaaagggcccccacagtgggtccagtcccaatgacagaccccaccatgtttatgctgccgcctctcccttatcctgaaaggctttatctcacagtgtggtgaggaacttgggctgcagagtcagacagtcctgggttcaagtcctagcttacaaggctcatgccttggtcaagcagattcacatcactgagcctcagtttcctcattgtggggacggtaagggtgctttacacaaagcttcggtggcagcgcgagtgcactcgatgaagttgcaggagcatcagagcatgtgagcactcactacctagtgactgcttgatctgtcaagagcccacccagagacccctggtgtccctgtgctccccgccagtccactcctcactccttgagggaggacatgaggaaaggctgcttacgaggctagcctgcttggaagatgctcgtttcaagctctccatcaacagatgtcagttccttcaaacatctgtgaaatacaaagccacgcactgtctcacgcaaagggagagaatgatgggaagaaggtagccacgctggccaccatgccctgtctcaggtactgtgggaattccggacagtccactggcatcacattctcctcaggtagcggggaaaaagactcacgagaagaaaagtggcaaaggggccagagggccctgctctgggaagggggactccatcctcaactcccaacagtcagcagctcagagctggaatccagcccaggtgaggaggaaacatccctggatagcagacaaagccacaaaggatctcactgcaagaaagtccattgtcagaccctgctcagaagaaatccccggtgatt

SEQ ID NO: 135339 - DNA, 1068 bp, Homo sapiens
gtgcagtatcggaccgtactagatctgtttttagtgctttaatatagaagcacctatagaattatactgctggtttgttttttagttgtttaataactgtatttgagtattatcgatttcctttgtattttatacatttggaaacattattctgaggattgtccacaggcttaaccagacagccaaaggcaccatggccccaaaatggttacaagccatggtccaaagagaccactggagggagccctggaggctgctttctctgcatgttccagctcacctggggccgaccttcccactttagttacccgtgtttacatttctctttatgccagtcaccagctgaccctcctacgtggccctcttcttaactcatggtttctctacccatcaggcaatgtttacaagtttcagactggttcccgatttcatgcaatactgtggcacaagcatttggatgatgcatgtaaaagcaacaggcctcaggtaaagtcatcaaaatcctgcttgtcacctgaaatatcctctcccacccttggaactaagggtctttagaaaacagggttcccttcttctttcagagcccattagccacactctcagataccctcttctgatcagcatcttcccttgagacaaggcacccccttgctcagcttagaactaagcccagctccagaccagaactttgaatctggttcctgtgtctttcccacaataggaaatgccacagaaacacccactgggggatgattatgagcagctgtgatatcaccccaggatcaggttctagcatctatttaggtcatccctgccaagagctgacttcatgggaatactccagactcactaaagggcctccctgccccacaacccttgggaataatgcggctagctaacttactgacagccagccatggaccacgcaaagctgctggtgaaagggggtccctagcttctcagtgtgtttgagccagcaggatctgtcttgacataggccctctctggcctggctcatggtatggccccctcccctggtcgcccccagccgtcccacgaagggtgtta

SEQ ID NO: 135340 - DNA, 1110 bp, Homo sapiens
cagctccaaccgacgtgctcatagtgatcagctgtgcaggagccatgaggcaccaacctctccccgcagggcaaagcctgtgcccccatcatctcactcctttgcctgcactgccagggtggggcccaccaagattcctgatcatgacgggaagctgagtgaccctgaggccttaagcttccccagtcttggccccaaatgcagtcaccagcaagttttccattttccaagtccaagggcacaattgttgatgaccgtgtgacaatagagcgaagccccggggagtgaacggtccaacctctgcattcagttaggagctcttcacatgaatcacatccttatctgtcaccttgtgtcacattttaaagtgacttttattttgcacaaataatttttattcagaataataaatcactctttatcatagtatcttctcttccctcttcccctttagtttggatagcctaactctgagaagttaacccttaaacagttttctggaagagactgaatttctgggtccttgcagctgtgatggtttcagagctcagactgatcaggcatcaagctaccctcaagagtttctgggctggatgtttcagaacaacatctacaccagtaaagtgtaataggtcagtttcaaaacgaccaaaagacccaccactgtattttgaccaaataatgacaacttctttagaaatttgaatggcttggtgaggaaagtagttgtcaccagggcctcattttgtagttgagccttacaatgcttagtagttcatcttctttttgagcaaagactagaatactttcctcctaagagaaactcccaggtgataaaagttgatgccatcaaaccttgacaccgggtgctctgcacacccacgcggatgttgcacctcattctcccgatgactattcaaatcagcatctagaggctgaatgacaatgccaaacactccacctctgatcagaaccatgcagtgttaacactttaacctacattgaatctgattctacctgttaacttttaaaaagtcgtaagtttggatgaaagtgcaagatgtggaacatcaactacctattttccttgggtttttccactctgcaaac

SEQ ID NO: 135341 - DNA, 1366 bp, Homo sapiens
cctgatcctcccacctcagcctcctgagtaactaggactaaactttttgtagacaaggtctcactatgttgcccttgctggtcttgaactcctggcctcagttccccctgcttcggcctctcaaagtgctgggattacaggtgtgagcctccacacgaccctagtgtgctattcttttggttgctcctcaacatttctttgctgcttgagcagaaattcctagtgctttgagcaggctctcttttattctaaaagacaacattcctatgtattccagtaaaaatatgcagtctctttttgttgcccactggaggttatccattactcctgccagaagaagaaatttgtgccctactctgcgctctgcacagggtcatttaaactgttaagctcacaatccaatctgacagacactaaaaaaggcatatcagttagtaatctgttgcagacaacagaatccactctacccaatataagcagtaagggatgttgtactgatccagggaattaagtgtgtacaagtttgttggaagggctggagagccgactgctgtctgagctcccaggaccactctgttctgctgtcttcaggaaaggaaagctgccgcatcatgtcaagaagctgatcaatcaagaagcaaggagatcctggcaccttgactaactacagacccatgctgccgactctgcctggatccccagagccaccactgctacttcagaaagctggagaatcaagaagctgctgactctagaaccatgatactcttgtcactgtctgtaaaaccagaacaatgcttatatcctctcttttgcaccactgactcagttccaagtcagagtctctcatgagtgcatctgacttgtggaatctaaatcacgtccagaactctactacaaaggagttgagaacatttaagttttagctttccaacttttgcacagtggaaggggactgaagtgggtattgagcaagtcattccacagtatctgccacagacagtatttttctccaatcataacaaaaataaatgagacatattgatggaaagttggtcacatagtagccaaaggttccctgtacatgggtgtgctgttgcatagctggcatgcccatgtgggaaccaccttattgggtgaagaggtaaaaatgggcaatccagcctcagttgggtgcttgaggtagactttccaaccataagtgtcagcgattgcatagtttcagcacaaatggaagtaaggacataaatatctgtcttgcattttatgaccagagaaaaaagtgtctctagaagcactgccagccactaagtattccccagtgtcagttccatagatcaagcccgggttgatgttttgcagatgg

SEQ ID NO: 135342 - DNA, 1006 bp, Homo sapiens
tggcagagtgagaccctgtctcaaaaaaattttttttaattaaaatcattctaacagtgtatttatatcattcaacatgtaatcagtgtgaaaaactattaatgagatgttttgaattcatttttatttgtactaagtcttcaaaacccagtgtgtaacacacttcacttgggatgtccctatttcagttgctcagtagtggctagtggctacccagtcggacagctcagcgtcagtcacatggaagctgttcctccgcagggctctgcctgaaactgaagtctcactgggtttcttctcgttccctgtcctgcttcctccactccctcatcggtatcttgagagcactgcttaataaatcttttgcatacaagtattatctttgtaattaaaataaatctgggaggttcaaaagaaaaaaaaaagaaaatgtctctcatcctgaagccctgatttgttatttatttgttggtgtatcactaaggtagccgtaaactctagtgacactgggttttagaagactcagggctcctttgggtaaagaacaactgataacagaaccctggtttcttgcgctttgtcatgagtgggtgacttgagcctttgatgtctatctagttgctgccaagataagtggcctgaagccagcctagggtgagattacctagaagtctgggtcaggtatgcagcatgtggcctgctgggcccaggaaaggcaatgggggaagccaggtcatcatttataagaggaataccagagggacctgacaagagagaagacaaaggggacaggtaggaggttatgtgagtcttgaatccttcctgcattaggcacaggtcattagagtgacttttttgaggttttttgtttgtttgtttgtttgttttgttttgttttgtttgagacagtcttgctctgtcacccaggctgaagtgcagtggtgcaatctcggctcactgcaacctctacctcctgggttcaagtgattcctttgcctcagcctcc

SEQ ID NO: 135343 - DNA, 1041 bp, Homo sapiens
cttgtcatcagtgggcttgcagcacataggacagatagccattactcaaataatcacacaaataaatactagcaatttgtaataagctctatgaaatgtgctgccttgattcaataaacatttacagaatgccttctctgtgccagcaacctactggggatattagagaataatacattttacctaccttttgaatataaatagtatatggaagcaaaaacattacaatgtaatacaaaataaattttaataataactagaatagaattaatacatcagtagactctaaggcctatagggtggtaactgtgtttttatatttactcctgaatccccaggcctttgttatggtgtatgataatactcggatgaatgaataagtaaatgaataaagatgatacaagagaggggtacttagttttccagggggaatcaaaggcagccagatgcaacaacacggttgacttcaaaacaaatgagatgcttcatcaattcaatgcaacaaatatttgtatgcttgtttactgtacccagtgcttttgtgaagcgagttcctagataaggacatggatcagaatcaccagtgggactttaaaaatcatttatgcctgagacctgccccttgagattctgactcagtggatctgaggtgggtgaaggaagacactttgtctgccctcaaggaactccctacttatccagggagacagacaagtcaccaggtcacaccagtgatgctggagaagcagcgtgaataacgtgctaaaggaagccatcacctgctggaggacagggaagagaagggataacagttgagcttggccttgtaggatgagcattgatcaggcaagagagagggaagaagacctctttaaaacaaggatgccacaaagcaaaggctcacatgcatgaggctgtgttgataggcagtaaaccaacagttgttaaaccgggttgcacgtgaaaattacccagggtagctttaaaaacatagaagtctgccctgcccctccaaaattctgagatctagggtgggacata

SEQ ID NO: 135344 - DNA, 1050 bp, Homo sapiens
caggactttgagaggccaaggtgggtggatcacctgaggtcaggagtttgagaccagcctggccaacaaggtgaaaccccgtctctactaaaaatacaaaaaatcagccaggtggggtgacatgtgcctgtagtcccagctacgtgggaggctgaggcaggagaatcactttagcccaggaggcggggattgcagtgagccgagattgcatcacagcactccagcctgggcaacagagtgagactctgcctcaaaaaaaaaattgctgtcagggctgaagaagggtacagtaacatctttgggaacaggaggcatttaggaaagtcttcttggagagaaggtgaaatggaccttgagaaaggagttgaccttccttctttttttttttttttttttttgcgtcaatgttaataggcagagattggggaggagaggattctagatggcgagattggcatggcaaaggcacaaagcagggacactctttcagcgcatttttgaggaataacagctgtcttagtttgcctcttgtgtggtgaagtagtgaaagtctggaaagtcaaattgagggacatattgtgcaagatgttgtactgaatcctggagtcattgggaggtgctgaatggcttttgagacaggcaagtggtggtttgatgtctgctttagaaaattagtttcactgttgtgtacactgaagagcccagttacgggctggactagtgaggcgcttgttggttgtaagtgacagaaacccaactcaaattagcttaggccaaaaagagaatatatgggttcatggaacccaaactaagaaaagggacggatctggcttcagggctgattagatccagggcctcaatgctgtcaagtcagatggttgtctcctattcctttacctccttttctctctttccccgtgcttcttgatgcttgccagcctccctgtctcctactgtccatagtttagtttttgatcttttgagcaaagttgccatgtgtttgagtttgtcaccaaggcattaaacaaatattaggcaattttgttattt

SEQ ID NO: 135345 - DNA, 1015 bp, Homo sapiens
tactaggtcttactcatcctttctattttttcgtactcattaattaaagcttaccactaccccctgtcccctactatccttcccagcctctggtagccctcctcctactctctatctccatgagttcaattattttaatatttagttccacaaataagtgaaaacatgtgaagtttgtattttagaccctttttaatagccttcagaagctttgaaatacctagtttgctcctaagtgtagggctactgtattttaaaacaagtgccagaaagtaagcttttagtttactgttaggaggaattctattcccctgccgttgtgtttccattaagaaacttctgctttactcccatggagaagagaggttggaagggcggctgactcgtcccctgccccatttcctctctcccttttgggatctggttgcccacagagcttgtgtattacttcgcctcctgtttctatgtaggaaaacacacccaagtcttctagaggtaggcgtgggggcccatctgtttccattcccctgttgaaatagtcctgagactatttcccttgcagctgacctggcaggtgcctgcctgtctgcagatcagactctcccacaggagggttgccccagggtgtaaacttgtgggaagtagtaggaagcccatttgcttttggactcagctttgtttgtcaatgaaacactgacagcaaggaaatttcttattttcttctgcttttttcttttcttttttttttttttttttttttttttgttgagacagggtctcactccattgtccaagctggagtgcagtggtgtgatctcggttcactgcagcctccatttcctgggctcaagtgatcctcccacctcagcctcctgattagctaggaccacaggtgtgcgccaccatgcccagttaatgtttttgtatttttggtagagacatggtttcgccatgttgcccgggctggtcttgaactcctgaactcaaagagatctgcctgcctcagcctcccaaa

SEQ ID NO: 135346 - DNA, 1034 bp, Homo sapiens
cctttgtcaaaatagtatataagccccccagtgtaagtgcctttttggatttttatttgttttctgtggaacctccctgcatgtaaaattaaacataacacttgtatactttttctcttgtcaatttgtctttttccagttaaatttgcaggcctcagggaaagaactaagagggtagaggaaaagtttttcttccctcatggttatgttcctaaagcaacaaaattgtagactacagcaaattctggcttgcccctagccatctacagagaccttttttcttctctgttgttgatgagaagcatggatacacagcctgtttattcaaatatttattgtgtaagctggacaccacaataagtgcttcatacgtcttttttcattaaatccaatgggaaggcactatgatgataaatatttgttgagttaatttattaatcaaaccatcaaaccccattatatagttgtaggaactgaggtccatgaaggcgatgtttattgcctaagatcaagcagtgagttagtggtgactcagacacggctaagtagataccaagcaacatttatgcacatataatttctctacacatgtagatatttatttaagtttaagttcaagttctatattttctgtatgtgatctttgttttggaattttttgttaagctataatttacatgcaataaaatgcagatatcttaaatatacagtgggatgaattttgacagttgtagctgattgattttttaatgttatggtgtcagtcagttccacttaattgcattatctatgtattgagaaacatcaatctctagacatggggaatgtcatcgtgaactgacagctagtgagccatgtcacaatctattcattatgattgctcccatagtattttctttgttcacttatattagtggcattgtattaacctctgaaatgaattttttgagatgaacctgaggcaacatttatagcatttttatgtctgactcaaaaacaaatttcatgaatatgctgtataaggcagttcactt

SEQ ID NO: 135347 - DNA, 1121 bp, Homo sapiens
tgctggccctgagtgtgaccagtaggatctcctgcccacctactgccctcccacccatgctctcctcaggcaggtcctgccagcatgagctcagggtgttggtgtgaacctgcatggtttgattaagttactgcccaaccgactttccccagcctgtggtgcttccggttatctggcctgcccttcactttggcctttccttcatgatagagctggtagaatttctttgacatttcttgcatgattaatgaaccttctctgctttccagggccagtataggtcttacccctgtttttatatccctttggccatttgcaatagaaatttggcattcatctattcccatatttcttgtttatgaatatttaatgagaccgatactgtgtcaggtgttatgcttagctctggagatgcagtggtgagaacaagtaaatgtagttgctgtcttttgaagtttgctggagagcggagagagcgcctgaggaaagacaggtgggaaccaaataatcatgcagagaaatgtaaatcacaactctgcagagtgccccaagaactgacaacagggtcatcttcccaggcagtgggtcagggaaggtatacagaaggagggggactttggtagaactgaaggatgagtagtagggttttttaggggaaggtgagaaaggagggccttccaagccaggaagtcccaagcatgtgtccttcggtgagaagaagtggggatgctggaatagaggtgggattgtggcacagtcatatttgcagtttgcataatcacccaggctgcaggcttcgttgtgaggagccgcttggagaggagcagtggtagatgggtgtatagactcagtaggaggtggttgtggtcatcaaggtgacagatgatggtgacttgaatgaagatggggatggtgaaatggtaacggtgatagtcaaacccattagcatgagctctgtctttatggatttcatgagttcaaagggagctgaatttctttttaccatcaaatcgttaaatttgttcttcctttttttcttgaactttttaagcaagacaagcaatatgcttcctgttctaaactcaacaaatgaaaagagcattattacgtatgcctgtgtc

SEQ ID NO: 135348 - DNA, 1024 bp, Homo sapiens
ctttgacaaagaaatttaacttctaagaattatcctaaagaaataattgaataagtaagtatgcaaacgtggaattagaagatgataaattttatttacaataacaaaaattggaagcagcctaattgtccagtattattagttgtatctatataataaaagagtatagagccaataacacaggattatatttattgacatgtaaaatagttattggcaaagcaagccacaaaactgtatattcaatataatttcatcttattaagaaaaatacgtatgtatatgcatggggaaaaaaaaaaacagaaaaaacctaccaaaacatggattaattctagatgaattgtgcctgttacaggggtaacaaaaagaagggggttcctctagggggcaccaactcccaaatactgtggaagtttcagcccagaaaggagaggtacttggtacccattttaggaatagctgaactcaccggttcactggttatttttcctacaccccaaaggcctcctggatgcttccacgatgtgaatttagactgggtgtcttttctaatgagaacatgcagccacagcccttgggtgtatgcttttaacaatgatttttctggttctttggccgctggttcattgccaggttcatgtttactttctgaataagcctcttaatgtcacaactttgttccattacagaatgcaactgccctgcctggtacttggcgaagaacagacgtgcacttagagaacccagaataccacaccagatggtatttcaaatattttttaggacaaggtaattatgctattgtggtggtagggaagaaagggtattcaaaatggaagttagtgttcatataacttctggtatcctatatgagtgaaactagccattttaggaacactaacatcagggcatttcacttcaaggtcagtagtaagctttgtaggctaaaagattcagagtctcagccctaagagtttttgctcatagtttcctttttttatggacagtcatttttatccct

SEQ ID NO: 135349 - DNA, 1066 bp, Homo sapiens
cacatccgctatgagctataggtcagatgtgaggaggcaggaccattgccataggcctgtgtgtgtcatacttctggtcattaacatttgcagccactgagttgctacccttctccaagttcaaaccaggtgctgcctggacttaagattcccgtgcaaggccatgcccgggaaggggcctctggttcaaatgctctgaggtgcctccaggtcttcccttgacagatttacagcatcccacaatgccttcaaagcctgtccttggcatgggggcatcaagagccctggcatccacctcttggctggcctttcttccttcaccccttccttcctccctccctccccctccttcaccctccccctccctccctccctccaaggcaggagagggtgggtttcccccttcttctacttttctggaatggactttctcaatgtccatatcttcttcctccaggaagtagcaatcacatcctcactgagatggctgccatgtatgaggagagacagagtgggacaaatgcagggggaacatttgcttattttaatttccaaagatactgtctatatgacattataagttgtgataagcactctgaagacagagaatgacagagcatgctacaggagccccacttagatgagacagtttagggaaagcctcctgaggcggcgcccaggaaacagaggcctgaagatggaagggagccagtcatttgacgagtagaaggggaatcagagagtgttccaggtagaaggagcaacaaatgtgagacaaacaagggttactcatacctggtattagagaagccaaggaggtggaatttaaatcccaggactgctgtgaaggcagcataggggcagggcatgatgagaagtgccagtgccttcacccaacacctcttcccttggccttcagttatgtgccaaggacaatgagagggttctcagctgttgatggaagtgctgaagggagggaggaactgagaaatcaaaactgagcattggcacaaggggtcagttattaagcccctcttggcctgaaactagtgctagaggctatggg

SEQ ID NO: 135350 - DNA, 1047 bp, Homo sapiens
tcgttattatttttaactttcacttataaatattggaatattagctgaaaggaactctagagatctatttcaatctccttgttttacctctataggaacttaggttcaagggaatttacgttgcttgtccaaagtaaaacattttaaaaagtcttgttaaggatggtcttttgccctatgtggcatagaaatttcagttaaatcttaattacattcattacttttagtaaataaaaataagaatctagaagaatagccaaggttacctgaaacagatgttcctgatttctctctccctctcttatgagtatcactaggagccagttatataagtcaagtacatgtggtgttggttactttcatctgtttgttcattgataactcatttgttgatttgtatcttctgagtgtcaggccctttagggaaaacagctgtgattttctagaagctcctttttagcttctctgatgctgcagctcatcctgtccattctatttcagtgccatgaatctggacaaatttgagaaaggccccagggaaatttttcatcctgaaatacaaaaggtaacagaaaattttatgcttcataattgtacaaaattgattacagtgttaggatagaactgacaggtcatcataatccttatcctgggatgcaaagccaaatcacctatgcaactttaaaaaaatcatcatgggagaacctcacacctaaggttctgatttgatgggtctatggtagggcctgggtatctgagtttttcagaagttcctcaagtgattctaatgcgtagccactcctgagaaccgcagaactgtcctcaatccacgaaccaatagggtgtacattcagaaaaatcttattggcttaaaagctaccctttttactgagtaatatagaattgtgtggaacattaaagaattttttttttaatcgaaatggagtttcactcttgtggcccaggctagagtgcaatggtgcgatctcagctcactgcaacctctgcctcctgggttcaagcgattctcctgcctcagcctctagt

SEQ ID NO: 135351 - DNA, 1047 bp, Homo sapiens
ttgtaataagtttacaaacttttatatggggtgactaagaatgaaaaggaaagtaatttaagttgattaaatctccgttgtgtaccaggtcttccacacacgctgacagtgatcttcacaggggttaagacagaaggaaggagagacccaaatagattaaatgacttatgcccaaacacagttaagaatgcgacagcagggattcaaaggattgtttaggtttgctgctccatgctgctcttacgagatggtcttataggggaaaaagatccaagactcgtggcacccacctttgtcatagttgggtttttttcccccaaacaaagctcctataaccaacttttaaaattattttcaaaatgtcagtgtgagcaaaccaaagcttggctttcacagcaagtcaaaatgaaataattactgttatgcctggatgtaacttttaaaactttatttgacaggacttgctggttcttgaagaacaagaggtgagtaattctatggagatatttgcacctgctctgcctccatgtttgtaaatatatttctcctttcactgtgaacccagcctttgctttcagccaaatctccatgtagatttgcacagtgggacacattgcgcggaaagaacttactggcatgtatttttaaggtatattttagaattttctatgcatctagctataaagctatgaaaacaatcaaactacttaaatctgcttggaaacatttaatgtgttaagcttatgatcagggtgagtaatgaggttttaattttcattaaagtagggtgtgtgtgctttattaggatgctcttaatatacaaaatgctgaatttatttgcatgttgccattccctgttgcccccattaaaaatataaatatattggattttctaagtatataactaacatagggaaatatctaaaatattatcaataggcaatggagtaaataaattatggtttatgtatcttatccctctcagtaaatagcagtatcttttgtcttgttgctcaggccaaacttggaaaaatccttaatccatgt

SEQ ID NO: 135352 - DNA, 1009 bp, Homo sapiens
tgaatgtctgagcaagacttacatcctgagaaaaccagtacctgtgaattccctccagcagcacctccctccagggacccaggtctggccttgagaccttgagagctctgaatggctggttaaaatattatctgcgacagtccacttgcaccagatcaaactatcccctcctaaaatatgaaatacctcattataatgagccataccttgatttctggagataggtgaaaactgttagtcatggacataatttgggaagtcctggacaccatattacctaaatgaggctgtataagtaggttcaagtacttaacaagtacttccagtctttctggaatctccacctgaaacaggaggatttcatataatttatcatttaaactgggaccctttgagagtaattactaataacatcaggacaacagataaaacagatataagctagggctgtcttggcaaacttggacacatgatctccctaccttgaagatcctacacccttgggtgcacaggtacttaaaagacccccatcatgcaacccttgctgctttacagactttgctcttgtctgaccctaataacttgtgatgaagacttgacaagaccttgcaaaaccagtctttctggagtctccacctgaagcagaagaggtcctcagcaggggtatggtagcatggtgccagtctcagagcaatcctataaaaccttttaaaagcattggccagtgatcaggtggtagtaggccccatctctgcttgtacatctcagtttcacttgaaacttttcagagaagattatgccatgatactggaaagaatgctggatcaaaagtcagaagacccaagttccagctccggtcctaccgttcacttagttccagccatgcgcaagtccctgtcttccctgagcttccctgtcctgtcttaaaataaaagcatggactcagtggactatagggtcctttctggttttagcaggctgtcagtttatggctcagagttatggtcat

SEQ ID NO: 135353 - DNA, 1105 bp, Homo sapiens
catttgtaccagctactgcttgcttggcttgggcttgctttttttttttttttcacatctgttttgtgacttcttcagattgaatatctttaggaattggggaaaatgagcttttagtataaattgcctataattttcatttctgtgtctaaaagagtccacaatatatcagcctgagattatgttaagctttgaattacaacgaactcttcttcgctgactgggatttggacggttgctcatgggttgattggaagatggtgccaggcctgtgagttcctgtggccatttgttggaaccctgttttgccacagaacagaactggtatcctagagatgccattagtaatgaaattacaaatgaacgaattcataaaagcatacagtctcatctgtaagctataaatacctatcaaaatgaaggaatgattgttgttaacattggtcaataacccagatggatgggaggaagggatcccctgactgtccatcctggtgactgccattgtgctaagtcacgaacagcccatctcaaaactatatacgctgtgatgataaaattaactgtaacaccttttgttattatcctaagggctctgtgaatttcaagtttggggttctttttgccaaagatgggcagctcactgatgatgagatgttcagcaatggtgagtgatctcctcccgctctctgctgccagagaccctgtcctgccttgttgcattcttgccagttggagcttaacttgtctgttgagttggagtctttaatacgaggagatagttttacacaatttcagcgtgaattttgtagggcagttgttgcccagtttcattcatttggcaaatatttattgatcacctcgtttgtacccagtcactgttccgggcactggagagacagaagagcacatgggatttggagaatttggttctacacagtcccaagagcagtggaagatttttctgtgatttttatgagaggaagaattataagatggcgtcatcttcctaatatttagcacttttcgtgttaaatacctgcttattctgaacgcaagcagtaataacatttttgttttgcgatagtaaacacctgtggtccca

SEQ ID NO: 135354 - DNA, 1035 bp, Homo sapiens
agcttgctagccgcacgccctggcagggctgcttggtctatgccctccatgaagatactgctttccagcctcctgccaggtatgctgggcattgcagctgctttgctggctgcctcctgtccccacctgcaactcctccccactacagtctttgcctaagtctgtcactgttgccgtgcagctctgagacatctagaatgcccctctcttcactctgtccgtcctggtcacctggcctcaaggaagcattgactgagcccaaagcctcactgagtcctacgtggacaagtgttacccaacctccaatcttaatcctactccagtactggcccaagccagtccctcaggccagggcaagggacaggcacatgttgtttctcctctgtcttcctgtctccccagtcactccttcacagtcccaaacatgacttctcctgcacagaaacagtgccaagcatgagtgtcagttctagtcaccagaaacatccaagtcctggccaggctgtttggtagcctctcttccataggaaacccctcccttccctttcagagaccttggcatgattccacaactttgtcctggagaacagagacatgaaagacacctttgctgaggctccctctgctttccagctgggctgcctctcttcccagctggaccaccagcgttgttacctcccatactccaacctataccagggtccatgggtgatgtctccctcgacacattagaggcagcagacactgcaaaccatgtgcaacagatgatgattttgtctctccctttccagtatttatactcattatttcaaatgctacaacaaggtcccaaactcagatgcctggagagccaggcagggagcatgagcaagtgaggcgggctgagtggaggacagtcaggagtgctgggagctgtgacacacttgagagcatgtgctcactccatccagctgaggcctttcagagcatgcaccatggccagggttgccagatactctgagttttcaaatcaagccagaaagctgaaattgtatg

SEQ ID NO: 135355 - DNA, 1049 bp, Homo sapiens
gagtttatatcttagctctaccctgtgtaaactttgtgatgacttttaagcctcagtttcctcatctgtaagacagaatagtagctgtacctaccttataagtaggattcaatgagaacagtgcctagcacatgttaagtacacaaatagattagttagcaattattaatactattactgaatcccaggacaggaccagacgacataagggataaagcagaccatactgttgattgcattttgtttaattgtttcctggcctcgaccctttccagtagacagaggcctgagtcttgaggacaggttatgggaaggagatgtcggatgtgacccctggcactcctctcttgtcccttcttccctgtagcacggggctctgcaggagcctggagagggtgccttctctgtaaggagggaatgggcagtggggcttggcatggagctggctgctctgttctcacccctgtctcttgtatcctcaccaaccacacaggagatctgtctgtctgactctcccatggtgatgaccttagtggatgggccagctgaagagagtgacaatctcatctgtgtggcttatcgacaccaatttgatgtggtgaatgagagcacaggagaagccttcaggctgcaccacgtggaggccaacagggtaagccagcggttgtggggacaagtgagaatcagaaaagagtaatcatcgttgtgtattctaaccctgacatgccatgatttggatttctttaaaattatgtactattcatcacatcagtattatgtgattcactatttagactgagccatgtgaagttaccatttttataggtcagaatggttctatctattatcatgtgactgtcccatttgccctgtttagttttcagatctttccttgccattccatccttccgaataaaagagatatgaaaaggccgggcacaatggctcacgcctgtaatcccagcactttgggaggccgaggcaggaggattgcctgagcccaggagttcgagactggtctgggcaacatggcaagaccctgtctgtat

SEQ ID NO: 135356 - DNA, 1044 bp, Homo sapiens
ggttgttctcccagacggaaactccgccccacctgtaccttggaccgctccgccctaggggcggttccagcgcgcttcgctaatcggttctatgctcccattggtctgctttaatgtgaagggcgggtcctagctgattcgctagccccgccttgcgttcctattggctgctcctgctctgcggttccgatcccgcccagcaccgtcccccaccccccgccgcccattggctgcgagaggccggtgcgggccgcactcgcagggcccgtggcggttcaggcgccagagctggccgatcggcgttggccgccgacatgacgcccgaggacccagaggaaacccagccgcttctggggcctcctggcggcaggtgagctccggggaacccgggcccggatgcggcctcgccctcccgcccctccgcgtccgctccgctcaccctcggccctgtccccccagcgcgccccgcggccgccgcgtcttcctcgccgccttcgccgctgccctgggcccactcagcttcggcttcgcgctcggctacagctccccggccatccctagcctgcagcgcgccgcgcccccggccccgcgcctggacgacgccgccgcctcctggttcggggtgaggccccgggctcgctcctcccgccctgggaccccacgccctcctctcgggacgggcatcgggaccctccgccccccacccttcccctcgggacaggcatcgggccccgccgccaccacctttccccacgagacaggcattgggcctctctgccccccatcccttccctcgggacgggcatcgagcccctcagcccccacccctcccctcgggacgagcaccgggcccctcagccccctacccctcccctcgggacgggcgcggggccccggctcttttacctctgagcccgcggggagtgggtggagggggaggatgggctgcggcttcggcgccccctcctcagcagccgcccgcctccaggctgtcgtgaccctgggtgccgcggcggggggagtgctgggcggctggctggtgga

SEQ ID NO: 135357 - DNA, 1834 bp, Homo sapiens
ccttgggtatgatgcttaccttctctgagcccgcttctttggctgaaactggaggagagtaacagcagcttgctcttaagacggatgggagcattaattcagttcatcctgttgctgccttctcacggatggactggcacaggtgtggcccctgtcccggggcttcccagccaacagagagacagttctggggtagatgatctggttgtttgttcagtcatttgtgccctccaggtctcctggcatgtgccatgtccaggcccattcaaggcgccagggagagcaatgaacaagatggacagggtcccctttatgacaaggacgggaaaggccatggcagtggtgggagaatgaaccccagtggggctgggttaggatgtggtggggcgggtcatgaggggccagcctggagtctgtgcagagcttgggacccgcttaggcaggactgcccggggagcacatcgagggggccaggccgatgcctgggggtggagattacttgctgcagctgggaggggatgcgcagcaaaggaaggaggaaaagaagccaagaaggaggtgacaaaggacctaacagtccttttttaggagagaaaatgtccaagaggccaagagaaggccttcgaggagggagagatcgccaggtcccagaggaccaggagctgagaagcacctttttagttctggcacgtgggaggtcacagtggtggtggatggcagggacaggttctgactgaaggccccatgtgctcctggggccatgctcgctttgccctgtctcacccatttccaccacactatgaaagaacccaccgggggcctcagggtggggccaaagctgagggtggagggttggtctgtgggccctggagtcagacctggaacaggagcccagctgtcactggatagcgggtctctggccttgaggcagtcacttcattgctgtgagcctcagtttccccagccatacgacctcggtatcttggacagtgctcggcccaagccaccagactggatgccagactatcctccatgtcccagagctgggtggagataaaatgggtgtggccttgggcagggcaggctggggtcaggggactggaccccctggtggcagagctgtctcagtgatcgcgtggggcttcctgatctctccccgcgtccacccatggcctttcctctctctgcaggaggtcctcaggccctatggagccttctggcttgcctccgctttctgcatcttcagtgtccttttcactttgttctgtgtccctgaaactaaaggaaagactctggaacaaatcacagcccattttgaggggcgatgacagccactcactaggggatggagcaagcctgtgactccaagctgggcccaagcccagagcccctgcctgccccaggggagccagaatccagccccttggagccttggtctgcagggtccctccttcctgtcatgctccctccagcccatgacccggggctaggaggctcactgcctcctgttccagctcctgctgctgctctgaggactcaggaacaccttcgagctttgcagacctgcggtcagccctccatgcgcaagactaaagcagcggaagaggaggtgggcctctaggatctttgtcttctggctggaggtgcttttggaggttgggtgctgggcattcagtcgctcctctcacgcggctgccttatcgggaaggaaatttgtttgccaaataaagactgacacagaaaatcaggtcagtgtctctgggctttgtgcaagctcagtttgaaaagggtttattcccatcactgcccaggacaccctgtggctttacttgct

SEQ ID NO: 135358 - DNA, 1079 bp, Homo sapiens
ggagcagtggctcacgcctgtaatcccagcactttgggatgccgaagccagtggatcacttgaggtcaggagtttgaggccagcttggccaacatggtgaaaccccgtctctactaaaaatacaaaaattagctggacttggtgtcgggcacctgtagtcccagctactcaggaggctgaggcaggagaatcgcttgaacctgggaggcggaggttgcagtgagctgagattgcgccactgcactccagcctcggcgacagagcgagactctgtctcaaaaacaaaacaaaacaaacaaaaaaaaacaaatacaaggacctcttgatcttggggacagcaccaaattctggatgtaaaattgcacttgtagagtaaaagaccaaatacagttgatctaggggtgaacagcagaggtgttggtggttaagacttaaaagaggttgcctgcttacacatttgttctgtaccacattcagggtgctttcaaaagtgttatttcatttgagaattacaattctcagaggtaaacaaagtagttaacattattttgtcctttcttccatggagaaatacaggttaagagacctggctggtacctcacagctttcacaagaacctgtgccttctaactgcaaattcccctgtcctccacaacttcacaatcctactgggctggcctgcccccaaactttcccgggcttccaggcattcctggctgcttcgagaagggctagaaggagaaaagtgacagaggagtccccaggaacccacttctccctactctccactgtcattggtccatctgggcagactggggtacgtggtacaatactcagaaatcacgcagtctgaggtcctcaaacttttttgacccccgaattctttactcaaaaaaggactgtaggggcacatgttctcaggatctcctggggctgtgtcatgggcaaagaaagaaaaaatgattgtctccaactacctgtaggagagataaagagagttctgattcggctcacacagcggcagtcgtgggcaaacgaagcagcagccgatctcttgacaatcgctccctctaccactc

SEQ ID NO: 135359 - DNA, 2541 bp, Homo sapiens
aaggtgcccttaggtacttgagatagcttcctttgttgccaagtgagaagtggtgggcaggtttcaaggctgtggttcacctctggacaccatgttgattacatgcctttatttctagtctccaaaaaaagttggtgatgacattgccaaggcaacgggtgactggaagggcctgaggattacagtgaaactgaccattcagaacagacaggcccaggtatttgcttgtgcttggtttcgggagaggagggtggggggacaggtagcaaccctctgggattcctgaagagtatttctgccaccagtggtgagccgagagtgatttcaccttgttggggaggctttgtcaagagtacggacctagggcaaagacttggacagtgtgtggccatgatttttgagagccagcgtgcatggcagtattcactggaggtggagtattcactcaggaatctcttctgcagattgaggtggtgccttctgcctctgccctgatcatcaaagccctcaaggaaccaccaagagacagaaagaaacagaaaaacagtaagttgtcttttccctagtttggttttggtaatggtttgtgagatgtttgatatatgtggctgtgttttcccttaaaggaaacctggggttgacatgggtattgggtgttgatatggttagggctgctagagccaggtagtatgaaaaagtgccacgtatgctgggtggctcacacctgtaatcccagcactgggaggctgaggcgggtggatcagttgagatcaggagttcgagaccagcctggccaacatggtgaaaccccatctccaccaaaaaatacaaaattagcctggtggtgctcgcctgtagacctggctactcagacggctgaggcaggagaatcactcgaacccaggaggtggaggttgtagcagtgagccaagattgtgccactgcactccagcctgggtaacagtgagactccgtctcaaaaaaaaaaaaaaaagtgccatgtagtccctgtgtggggcaggccccaatcagtgcatgtgggaggaagatgtcagcaataatgacctataatcaggagaccacatacaggtggcaggtactgggcagtttaactccctggcaatttaagcttgtcatttctctaaaacagtttctgccatgtcagatttgtgaaggcttggttttgccctcagccacccgccactgcacctgaccaggtctctgttggctggtgcaatccagtggtgagctgatagtaaaccccagcttaggaaacagggttgttcttcatgtggatgactctgtgccgaaagcatgggaacagcctagaaatgaaatgaaggacacatgatctgctttggcttcagactttaaaagagcttttgctgtttcctcttctgcagttaaacacagtgggaatatcacttttgatgagattgtcaacattgctcgacagatgcggcaccgatccttagccagagaactctctggtaagagcaggacaacatgtaaccgccataactgtagttgtgtttttcactgagtgataacattcttcttacttgaagggtgctcagtgagacccaagatggggtgcagttttctgggactgaaaggatggatcgtaaattggatgtgtttaatctgggcatcaaggacccatggaagctttgcattccgggttatggaactagatggaactctatattctatattaggggagcaggaacctcattccttccattgcctgctatgaaccccttcagtattccccagtatctgcagattgtgagggactgagccagcacctccaatgccaccatttctttacttaaaggaaccattaaagagatcctggggactgcccagtcagtgggctgtaatgttgatggccgccatcctcatgacatcatcgatgacatcaacagtggtgctgtggaatgcccagccgtaagtgacattttcattgttacagtaggggtgaaaggggggccacccagtgtattcacagagataagctgggaagttttggaaatggttactggtggggtgggataatccttttaaactttttactgattttttttttctttcccacagagttaagcacaaaggaaaacatttcaataaaggatcatttgacaactggtggattttctggtgtggcgtcttccttgagggagctagctcctttgtggggtggtcagtggggtcagggtggcagaacctgtggagaagtaacaagcaccttgtggtgggtaacaaaactgccctgtatgggctgggctgagctcagaaaggaagcctttctttcctttttttttttttgagacagagtttcgctcgttgcccaggctggagtgcaatggtgcaatctcggctcaccacaacctctgccttctagattcaagcaattctccagcctcagcctcctaagtagctgggattacaggcacgtgctaaaagacagggtttctccatgttggtcaggtcaactcctgacctcttgatacgcctgcctttggcctcccaaagtgttgg

SEQ ID NO: 135360 - DNA, 1061 bp, Homo sapiens
gtccctcacaatctgcagatactggggaatactgaaggggttcatagcaggcaatggaaggaatgaggttcctgctcccctaatatagaatatagagttccatctagttccataacccggaatgcaaagcttccatgggtccttgatgcccagattaaacacatccaatttacgatccatcctttcagtcccagaaaactgcaccccatcttgggtctcactgagcacccttcaagtaagaagaatgttatcactcagtgaaaaacacaactacagttatggcggttacatgttgtcctgctcttaccagagagttctctggctaaggatcggtgccgcatctgtcgagcaatgttgacaatctcatcaaaagtgatattcccactgtgtttaactgcagaagaggaaacagcaaaagctcttttaaagtctgaagccaaagcagatcatgtgtccttcatttcatttctaggctgttcccatgctttcggcacagagtcatccacatgaagaacaaccctgtttcctaagctggggtttactatcagctcaccactggattgcaccagccaacagagacctggtcaggtgcagtggcgggtggctgagggcaaaaccaagccttcacaaatctgacatggcagaaactgttttagagaaatgacaagcttaaattgccagggagttaaactgcccagtacctgccacctgtatgtggtctcctgattataggtcattattgctgacatcttcctcccacatgcactgattggggcctgccccacacagggactacatggcacttttttttttttttttgagacggagtctcactgttacccaggctggagtgcagtggcacaatcttggctcactgctacaacctccacctcctgggttcgagtgattctcctgcctcagccgtctgagtagccaggtctacaggcgagcaccaccaggctaattttgtattttttggtggagatggggtttcaccatgttggccaggctggtctcgaactcctgatctcaactgatccacccgcctcagcctcccagtg

SEQ ID NO: 135361 - DNA, 1158 bp, Homo sapiens
ccagccgtcagcctcaggcgcctgcccacaacaaacatggcgacaagggcgtctctggaaggccgggcagtgacgacagttctcgcgatagccgcgttttcctgcctatatctggcttgtccgcgcgatttccggcctctcggctttcggctcggaggaggccaaggtgcaacttccttcggtcgtcccgaatccgggttcatccgacaccagccgcctccaccatgccgccgaagttcgaccccaacgagatcaaagtcggtgcgtgctctggttgtggccggggctgcgggatggagcatccctcggccctgccgcgcgtgcaaagctttccccgtatggggctcttaaagccgctgcctcccagagaccttcccggtgttgcgccgccccggccaagcctcagcctttctgggccttagcttcttcacgtgtaggtggggagggaggactggaccacctgtggcggcttgggagcccgcacgccctagggtaaggcttgtctccgggcgtttcgccccattggcctgggttagcgggcgacggggctctctccacgcctccccggtgtgagtttcggagctgcccacacccgagggaggagcgggtggcccgcctcgcgctctgtgctgtttcgagaagaggcagagggtggcgtgtccaaccccggaaagacgctgagagggctgtggctcggggctccctctgcacagacactaactcttcttttcccccagtatacctgaggtgcaccggaggtgaagtcggtgccacttctgccctggcccccaagatcggccccctgggtctggtacgttatcccctccaaggggcatttttttcacatttgtttcactttaagcgccggctcgtggagtcacgcctgtgccagaggtgccctcgtggcttggactgtcaccctcagtaggcctgagccactgaacaagtactaggtaccttaggaaggtcgtgtgtgaaaaatcgaacctggtgcctttaaattgtaattagctccatgtgtctccactgctgctttagtgtacctgaggggtgggcccaagggggagttttgaagttaggactggcttagagacattgggcagccaacatctgtatttcctcgtcaggaagtgggcatggcgttgttgggagattaaa

SEQ ID NO: 135362 - DNA, 1096 bp, Homo sapiens
ccaagaagccgtgtccgtgtgaccctccatcagctctgggccatcctggccgggatccacaggctgccccgcccgggagccattgagcaggagggcagccagtctccgggggtcgctgtaaatggactgacccctgctgggtcagctgtcttcatggtaaccagagacaggctgtctggagggttcctgtggctcctgagagccagggccgtatggccgtatggggaggagggcagctgggccccgagcctcagtcactcatatttataatggtgagtgtagaggactgatggggcgagagctcctaaggagccgcagtaaggttctgagcagtgcttccacctccagcgacgcaccaagcctcctgaggagtccactgggcaggctgagggcagtggtgccatccccagtttacacacgaggaaaacaaggcccgggaaatcaagtgtgacttgctcaagaccaccccgtgggatggtgacagagccaagaccactgcacaggcgccttacccgcaggagcgctctgctcgccacacccagctctctcccttctcctggctgtccttaagcacttcctgcagagtgcctctgtttatcaactgtaacatatgagtaatgagaacaacagtggcgccccattgctcagccattacagcatgaggggccctgtgcggaggacctcacacatcatctacctgaacctccaatctccccgtgttcttataaggctgggtggcagtgtcatccccattttccaggtgagaaaactggcacaaggaggcaaagccagttgtctaaagtctcttggctagtaattggtggagtggggacttgaactggaactccaccttcttgagcctaggaaacctcagagcccaggatctgttgtgtgccctagaggtcagagtggctcccagcgggcatcaggcaggaagctggtgatggggatttggggtgttgagctgtgctattggggtctctgcagacaacaagctgaaggagcttccagacaccgtgggggagcttcgaagcctgcgtaccctcaacatcagtggaaacgagatccagagattgccgcagatgctggctcacgt

SEQ ID NO: 135363 - DNA, 1055 bp, Homo sapiens
gggtgctgaaggtgagcggccccacgccctgccccggaccgtcctaggcgaggccgagccccgagcctcatccccggccaccaccaggattgctgtccctgcaaggaggcgccatggtcctcttgtgcggatgaggactcggaggcttgggtcagaccactggcctcgtcctaccctcagggccaatggagcccactgacctgcagacccccgacccccttgttccctgcagaaatacgactacgacagcagctctgtgcggaagaggttcttccgggaggcgctgctgcagatcagcatcccgttcctgctcaagaagctggcccctacctgcaagtcggtgagcagcccccacctgctccagccgtttgggccctaagttgggggatggagcccacaggcctccctctacccttggccctgacctctcatctctgccgccccacccgggcaggagctgccccggttccaggagctgatcttcgaggactttgccaggttcatcctggtggaaaacacgtacgaggaggtggtgctgcagaccgtcatgaaggacatcctgcagggtgggtgccgtcccggggtggggactgttgccaggaggatgctgggggcgcagctgagaagtggtggcagctgagggggtcagctaaggctcaaagaaaagcccagacttgcacctggggtctgggtgaagcccactcttcgctgtgtggcctccggagcagccttagccttgcgtctctgtgctttagtttcttctcgcgtccttggctttgctgggagggtcagaggagtgattagatgacatgtggtcagcagcctgggcctggagatagcatcacggccttgctgctttcagcaacgaggcctggaatgagtcacatcccaaccacagacccccaaggcgggatgagacgggtcttctttgagcagagtccagcacaggggcggctgtgggatcagtgctgtgtcctgacccttcccctgtggccctgtagctgtgaaggaggccgcggtgcagaggaagcacaacctctaccgggacagcatgg

SEQ ID NO: 135364 - DNA, 1093 bp, Homo sapiens
gtgcctcctcaacctagatcctgagcaacctggtgatggaggagctgggccctgagctgaaggcagagctcggcccgcggctgaaggggaaaccgcaggagcggcagcggcagtggatccaggtgggtgggcctggggccctggagcggggacgggacctgcagctggtgcggtgccctcagccctggtgccaattcagctgctctgcccacagatctcggacgccgtgtaccacatggtgtacgagcaggccaaggcgcgcttcgaggaggtgctgtccaaggtgcagcaggtgcagccggccatgcaggccgtcatccgaactgacatggaccaaattatcacctccaaggagcaccttgccagcaagatccgaggtaggcagccacccccgtgctcgacgggccctccaggggccaaggtggactttctttttatttcatgattcatgtaaatttcacagcaatgacttgctcattgatcatttgtaagaattagagccaaatctgcactgtggtactccaacccctgtgagttgttttgtggctattatttctataagcccagaacttgaagagaaaaatttttgttctggaggttcaagccttcttttcatctctgactcgtcacagatttttaccatgtgtcattttaaagtacatttacgttcagcaagtatagctttcccaggtcagtttattctgtcacccaggctggaatgtagtggtgcgatctcagctcaccacaacctccgcctcccggattcaaacaattctcctgcctcagcctcctgagtagctgggactacaggcacacgcgcgccaccatgcccggctaacttttgtgtatttagtagtgatggggtttcaccatgttggccaggctgatcttgaactcctgacctcgtgatccgctcaccttggcctcccaaagtcctgggattacaggcatgagccactgtgcccagactgtacgcctttctcttcccagccagatgggatcctttcaccagcttggtccccataacacatctgcagagctcagttttagcaattgtcagttgcccatgggacgttctttttattttatttta

SEQ ID NO: 135365 - DNA, 1078 bp, Homo sapiens
tgttccaggcaaagtttgaagggccctgatctagcagtaagggaggaactggggctcgaacaagggtctctgggtgcctctagggccattctgggtggctgcttatgggacgggagcttttagtcctggctctgccactccctgctctgtgaccctgggcccgtggcctgtcccctaacggttgtctcttcatctgtaatcatctgtaaagcaataaggtgaatgatagtgcccaggtcttggggtggttgggaggatttcaggagctaaggaggaggcaagggggctgccttgtcactgttggtggtggggtcattactgcttttgcctatcagatacaaccatgactgctctgatgacgaggaaagtgagggtcccagctgcccctcctgaggtgcatgccatgtgtgtggggggggttttggtcagttctcagttggtcttggtagaggccactgggccatctgctgacctcctctctccctccgtctcctgggcaggaatccctgaggactccaaggtagagggccctgcgttcacagatgccatccgcatgtaccgacagtccaaggagctgtacggcacctgggagatgctgtgtgggaacgaggtgcaggtgaggccagacgggctggtgaggaaacctcagaagtcacccaaggacccagcaggggagggcagggggtggggtacagagatggggctctggggcgctgccggtttggaaggagatgacatgcttagatttggacaagtgcagggccagtgcacgtggagatactcgctgtcttattcatcacttactgggcatctgagcacctaccctggacgaggcactggggtgcagctgggaatgatgtggacaaattcctggccctcagggagctctccgtatagcaggagaaacagacatttggcaaataaatgtacacttccatgtgcaggcaaagcagggagggagtatggtattctaggtagggaaggcagcctgtgcaaaggccctggggctggcccttgagtctgaggatcctacaggacacccaggcagatgagttgggacctgtgggaatggagctca

SEQ ID NO: 135366 - DNA, 1043 bp, Homo sapiens
caaggctctggctgcctggcccagggccctcccgcctccccagcccctggcctggtgccatctctccaggtttccaaggctaacggctgacctggcctggcagggtgggtgacctgcgccagatagggaaggggtgggcacagaacaaggtggggaagggccacctcagtcccccatgtgtgcagtggggatgatgataaacttgagcttgagagatgattgggaagagctggtctgggtggggcacttggccgtgggcctggcacgcacagtgagcactcagtggggaggccatgggggagttcttggttctaaggtgcagtggaccagagggaggcccaggagagctgctgggccagggaatgaaggggtgtcctgtgccaggaaggtgtcctgccgggtggccccttctccccagggcgggagctgacgaggctggtttcaggccttccttccaccctgcggactgtgagaaagttctctgcttcctccgtcttggaggctgggcttggaatttgtgaagcctggaattgctcactccgggggctgccaggaagtggggggtggggggaaggaggccaactgggcggacaccagcggtcccagggaccccttcacatcctgcattcctggagcagctgggggtggcaggaggcagctggggcactggctgtgccgggtcctcagtgttggcctggggtgcagaggtcaaggcttcttcctgtctgaccgtggtccccctctgtctgctgcctgggagtgaggaatgcagtttcctttcttggaaggtctccaggtctggctagagtcagctggtcctgggttcaagccccgctctgccatccactagctgagtagcctcgagcagtaactgcctctctgagcctcagttctttccctgggaaaagtagggcacagtgagctgaggattcaacgagctgatgtgtgtgcagcctcagccagggctggggcctcagtttcccaagactgccataacaaataccacagaccgggcagctacacagcagaaatatgttctctcc

SEQ ID NO: 135367 - DNA, 1463 bp, Homo sapiens
gccacactttggcctccacagccgaaatctgaagggaaacccaagaaggtagtgcttgacccttgaacctgggggctctgaccttgtgttgtttgtgctttacagagtttaaaacctaacccaagagtggggtggatgtgacttattacccactctaagaaatgggtctgcacggatgctggactcaggttttgggctgaggagaacacagccagaaagaaggctgctcccacccccgccggcttgctggtcaccttgggacaggctggccttctctgggcctgagcctgacctcagagctgatgccaagggatcagttctctgacatcctctggtggagggcaaccacagagggcagctgctcatcaggcactgtctccacagggaccacggcaaagtcgggcagtgcccccatcctcaagtgccccacacagttcccgctcatcctctggcatccttatgcgcgtcactactacttctgcatgatgacagaagccgagcaggacaagtggcaggctgtgctgcaggactgcatccggcactgcaacaatggtgagtggcctgtgggtgcagggtcggtgggagggaggggcaggacctgggttattgctgaatggtgacacctagtggctgactatggtgtggcaaccctgctctacaggctgttctaatttcccttctggggttataagaaaccatgtaataccacccttagtcttctttcttgatgaaaacagttttgtgctgctcaggaaaaaagtaggaaattattcacagaggggtgtggttgttgagcccttggaccctgagtcacaaagtcacaatcctgattctgccattttccagctacgtgaccttagggaactgacttacctcttggaggctctgtaaagtggggataatgccttgtgtgtcttaggggggttatgaggatttagagtctacctcatgcttggtaaagattttttttttaattttatatatatatatatatatatatatatatatatatatatatatatatatatatatatatattttttttttttttttttttttttaaaaccaccaacctgcagggtgatttggaaacttcactgcctccctcagggcctcattgctctcatctgtaaacttatggggtgactcttccagctcactcatttattcaacaaacatttttagtgtctactctgaggaggcccagatttaggcactgggtgtgcaacaagggagcaagaaacattccctgccctcctacaattggcagtctggtaggggagacagatgatagacagatgaggatgccagcacgatggctcacagctgtgctgggtgctgggtggagccaacctgggagcctgagggtgtgtgtgtgttgggggaggggtcgatcagggcaggctcccttgaggaggttatggttcagcttcagcagagacctgaaggagaagtcccagacc

SEQ ID NO: 135368 - DNA, 1044 bp, Homo sapiens
caagaagtggagaaaccgcttcagcctcgtgccccacaactacgggctggtgctctacgaaaacaaagcggtgaggcctggccccgggcgccacactgagcctccccgctttctccatgtgtgccccctcccccaactcggaaacttaggccccagacgccaccgtcacagcctgcacgcggtcaccagggccagagcaccacctcagcccctcccctcccccaaactgggctgccctgggtgccctctctggacggcagctcattcttcatctctggggaatatcgctgactccttctgtccctcataaaccaactgtcactcactcctccccatccctcctaatctctcttcagtccctccagctggctccagggcgttcctcctgccacctccttcctcactgggcttcctgcctctcctccgacccctcccaccctcgacagccacagagagctgttggaggcacaatctggccattccttgcggtggcttgcccctgccctacaggtgggtaggtgtccgagaaggacatcctatgggagcattgtgccttatcttttccctgagccctcagggaagccccacctggttgagccacagacctgatttcttcaattgctcatttctccagagcagccagaaggacaggcctgggccctgtatttcacggaagatcaatgttagagcaacataaagtcaagagcaacctcgtgccccagagtagtggttctcaactggtagcacgtccaaatcacctgaagggcttgctgaaagacacggtgctgggctttcccccagagtttgattcaggttgggagccaagatttgcatctcttttttttttctttttttttttttttttgagatgaagtctagctctgtcgccaggctggagtgcagtggcgccatctcagctcactgcaacctccacctccctggctcaagtgattctcctgcctcagcctcaggagtagctgggactacaggcgtgcaccaccattcccagctaatttttgtatttttagtagagactggttttca

SEQ ID NO: 135369 - DNA, 1192 bp, Homo sapiens
gctcttccctgtgtagtatcgggaaagtcacttaacttctcaggagcctcagatcccttatccataaagtgggtttggcagtacgtcccagtgagggttaaatgaaacaatgttgactataatttttagcatatatgggatctgcctctgtgcctggcacagaactaactgttacatgcattagctcatgttgcaattatgattataattttctgcaagtggggaactgaagaacagtgtgatggaggagaggatgggtgagcagggccttgaaagtctggctaagattgtgaactgtggaattgaagggaagggcggtccagccagaggacacaacatggatgaagatgtggaggtaggaaatgtgtaatggaggcgagagacgcccagggtgtggggatgggaaggagagcggggctgaggttgcggatcttggatgtgattctgtgtaacatgcttgtgggcttcagtgtgccaggcctgtggtgacaagttagtccatagtctcttggggccatcagagcccagagagatcctttacaaagtgcttcatgcaaccatcttccagatgtttccacagcccgtggagtctaggttcagccagcctgggctcacaccccagcttggattttggctccctgcttgacagccggctgacctgggacaaggccctggaccttccagcctctgtcttgatcgggggtgattcctgtaccacttcctgcagctgttgtccgggtctatgtcagatggcgtgaggtgtccccagccagcgtgacacccattagcttcggggtaggagggctccctaactgttctgtgcctttttgttcctggtgtggagacagagcctttctccctgggccattttgagagtcgagaatgatctcgcactggaagtccctagctgagggctggctcacgcagggtcacacggctgtcattgtcgggccttggcgtgctgagggatgctgtctttaagggaagaggtttttccttgttaataactggccttggggccaggcacagtggctcacgcctgtaaccccagcactttgggaggctgaggcgggtggatcacctgaggtcaggagttcgaggccagcctggccaacatggtgaaacccccatctctactaaaaatacaaaaaattagccaggtgtgatggtgggtgcctgtaatcccagctac

SEQ ID NO: 135370 - DNA, 1054 bp, Homo sapiens
cgaagaccgattcatctcccagcccaactcttcccgtgctctgcttccgccaacctgggcatttagagggaggctccttcctgccatctctgagcatcgttcggggctagtgggcttgaaggggctgcctgtgtactggggacggggactgatgaccatggcctctgggtgtgtggccatagagtctagcctgcggtgtgtaggaatggatatatattttctgtctgaagacatggttgatagagcagggaggggcagtaatcaggctcggagtgataactgtaaacattagcaacggtttaactgagcacttgctatgtgccaagccttcctttgtctgtatcatcttattgaattcccacctcagtggcaggcctggatcggatagtccaaggccttagctatttaaaccacgttctgctattagtatgtcatccgtggtgcccagactgggcagggggacactgaaaaaggcctccaagagaggtaagctttcggaggcggggagaggaagtgggaggaggagccgagtgggaatagagcagcttgtgtcagtctccctcccataggttgcacaaatctatcccacccgtcattactcagtctgagactcacagcctctgaccagccccattctccgtccctgcgcccccctcctccttccccgcgggcagagctcatgactcactgcaccccgggctcctgcaagcatcatcctgcggttgcagaaattcctgcactgctttttccttcccctgccccaccccatccacttctgtgctggaggaagaagggtattctgtagacgctgctgggcagaggtttaaggaaggagtccgggcagatgcctaggtttaaaacccgtgagggtggagcaaagccattctcttctcctggtagaatcttagggcctgagtcatggaagggtacaatcttttgatctcaaaaattttaaaactggaagaacaggaagtgtccaccccctgggactggtcccatttttttggagctgggctgcttctggcccacgaaggtgaaggggcctgcctggtga

SEQ ID NO: 135371 - DNA, 1211 bp, Homo sapiens
ctattactgcacagtggccacttctcccagggacagctgtccccaaggctcctggggaagccggagctgcagagggggcctgggttccttttccccacagactctggagaacagtgagataggatgaggatctcggctgcctgagaaactcctctctggccgatctctcctggctggtggagctgccctgggtggaatcccagcatttgcttcccagacatctgtcctgtacaccttggttttctcctttttgaaatggggtcagtgatttcttccttattaatgagttgttgggaggcttacgtgaagtaactcatgtggcttgcttagcacagagcctggcataggagaggcacttgtatgtggggtgacggttcaggtgggtcgcccctcgctgtctagtgggccctgagcaccgcgtccgcctgcacttatttttgtgtcctgtagaatttcaccaccgtgttctccacgctcccttgagagcaggaagccctgagagcagtggccaggtgtcctttaactccatgtctccagggccgcacccatgctgggcaccagggaggtgctggggagatctgccaagtgactgtggtcccgggccaagtcccaaggccagagtccctcccttgtgccaggcctggggctggctgggcacaggggtgactggggtgatgtgaaaatgaatcggaccctctctagcctctgaccagcgtggggttaagtcctggaaagcctccttatccgaccaggcctggactgtgggaggaggaagggccagggcggagtcttcctgtcccctccctgtcgcagcaagctcctggggctctgtaacagtccctccattcaggacctcctgttgaggcccctcgaggggcctgggtggggtgtgccttgcattcggtggggtttttcctctccccatactcagtgctgggcctccctgtcttcccgtctcctgggctgagaattgccagcccaccctctctcccctggcatgttacaggggaggggactgagaccacagaaggtgaagtgtcctttactggagagggttggatttattttctggataccaggctgggtggaagaaagttgtgcccactcagagcctgctggtctctctcttctccacacttcagtgctatttataatcctctttaaatgcctcgaattcctggtccagactcacctgaggggagttcctgatg

SEQ ID NO: 135372 - DNA, 1028 bp, Homo sapiens
caggttcctgccaccacgcctggctaattttggtatttttagtagagacggggttttaccatcttggccaggatggtcttgaactcctgacctcgtgatccacccaccccagcttcccaaagtgctgggactacaggcatgagccactgtgctgggcccttttttttttttttttcttttgagatggagtcttgctctgtcgtccaggctggagtgcagtggcgggatctctgctcactgcaacctccacctcccaggctcaagcgattctcctgcctcagcctcctgagtagctgggattacaggcacccgccactatgcctggttaattctggtatttttagtagagacagggtttcaccatattgatcaggctggtctcaaactcctgagctcaggtgatccgcccgccttggctcccacagtgctgggattacaggcgtgagccaccgtgcctggctgtgtgaaacatggatttttttcccgcatcttgccccaccaagcagcattcagccttcaacctcagctaattacccttcatcagagaggacatttctgcaccctgcccccctactaggtcaggcctgccattattatcaccccctccccagtgtcctaaactcctccttcatggcaagcatcacattcaacatgattttgtgtgtgtgcaattatctgtttaaataaatctttctctctgaggaccaggactgtcctccttcgacatgacatcactagcgtcagtcgcaatgggagcttgagggagcacgtatgatgtgcagaacactatcctgggcactggaggggaacgtgacagtgagggacccacctggtccttgggacctcacaggtttgttcatagacctatactgaaacactcatgcctgcagtggccatgacacatcatggggtacaaagtcccttctatagtgcatgtgggcctctgctactgtgcagagcttctgcttgtaaacttccaggaagggggtgccttaccgccttcccaggcacaaattccgtggttggat

SEQ ID NO: 135373 - DNA, 1045 bp, Homo sapiens
cttctacagaaaataagaagctactatatattatttgctgtgacctttgagaaggtccctgaacacggatcccaggccactaagaagtcctggatcctggcatccaggcctaccctgggggctcttcctccagccctacccctcaggctttctcctctctagtcacaatgtcccttctctgttcctggaagagccaaactcctttctgccgctgggtctttgtacctactgtatatctgcctagacactctcccaggtccctcttaccaccgttttcccatctcaggaagccagctctgactgtaccccagccagtccactgggccaggtgccttgctatccactcttacagccccttctccatctgcttcagcacttgtcagaacagtcactcaatgctgtaacaccttgtttcctgtctgtccctcagctagaataccagctccttgaggacagaaattgtctccatcttacccacagcacatggcccagactttggccgcactcaataaacgcttgttgacccactgactggatgagtgacaagaggagcccttggccattcctactccttagctgctaaggaattttccagcttcaaatttatattttcatggcagatacagaaactgtggagtctctgctgatatgtgccagctggcgaaggaggaagcatgtggcattaccagtgcatcctaggtctccccatgtttacacactatctcctcctccaaatacacacaggggctatcaatatgtttcctgggcaaaaggcaaggcccagacatagagagttgacacattaacgcctcctctctctctgaacccatctgaaggttctgttgggggtagattggggtggtggtgagaagatggtcaaatctgcttgacttggggctggcgactgaagtaggacatgtagcctcttgtcctggctcagccaccactggcttctgtgactttggaaaattcctccttagttctcagcaggttttttgttttttgttttttgtttttgctcagtataagataatggttcagaatt

SEQ ID NO: 135374 - DNA, 1069 bp, Homo sapiens
cccaggtgagcctgagtagggggtgcaaaggaaatctgcatcctgtcttattctgagagggtggggtgggacctactaaagagttgaggagggaaggtaccatgctctgaattgccaaatgacaggttagaagtggatgtttactgaatggaaatagtattccatagggcctgccccctgccctcatcttactctccagttgtttctgactttgcttcagccttgtgcctttctttgtgtgcatttcatccttgctctcagtgttcactcctgtcggccgactccttgaataaccactaagtagccaatcagaaacgagcttggaaggagagcgagggtggggagcagaagcatcccatctgctgcgaaggagactgttttttacgtggagataacctcagcttgtcatgtgctgagagagcagatggcagccttcgtcattagccgttaacacttcaggtgccaaatgccaggcccataaagcactcccttggaaacaaacaaaattattaaacaaataaaggtgaagctgattgtgagagaacagacacaacttgtctcggtattttgagagttgttaaaatgtcttctcttaccagacaaggaaacaaaaaccacaggactttgatgcattttacggagctaaaagatgattgtggcatattggatctttacagatcagcttcgagacaccagagagtgacctattcttagagaaggagagatgcataatatatagtgtgaacatttaaaaacaggcttccttctcacttggcctaaagcctgtcacccgcttgggggaaggaatttttttttcttctgtgtgttccatccccacctggatagaacaaaatccagctttagcatattgaacaatcttatatttcagaaattttaagaaagtaaactatttttcgaataccattttttaagattaaggtagtttatataaacgagaatttaagagaatactgataactggaagactcagtcatttaagagagaatcttcaacttctagcatactccaaaaaaaaaaaaagaaacagaaaaagaagagacaaatacgg

SEQ ID NO: 135375 - DNA, 1074 bp, Homo sapiens
gtcattgtagagttaataaatggtatggagtagatggaagaggacagggctggggagagagggaaagctgcttggccttgtggccagtttaccagagctatgcccatcacgtatttttaacttgcatcacattggtaatctctgcctttaaagaactgacttttacccagttcaatcacagtttcccaggaatgtccattgtacaaaagatagataataagactcttgtccaatttgaccttgattcagggtgggggtgggcaggggttgctgagaagccggggggcagatggaaacacagactataggggcagctgctgatggtcctcactcaggcagagtggctggaggggaatcgggatcctcgtgttgtcctcacctatagtgaatctgatgaggtgggggagcaatgtccactaaccctgaggggagaagggccaccatccggcctgtcccattgggtgcatgggggctgtgtgtggtgatcgggtgtcttgtgccctcaggcatcacggaggaaaacctgaacaaactgatccagcacgcccagatacccccggaggatagtgagatcatcaccaacatggctcacctcggcgtgcccatcgtcaccgatgtaagaggccagctcagcttccgggggaggtgggaagggagctggcagatctgtctgcttctgctctgactgacatacagcatctctgatacacactcgtacgtcaagagagagagacacagaatcagagggataaaggtgtaaagctatatataaatcagagacacaaagccaagaacctagacgtcaacagcagtgagtcattcacagttgtgaaagctgagatgtcttggaaccaaaccataacaggggtccccgccattttatctgtcttgtctcagggtctgtctggcctcacctttggacagcttagcctcagtgtcccctgtgaagatgagaatatgacacttagagctagcagtttggccacctttgagtcttctgcactgggttggttcagagccaagtcagggcaggttgtctgggaggcctggaccacgtgatgtgctctagaagag

SEQ ID NO: 135376 - DNA, 1229 bp, Homo sapiens
tccctggcttcacctggagtttaagagtgaattagaaacgcagctgcccatcacctgcagatggctctgcaccctgatggtgaggcagctcgttccttggtgcagcctgggaccctgcctgagccagaggatgtgttttgtttatccacagcccccaaatatctcccaggcctattgcgacgggaccccaaccccaattctgactcccctccctgcttccactatacccagaccagggttggggaggggggtgggtgcagatctgggaatcgagaagcgcaggaaaggaagtgttggaaaccagaactggcaagctcactgtcttctctgcctcctccaggatccacacacatcctcaccccacagaaactgctggacacactgaagaaactgaataaaacagatgaagaaataagcagttaaaaaaataagtcgcccctccaaaacacgcccccatcccacagcgctccgcagcttcccaccaccgcccgcctcagttcctttgcgtctgttgcctccccagccctgcacgccctggctggcactgttgccgctgcattctcgtgttcagtgatgccctcttcttgtttgaaacaaaagaaaataatgcattgtgttttttaaaaagagtatcttatacatgtatcctaaaaagagaagctcatgtgcaattggtgcacagcaggagaaatttctggactgttaggatgaatggacgccttctccccgttatttaagatttgtgaccttgtacataaccctgggtgacgtgcacattgcttgggtatggaacggtagaaatttgggtgtttttaaaaccttgtttggggttgttcctgtccttgttgagaatcatagagatgtctgtgttcttggagtatttcacactgaggactaatctgctatcttcattccagtccctacccctcagtgcctgctctcatccaaataacctgggaggtgacaatcaggatatctcaggaggtccaaggtggaacagacctctttgcctttcccagcgtctcatacccccggtagtgcagctgtgggtggaggctggggtgtctgcacgaagtcaggccagcgtcctcctccacagcctgtcactgccccctccccagcctgtgtccacagtgctgtgatcccgagggaagtcctccagtctaagtcacagtgccctgacaggtgagaagcaaactcccgctggaagcctccatctctttggaaaa

SEQ ID NO: 135377 - DNA, 1167 bp, Homo sapiens
tgtgtggggtcatacatcatcgtgtttgtaagagaagatggtcattttattctctgtataaaacttagctctaaagcagaaactaaagcagcaaatgcaggaaggctgtctcgccatcctcaagactcagcagctctcattctccagtggtgagcacaccatttgtgctgctgctgttgtcgtgaaatataataacagtggaagtcacaaaaatgtcccctgcccagccccctcgccgcccttgacctcctgcaggccatgtgtgtattacttgtctagtgatgtcctctcaaagtgctgtacgcgagctcggcgccacctccgcctccctttcagagcctgctccccgccctctctgctcgctgcattgtggtgttctcttctcaaggctttgaaatctccccttgcactgagattagtcgtcagatctctccccgtctccctcccaacttatacgacctgatttccttaggacggaaccgcaggcacctgcgccgggcgtcttactcccgctgcttgttctgtcccctccctcggaccaaacagtgctcatgcttcaggaccttgtttgtcgaagatgttggtttccctttctctgttatttatataaaaataatttatcaaaaggatattttaaaaaagctagtctgtcttgaaacttgtttaccttaaaattatcagaatctcagtgtttgaaagtactgaagcacaaacatatatcatctctgtaccattctgtactaaagcacttgagtctaataaataaagaaatcagcaccccttcccggtgtccagggggctccagtctggctttcctttgggcaacggaaggagaaagcttttgcagtggttcatcgcagaggaggcgaccacctccggctgtggcatggagtcttctggacccaggtccccgttgcttgcgttagatctgtagccgccttacactggggactagccatggagcttgtcttgggcccctagcagcaacagcgtgctgcctagagatgaggccattcttccaccgtgtttctccttatctagaatgcttttctttctttccttttttttttttttttttttgagatggagtctcactctgttgcccaggctggagtatgcagtggcgagtctcggctccctgcaacctctgtctcccggtttcaagtg

SEQ ID NO: 135378 - DNA, 1027 bp, Homo sapiens
cacgagctagcatcgtgggcccagggttctaggagctgggaaggtggggaaatccatttaccctcaaaatcttgaaacctcccaaaggtacgtatgaggaaatgaggctggggtcgggatggggtctggacatcccaggggaggtcagaacacaggcctaaggccccatggccaaacctgcatgggggccacctgggcatgggcttctgacccagggcaccagactcctgcccgccagcccacgcaccgggctagccggtcctccaggtctcggatctggatgtggtagaactccttcatctccttggccagaggcggctccacggccaccaccggctccttcttgccccctttcttcttgacttcaagctccttgcctgccttgctcacactctttttgggagccatggctgatggcaaccagggctccaggccccaggaagaggccaggtggttgctaaggaagctggtcccgtacatagcaacaggccgagggagtgaggctgggcttaaagggaccctgccctcttcttgctgggtgccggtaccaggtcccactccaaggcagatggcatcagtgaggccccaggcccaggagtcccaggccatggcaggcaggatgcctggctcccagggcaactttttgggcttctggggacaaccctctttctcccacgtggaaataagcgccatggggaaagttcatgtgggtcagggccctggaaatcgccatcctttcctttgtgctgatcagaagatggacgacactaaccctgggcacacaaagcctgttctgcagctgtggcctggggtgacagtgtcctggcatgggtgcattggggcgtccagctgatggggccctggctggcagctgggtgcctctatgagctccatccccagccccaatctcagccagccatgcctgtgtgcctgcctgtgttccccaccagcccaggcactcactccgtgggacagcgggcaggtcctttccatccctgtcatcccagggcttgtcacttagcaagag

SEQ ID NO: 135379 - DNA, 1064 bp, Homo sapiens
agagtaagtgctcaccaaaagctgttagtgagggcacttttgtcatatagaagaaaaaaggagcatggaaaaggcgctttgcaaggtgtaaggttccgcacaagtttttgctgtaattgttacgtcgccctttgtggtcgtgatcctttatttattctttctgagccactacgatggtcccctagttaccgtggccatggaaacgcggcccgccgtcccggattggacggttcgcgggttccccctggaggccaccttctggtcctgctgcggaacgacgggcgggccttggaggcggggagaggagcgtcgggagttgtaggcgatgggcgtggctgctgcggagcggtgcacgccgggagttgcagttcccgggcgaggcagttgactgccccacaacgagctcgggcctcacccggatggcggctgcgacgcgcggctgccggccctggggctcgctcctcgggctgctcgggctggtctcggccgcggccgccgcctgggacctggcttccctgcgctgcaccttgggcgccttttgcgaatgcgacttccggcccgacttgccgggtgaggcgccagggagcccggagcgaggggcgggcggacgcgggcagacgcgggagcgctgggagccctgggagcccggctggcgccggccagagaagctgaggacccagagggtgggaccgaggggcggggcccgcagacttgggagggtggagggtacccgttgaggtccaggaggccctgccaacctggagagaggcctcagccagcagaacccttggtggaagttcttgggcctccccggaatggcctggccgtcaaaggagaagtgcagtgcgccttggggatgggcggggtctgcggctgaccccgttgacagctcgcatttagagctgagtgcaatctagaggaccgcctggtgggggcgctgccgagctgaatcaggcccgaaggtggctcttttccgccacagaccccaaggtttgcgtgccatgtgcataggcagcttggacaaacgtaaggacacaggagtcccagaccaggttccagacatg

SEQ ID NO: 135380 - DNA, 1054 bp, Homo sapiens
ctggtggggaggagcctgaggcccgtggtgggggcggggaggggctgcagagaggcgcccgtgaggggagcgggatctctccaagggacgcccaagtgaggagaagggactgagggaaggaagcagaggctccgaacgagacaggctgccgggtggcggggtagccgcgtgccctgggtacctagcccagccccgcccgggaatctctttgctgctgcccctcctcctgtagtgggggaggggcgggccctgcggaaatggcctgatgagttctcgggtctccctttccgcctgcagggaggtgttcaaggccaggcaccgcaagaccggccagaaggtggctctgaagaaggtgctgatggaaaacgagaaggagggggtgagtacggatcgggcgtgcgggccggccggctaactgcccgggaccccgggtcggttttccaccctgctgcttctgggagtctcaggttgagatttaatttttttgtagtagttcagaaatttccagggaatgtggcttccaccctaaaactaaatgtttcattcttaggcagttatgggtgaggccaggagggggagttgatgcatgcatcgtgtgcactttatttcacgaagttaggaagcctttaaacacctttttttagtgttaaatttcgcttaatgtaaaagaaagattatatatgcatgctttttgaaaggtgtctgatactcaattatttaatgtatttaaaaggagcggtcccttctccaccccatcttagctctagtacaacttcccataaaccttcttttgcgtaatgtgcattagcaaggacatttttaaatcatcatgtttgttgccaacgaaacagccatagagctgaaatttgaagactgaaaccgccgagcgtttagtggctaatagcaaagtattgctgtttcagtttgttgtctcaaaccatcatcttgaagtgtgcatgctactaatatccattttatagacaaggcttctgagacagctggtttcagagcccatgatcttgctctgtctcccaacttggctgtcagtacagac

SEQ ID NO: 135381 - DNA, 1024 bp, Homo sapiens
tgctggcatggcaggcgggcctggtactggccttgttgccctggcttggccactggtctgctggctgtctctgtgcctgtggaccctgagtgagccttaacctactatctgggcactgtggttgccaggatgccgtgcgcatgctcaataccctgcagaccaatgccggctacctggagcaggtgaagcgccagcggggtgaccctcagacacagttggaagccatggaactgtacctggcacggagtgggctgcaggtaaggtagagagggcctgtgaccacctcccacccccatttgtgattcccgtagctgaggcagggaccttgtctgtctgtcccaggtggaggacttggaccggctgaacatcatccacgtcactgggacgaaggggaaggtgaggggcaggaccctggggtagggggtctattaagtggctggtggagtagagcctgcccagacaatcccttttctttcaagggctccacctgtgccttcacggaatgtatcctccgaagctatggcctgaagacgggattctttaggtactggcttgtggggggatgtggtgtctgtgtcccaatggaccctggggggctatggaaccagccagtgcttcaggaccagggtcacccccaggaggtcagctgcatgtctctctgcccagtgtttattcattcaataaacattcagttagcacttaccatattggcccatgtttatggcaacctttaattttttttttttttttgagactgagtctcactctatcgcccaggctggagtacaatggcacgatcttggctcactgcaacccccgcctgccaggttcaagcaattctcctgcttcagcctcccaagtagcttggattacaggcacctgccaccacaccaggctaatttttatatttttagtagagatggggtttcaccatgttggccaggctgttctcgaactcctgacctcaagtgatccgcccacctcggcctcctaaagtgctgggattacaggtgtgagccacggt

SEQ ID NO: 135382 - DNA, 1092 bp, Homo sapiens
aaaaaattggggaaggggcagcaactttaatgtataaactaaatatgtagcaggaggtccagtgtggtggctcatgcctataatcccagcactttgggcagctgacatgggaggatcacctgagtctggggaggtcaaggctgcagttagcagtgatcatgccattgcacatcagcctgggcgacagagcaaactgctatcttaaaaaaaaaaaagaaaattacatagctggaatagtcagatggtcagatgtctctttaataacttaaagtccaggttgagtgtggtggctcacaactgtaatcctagcactttgggaggccaaggtgggaggatcactggagctcaggagtttgagaccagcttgggcaacgtagtgagacttcatctctattaaaaaaaaaatgaaaagaaaaaattttaaagtccatatataactttaaaatcacatagagatatttatcaattagtatgtctttagagtaaggagaaaattgccttgcaagggcttaaacgataagggtggcttgtgccatccacgttaaggtctcctaggcgggctgcagataggagcccttctgcttggccactctccactgtggctttgccctggggcagcgccccctcttggtctcacttgtctagacttacacaagaggatggccaggtggaaccgggatcactcttcctgtgccacgcatgtcttctaagcccatcaccacgaacttctgaaatcagctgcctaaggtcatttcaagccgatatgttttccctaaacagttcttgttcaaataaagagatggagaggaggacttactacctgagtagctttgaggattgaaacataaggcaccaacctgtcttctaaaatcactttttgggccaggcgtggtggctcatgcctgtaatcccagcactttgggaggccgaagcaggcagatcacttgaggccaggagttcaagagcagcctggccaacatggcgaaaccctatctctactaaaaataccaaaaaattggctgggcacggtggctcatgcctgtaatcccagcactttgggaggctgaggtgggtggatcaccagaggtcagg

SEQ ID NO: 135383 - DNA, 1121 bp, Homo sapiens
aggccactagccgagactgctggcctgatgacgtaaaaggcttggtgcgaagcaggtgctcacggtgcacccgcccctttctccacccctgtcccttactccctctccccttcgctgataggcctttctctgtgccccacagaccaacagaacttcacagtgacactggaccaggtcctgctccgctgcctggaacaccagcagcactggaaccacctggacgaagagcaggccagcccggacctctggagtgcccccagcccagagcccggtgggtccgcatccctgcttctggcgccccacccaccccacacctgcagtgccagctccctcgtcttcagctgcatttcacatgccttgcaatggatcagccaaggccgagaccccatcttccagccacctagtcccccaaagggcctcctcacccaccctgtggctcacagtggggccagcatactccgtgaggctgctgccatccatgtgctagtcactggcagcctgcacctggtgggtggtgtcctgaagctgctggagcccgcactgtcccagtagccaaggcccggggttggaggtgggagcttcccacacctgcctgcgttctccccatgaacttacatactaggtgccttttgtttttggctttcctggttctgtctagactggcctaggggccagggctttgggatgggaggccgggagaggatgtcttttttaaggctctgtgccttggtctctccttcctcttggctgagatagcagaggggctccccgggtctctcactgttgcagtggcctggccgttcagcctgtctcccccaacaccccgcctgcctcctggctcaggcccagcttattgtgtgcgctgcctggccaggccctgggtcttgccatgtgctgggtggtagatttcctcctcccagtgccttctgggaagggagagggcctctgcctgggacactgcgggacagagggtggctggagtgaattaaagcctttgttttttaaagaaatggcaaagccttcgactgacccttgaccccctgctccctcagcagagacggagggaggggctgctggtggtcagggacctgcactgtgtagagggagcctggctgtgtggc

SEQ ID NO: 135384 - DNA, 1043 bp, Homo sapiens
tgcctccttgataaatattagtttaaaaaaaaaaaaaagggccgggcgcagtggctcacgcctgtaatcgcagcactttgggaggccgaggcgggcagatcacgaggtgaagagattgagaccatcctggctaacatggtgaaaccccgtatctactaaaaatacaaaaaattagccgggcgtggtggcgggcacctgtaatcccagctacttgggaggctgaggtaggagaatggcatgaacccgggaggcggagcttgcagtgagctgagatcgcaccactgcactccagcctgggcgacagagcgagactccgtctcaaaaaaaaaaaaaaagagagtcaggcaactccacagggccatgatgcctgttcctccccacacccctcgccctcctggctggcgccgccagattgaccaagtctccctcccgtcctcccccagaaaaaggtgcactgcctcaacatggacagcctctctttccagctgggcctctacctcagcccacacttcctccaggcctccaacaccatcgagccggggcagcagagctttgtgcaggtacctggcatgcctgtcacccctcgggcctcccagctcctggaacttcctctccgcctttcttcccaccatgactccagaggagatgagactcccagagtcaggagggagacagcctgggtgcacgggagagggagagacagagaaggcattgctcagggacactgacaaggatgtggccctgtcctcctcctctgccccagacaggtccatgtctttctttccactgtgaggactcaggggtgggaactcttaattctagccgatatttgaaggcagcaggtggggtggggtgaagagcagctgcccatgccgcgtggccctacctacccatgcaggtcagagtgtccccatccgtctccgagttcctgctccagttagacagctgccacctggacttggggcctgagggaggcaccgtggaactcatccagggccgggcggccaagggcaactgtgtgagcctgctgtccccaagccccg

SEQ ID NO: 135385 - DNA, 1072 bp, Homo sapiens
tctggcccacacctcaaacttgggcaccaagagtgcaggaggggacacgctgtgccacagttcacatgccacaagccagtgctgccttgggacagtgatggctcctccaccaaatatcagattgaagcatgtggaatatgccaggttctgacctaaaaccccagcattttcatacgatctattgtgcatctactatgtgccaaagccctatcatgctaggcacttggggacacactcaggccctgccttcctggagctgatactgtgatgagggaggtgacaataaacatgtacatgtacacagataaatctataatttcgggtcttgctgggtggtttcggggctgcagcctaacatgtgtcatgggctcatcccttatgttaacacacggaggcccggggacttgcacagggtcacttggcaggtgagtggtggaagggaagttcgaacctaggtcctctgacgcctctccccctctgcagcaccgtcctgcctgccccaccactatctttggctgtgggtgagggcggggctctgttaggtgcagggctgctgagggaagggactgaggtgcgcgtgtctctgcagcccaggggtcactgtccttctgcatgctggaagccagccaggacatgggccgcacgctcgagtggcggccgcgtactccagccttggtccggggctgccacttggaaggcgtggccggccacaaggaggcgcacatcctgagggtcctgccgggccactcggccgggtatggctctcgccccgcccctgacactagtccccaccccgagagaccacccccctgaccccccccgccccctctccggtcccttataaagccccaccccagtcccagccccagccccgccgcagccctgtgagagcacagtcgctttctcctactctaggctacgccccctatgggccccttccctttgggcacaagcctggccccagtcccatccctatcccataaacccacacctggccaggtaagagtgcagccgccgcccacccgacgccaggcctcgctccccgcctggcctgtccgcttcagtgttccat

SEQ ID NO: 135386 - DNA, 1091 bp, Homo sapiens
tatctgtgaccctcagagatccaaaggctgctgccggcctggagacgattctccccaggagacccccactcccagcccaccatcagtttgtctgatacgtctgtcctgaataataacaacacctttgttaagcgctatgtgctagagactgtgctagggccgactctatgccaggaattaagcatctcacatgtattaagcctcccaaggctcatctgccagggtctgttattatccccacttcttggagaaggaaactgaggctggctgagagcgatggagtgacgtgcccagggccagagttcacaccagatccctggggatgccagagccagcctgccacttggttccccacgtggatctcagtgttcaggtggcttctggcctgttggactggagattacacctggttgatgtggcctttggtcccgatactgacttcgccgtgtcagctccgggtaaacttatggccaatctgcccccaaaactgttaagttgccttgcgtttgtgcagtgataagaaagtgctcagaccaccaatatcgggggaccctgctccccaccgccctgccctctacgaggactgtgggctttgataatttccaaatcatagatagtgccaaacacactttgtgtggtttccataggcattgtcatttttttttttcaaatttggtaatgatattcaaaatacgactgcctctgttagttcgcattgtttgttttaatgttcaggtccctgtgcctcctctgggtgactgggatcccccaaccctaattgctcaatactgggccagggtgagaggagggcccctaggcaggtgtctaggtctatgggagataggtgtgtagatagccagccaggatccaggggactggtgcattctcacggggcacagggccagggcactccagctgctacgggattaggcatggcttgttacggccacaccatcctgaacacatccgacctcatctgatcttggaagctaaggagacttgggcctggaggaagaaacatcatggatgtccaggagctcaccaaggaaggaggtggtgtggaagagcacagaatagagtgaatgcggagg

SEQ ID NO: 135387 - DNA, 1047 bp, Homo sapiens
aaaagggcatctcaatggcatgggtgggtggggagtcagtcatgtcactgaaattgaatgggggaggcccaatgaggtggctcatgcctgtaatcccagcactttgggaagctgaggcaggaggatcccctgaggtcaggagttcgagagcagcctggccaacatggcaaaaccccttatttactaaaaatacaaaaattagccgggcatggtggcatgtgcctgtattcccagctactcatgaggctgaggcaggagaatggcgtgaacccgggaggtggagcttgcaatgagccaagattgcgccactgcactccagcctgggtgacagagcaagactccgtctcaaaaaaaaaaaaaaaaaaaaagaaattgaattgggggagtcatggtcaggggtgagacctgaaggacctccccctgtgtggccctggacacagcccaccctctgtgagccgtttccaattctaaaacagactcaatgtccccctcacccccacctcaaggtcaggatgagaacacactgagtgaggagtggacgctgtccattgccacggccatgagggctggagaccagaacagcatggcccgaagcgtgcggggccccggatgacttggggacaccccagaatcccctggggagaacccttcctgcgcgctttcattttttgacctcatcactgagaaaggctcaatttggtgctcacgtgtccttaacacctgatctggcccaagctgggctccctttaagccaagagagcctcttgtggaccccgcctgcccgaatgaaatccgaacagttggggctgttcatggcaagtggggctggtttttcatttccattggttatttaaagtttcctttaaaataaacgattttaagttataaaaggtgaatctattgaaagaagaacatgaaagaaataaacaggagttcagcggagctagcagaagacaaggcatgtagggggagccattctgtcccagggaagttgtggagggtaggggctgtgtggaggcctctgcagctggtcctcggttttccgca

SEQ ID NO: 135388 - DNA, 1032 bp, Homo sapiens
caatcatagtcactcagcctgcccaactgtgacccagctccccaggagacagttcatttctagcatgccctgttcccattcttcccctcaaaggagctccctccacacccctcacctctgcctggacagccctctgccacatgccatgctcccatcagcgaggctggacttggggtaaccaaagtgggagtggggccctgatgagtggatgggaggagttccagggaactccacgtgggtgaccctgggtcacctgctcccatctctccctgcatgtgccctcatcgtgacccctctccatccccagggagaagtctcattcgtggttgagcacaggctggtttaccatggtgatcgcggtggagttgtgtgaccacgtgcatgtctatggcatggtcccccccaactactgcaggtgagccctccttgccagcgccctcccaggacaacacccaggcactggccgcaggatggagctctaggggctggaaaccttggctgaaggtgcctttgagggcctctgcttcattgttttcaaactgttcttcagagatctaggcttcttctccttcctcaggggcctccactccaagctccgccagagtttatttattaataataactattagtagtagcatcatatgaaaagcccactaggggacagctatactttactgaatactgaccaggtaccaagcatggccacatgtagtctctcacttactcctcacagcaaccttacgggataagaactgttattcttcccattaattaaatgagaaaaactgaggagtatgttttatgagtagccaaaggtcctccaaacagtaggaagaggggccaggctccagtgctcacagccctcaccactgctccacactgccgccttcttagggaaaggaaaaagtgccactgcatttaaaaaaaaaaaaaaaattggtggttacacacctagtctaccctgcacccattttatggatggggaaaccgaggccccaggaggcatggggatttctcctattgaggtcctat

SEQ ID NO: 135389 - DNA, 1679 bp, Homo sapiens
gggtgtgaatggggctcctactgcgtggaggtcaggtcctccagcaggggagccagctttggccctgccagctgccttggtgtgggaaggcccctgcttagggaggagaatgggcagggctctgccgccaccaggctgtgtgacctcaggcagattcctggcctttctggccctcagtgtctccgtctgcaaaagggatacagtcctgagccttaaagttctgggtgcatagaagaactagtgcggggcagagaaggtgtagcctttggcttgctggacccaaaggaccgaagccataataaccctttctggtggcttgcaggtgtgaacccacatccctgcccccagggccacctgcaggacgccgacacctacccctcagcagacgccggagagaaatgagtagcaacaaagtaagtctgccttcatttcttaaccccattgagcctctcacttccctccatggaacgggttcctttggacctgtctcagaccccagccaccacgagtctcttcttccccgcaagaagctgcccatgcctgggaggcccagatttaagccctggtttggccactgatcttctgagtggcttagggcaagctcctgcctgttcccgggcccagggtcagctctgccttcccaggcctgacggtctgtctgtgatggtcaaggactagccgaggtgactgtggagtgctgtgcaggagagaggggtgggcaggtggaggtgagcgggaaatggggcaagggtgcactgatcagagtcaaaggtgatacagcccgagcatgaccctgagaatgtcaggattccccatcattctttcattcattcattctttcctaagcacttactacatgactggccctgcatgccccttccctaggatccactgcagccttggtggagcctgaggtttggaagtgggatggggtggttgtattaatttgagtttaatcaggaaaaagaaactacacagtgattaaacggaaaagtttaatgcaaaaaattattgactataataggacactagagtaacaagggattggaattctgaggaatacaggaatagcagatattaatataaggagcacccctgcccccataaaggctgagatctgggccttgctgaagaaggcccagctatggcccactggatggctccagtacagaactggcctggggaggggaagccgccagcctccaggtgctgcaggtggttgagtgtactgtaggagctggacttcggagaagctgtgatcacagcgggagccagaagcaataagcctgacttgctggcactgctggcctctgggcagtgggtaagatgcccttactggagaggccgtgtgcactgaaggagcctccctagcaagcctaccagaaccaagaagcaaatgcttttcctcctgcagtgtctgtccagcaccctctactcacaaagtttaatatgcagctaactgacaagggaaaatatttaaagggcccagatccatttccacagagcagacaaaaaggataaatttggagctagaggcaatacattggagagttactgttgggggaagacctagaccctctcactcagatgtcccacctgtctctagacatcctcttagcagcagctatagggaatcctgacatattcaatccagtccagcaaaccctcccggagaacct

SEQ ID NO: 135390 - DNA, 1067 bp, Homo sapiens
gctcactgcaacctccacctcccgggttcaagcgattctcctgcctcagcctccctagtcgctgggattacaggcacgtgccaccacgcccagctaattttttgtagttttagtagagacggggtttcatcatgttggccaggctggtctggaactcctgacctcaggtgatcctcccgccttggcctccccagggatcagggattacaggtgtgagcaccgcaccagcctatattattatatttcaatattatggaaactaacgagttcacaacaggtcaccgaggtgacaggtgtccctgtgccccagccatggccctggccatacggctggcccccgtgatgctgatggggaggtgggcgtgcagggctggtggctctgtgacatgggaatgaggggctcctccctcaccaggagcccaggaccactagcagggtgcctgcagtctccatctcttgatctacgcacttgttctggaaggcggatgtgaccatctgcgttttacacacgggctcttgaggctcacagcgtccatctctggcccagagtcatccagcttgcaagaggcagagccaggactcgaaccctggctctcgggatctgctactcccctatgtgtcttggcctccccagggatcaggcgtgggtcttcacgagcccatgggcctggcgaggggtggtcaaggtaggcggcagggtgtggccggaggcgagtgggttctgtcccaccccagccctgttccccaccccgcagggagaagagccacccctcagtgccttaccactactttgagaagggccggctagatgagtgtcagatgtacctggcacacgagcaggcgccccgaagcgcccaccgcttcatcactgagaaggcggtcttctcccgctgggccaagaagaggcccatcgtgttcgcccatccgtcctggaggactgagtagcttccgtcgtcctgccagtcgccatgccgttgcgaggcctccgggatgtcccatcccaagccatcacactccacaaaaacatttaatttatggatcctgcctcctgccacgtgctgggtgga

SEQ ID NO: 135391 - DNA, 1089 bp, Homo sapiens
tcatccttcgaggctgccagtcagtaacctctgggtttcctggtgccccaggctttttggactccaatgacctgtctacctctttcctgccccaaccccatcatcactctgctcacacctcagtcaccctcttgtcaccctggcttctaattcctgcacctctctctctcatggcttcctagggatggggactgtgtctccatcattactgcacatctagaacaggctgtggcactgaggctgtgctcagaaagtcatttggatgagtcagtcaacagccgggtgcctggatgatgggtggatggatgggtgggtgggtgaggtgtaggaggaggtgggtaggtatgtaggtggacagacaagtggttgaccgggtgatcgatagatgggtggatcttgttccccttggaatctgaaacactaaatgcagcatcttgcttgaggcaggcactcagttggtgtttgttgagtgaatgtgagtagacatatgccttgacgaatgactagggagataagcaggttccctggaggatggttgggtaggttcacagccctgtgtgtgggtggctctgctgtgtcatgccctggcctcccagcagccctgagcttagatcttatgtggcctttctggtctgtgtatcccaggactgttcatctcctatgtgatgctgaagaccaagagagtgaccaagaaggctcagtgaaggtcccgcagggatgaggctgccagccccttctctgcttcccctccagcacagggaccaagtgggggagcctgcagaacctgtccaggcacagtggctcctcaagcctgcctgtcctgcagagtccccatggcatggagcttacacctgactgactggagccccctccccgactcccacttccagaagctaggagggagggatacctggaagactccggtcacctccttcttgctcagggcctaaaagatgctggtcctcccaacctcactctcagactccctgccaccttttcccctgggttctgccgtcttgcctcacttcccctcctgtcacatgctgacgttggacttagcaggttctaaggccacatgtgtgacctctc

SEQ ID NO: 135392 - DNA, 1083 bp, Homo sapiens
ggcagtggagccacgtggcctggttgccaggtggagaaggttcaggggcctgacctgcacccagggaaggacaatgggagttggctggcaggtactgctggcctggcggtagcaggcagaggagcaggcagattggagagagggctggcaggcagagtgggcaagtgggcttcctcaaccgcagggctggcatcatgcctagtacttagtaagtgccgggagatggatgggggcacagtggccaaatgtagccagggtttgtcgacccctgcagtgcgccagtcatttgtgattgcatgaaaatcagatttcccatttgttttaagttggaagatctggcagcagtgctgtgtggcggcgtttggctcaaggggctttacagctgcctcttgacgtgggctgcccacttgagttcccctgaccccgcagcatgccttggatgtctgatgtgtgctgccttaggccagcctggtcccctgggtgccgtagaaggccttccaggtgcaggtcgggggcacaaggaggcagagtggcctgtggagagaagccctgctggcagaagtgggcagggctgggtggcctcagaggccagcccgggcagcgaggctgtggtaccaggccatctgctggttccgcgaggtcagactatactgctggtggctgcggggaagcctgaagctgccgtgactgtgcctggccttggtgtctgctccttggacctagcctttgctgccagctggctgcactgttggcaggtgccaccctggcagcccctgctgcctacctgccagcctggcagcagccctgacccgagatgatctggcttcgtggagccaggctatttcctgaggcctgttccttgcttcaagctccgtcctgggagctgctctggccagaggctcttagcagcaaccacattatgtgcctgagggccctgcttgtccaggggtggcaggggggccctgagtccctttgaaccctgcttgttcagtacctgggagtcctgacttgcatttgggaggccctacttgcaccttgggatggctgctggcatgtctgctaaggggtcaggagccgactgac

SEQ ID NO: 135393 - DNA, 1205 bp, Homo sapiens
gatcctggacccagatcaatagcatatttcccccacccccaggaacccccgagatggcccagagacctggtggtggcagcatgggtggtgtcagtgaagcaggcccaaggccccacccctacagcacctgccgtcctggctggagtatttccctgtgtgctgggtgccttggcaacagctgggtacaccgctcgcctgacccaatttgagcaggtagagcaggtggtgcatcaggctgttgctcagcctcatcttcctgaggcctccttgagagcagcgatcctcacgctgctgtgctctgagctcctgcactctgtgccaggcagggtgctgactgttttgcaactggtatttccatgaatcctctcagccatccagagaggcaccaaagccagagaggtgagtgccagaggtcacccaggtggtaaatggcaattcggaaattaacacttttatcgttctataaagcgcccttgattgtacgcattctgtatgctaggggcttgcctagcccctcaaatagatgattatttgaggccctgcagtcacctaccccatgggctgatggcattaccccacttacaggtgaggaagctggggtcaggacaactgaagtgactgggtctgtgctactcagcttgaaattgcagagatgggatttgaatttgggcaggtccagctctaaggccctgtcttgccttgatggcagtgggccggaagcagctgcagacccgtgtgacagccccagacctttgagaaaggctccattccatggattgggtagttcaggaaagtccagagctgagcagttaggaggcaccatggtaggtttcgtgaggtccaaggaaaagtgtccccaggacctttcagggggtggggctgaagtcactgctgtggatttggggccaggcctgggctggcactggggcatggtgagcatttgtattctcccaggcatatgtatccacataggggggcctgggaggctttcccaggggtcccgggagggaggaagaggtcctagccaagtctggtgagtcggggagctgccatcctgtccaaggcagcccttgggcaggaagaatctcaaacacccaagagatctctgcttgcagctggcaccagtcctgtgtctgcctcatgcacgtggctggtggtgccaggggagaggagtacaagggaggcactgacttacctcatagcaa

SEQ ID NO: 135394 - DNA, 1090 bp, Homo sapiens
tcagggattacaggcgcgagcaactgcaccaggcagtatagactgtatttctactacttttttggcttttgaacaaattcagttgttatacagctttgagatcagaaataatttattagctcattacctgtaaaggagcacaagttagtcctgtggggaacgtttgaagtcttggagagaagatctgcctttttgtaaataactgggcaacaggaagacatcctgcctcttgtacccccataccacttcctgttgaattagcattagtattaactgcctacagaaaaagcagtgctgaggctttgcagaactagcaggagccgaaagagaactgtggggccctttgggtcaaaatgggtcatctgccatgggaatagatgttgaagaacacatcaaactttggaaggtgcttcctatggcccatatgaaaccagtgtgagatgctggggtttgcacgggaatcagctgtgagtgcttatcagggggtgatgggtaaacccaggccatgtgacttcacaaagcctcttcttagcttataacagtctgggtcaagttttctttaaaagtaaaccagcaagttttgccatctgcctttgtttgagaagagatgggacactcataaaaattgcttaaaatggaagtgggcagagaaaccgttggcagccagccagggaaattttctttgtaaagggcatgtaagcgagaagcttgttctgggacaaaaaaagggaagagttcattaaagaagaaagaaaaaagatgacgacaacagtagtgactttgggagatgagactcagccagagctaattatagattgcctatttaaggcattttcatgtgaccaaatacaatctgtgtcttaaaacaaatttaaaacataggttagaactcaggcagccaattagaggaagaaagcaagctgtattctgtgtaaacagttgtctctccagctgaggctttggggctcttgtaaggggctggtgtttattgcaggtgaggttctagatgagctgcagtttgctcatttagagactggcatccacaccatctcttttgagccccacaaaaatttgttaagtaagcaagtca

SEQ ID NO: 135395 - DNA, 1114 bp, Homo sapiens
gtgttttattttaggaagcttctattgctgtgtcttcaagtttattaatattttcttctgcagtgtctgatctgttaaaatcatttttcatctgagacattgtagtttttacctagagtttgaggtggagctttttaatctgcggagtctctacttgacacacttgatctttccttactttcttgtgcataggaagtacaattatgataattttgaatgtccctgtgtactaagtctatcatacatgtcatttctgctcagtctttattgatttctgtcctcattatgggtcaccttttcctgcttctttgtagttcctattcgttttttactggattttaccctcttgggtgctggttattagtgtattcctatgaatattcttgagctttatcttggagtagtttgacccttgcagggcttgctttgttgggcggaacaaggacagcatttagcctagggctggctttgcctcactgtagaggcaaaaccctctgagcactctttctgaacctccctgtattctgaggttttccactctggctgacaggaacgggaactattcctagccctgtaatcctttgggatggttctttccccatgctcaggtaggttcctcccacccatgcgctgtgactccctggggacccttgggggagctcactccctgtgcagctctctcctctccggcgctttgtctggcacactctagctgccctggcctggcctccccagcctctcagccccatctcttgaacatcaggaggctgctgggttccacctggcttctctgctctgcacctagactggaagctccaggcaggaagctggggcaatgggaggcgctcctggcttcgtttgtatacattgtatacatttctcaggaatcagtgtccttagcctgttgtccagcggctgggaaagattgttttctatgttttgtttgcacttgtagttataggcaggaaggtgacttagtccctgttactcctatctttgccggaagcccttgaactcataactcagttctgtggtaggaggaagtgcattaaatcaaaaagcggtaatctactaaataagggatttctcttatgtgtgtagatgggaggccaaa

SEQ ID NO: 135396 - DNA, 1074 bp, Homo sapiens
gtggcattggcagatttgctgtgagaagatgctcaggagaggaactgctactttatagattaattgcaatctgatgccactgaatcctaagggacctagtgttgctgtcactgtttccgaatactagtcataggaatggacatcggaggagctgaaacagatgagggtctgtgccacaaagtcagaataataaagagcagcgaggcatcgcacacaatgcgcgttgtgcccagatcttggagtgtcaagaaggccggtgtgaagcatcagggctgaaacccgaggcctgctttagttcctccataatctagttctcacagaggcattcagaagctgtgacacaaacaccgtttttggttgtatttagctagggctcaacttgctcaagttacacctttcccacacacctgccgccttccagtatgaggtatcacctactgtctggcttaccggcatcctttgggaactgaatactaaaatctgttttgggtgctgtttgaagtggatgttgtaacaagaaccctgggtgcaaggccctgccctgcccttgacaggctttgggaattgggcaaatcaggtcgcctctcccaggcctgtttgctcaactcggagattaagggatgatcccagagcccctctgggcccccacagtctgcagttccaggaatacagcagttgtcctggacactagcacctagagatgggcttatttgggtagaactctccatttttatatgaacatggagtcttgagttacctgtgaaactcagtaggatggatgatttaaaaaaccaaatgccaattgaagtttatccaatgaagacattccatgagactcagtcacagcagcaaataagttagaacccttttaaaaattagctgggtgtgctcgtgggcacctgtagtcccagctactcgggaggctgaggcaggagaatcgcttgaacccaggaggtggaggttgtagtgagccaagatcgcgccactgcactccagcctgggcgacagagcaagactccatcttaggaaagacaaagaaaaaagaagaagaatacaggtttcacttttatttag

SEQ ID NO: 135397 - DNA, 1176 bp, Homo sapiens
cagggcctcaatccccaggcaccacccctgcaccaacagggagagaattagagctggggtggggttgggctcttattgttcaaggggatgctgagtgccaggctgttagctccagagacggcccagagaggccgagtgcatcacgcagggtcacagagcacactaatactgtctcagccagagctggggaagtagctgctggccaggagcataccatgtagggaggagaccctgaccttacctgcaccttctgtatccagaaatacaaggcggccaagaaccccagccccaccacccgacctgtgagccgccggtgcgcaatcaacgcccggaacgctttgacagccctgttcacctccagcggccgcccaccctcccagcccaacacccaggacaaaacacccagcaaggtgacggctcgaccctcccagcccccactacctcggcgctcaacccgcctcaaaacctgatagagggacctccctgtccctggcctgcctgggtccagatctgctaatgctttttaggagtctgcctggaaactttgacatggttcatgtttttactcaaaatccaataaaacaaggtagtttggctgtgcagttcccaccagtacttctgtctgggtggataggggaaggggggcaccccagccaactctcagccagcacccagcctctctgggccatgtggtggcagaaacagaaggccagacaggctccctgggaaccagggactctggatcatgaggcacttcacctgtctgaacttgggtatccctcttttaaaaaaatttttaggcggggcgtggtggctcacacctgtaatcccagcactttgggaggctgagacgggtggatcacctgaggtcaggagttcaaaaccagcctggccaacatggcaaaaccgtctccactaaaaaatacaaaaattagctgggtgttgtggcgggcgcctgtaatcccagctactcgggaggctgaggcagggagaattgcttgaacccgggaggtggaggttgcagtgagccgagatcgtgcctgtgcactccagcttgggcaaaagagtgagactccatctcaaaaaaaaaaattttaatttttgagccaggcggggtggctcatgcctataatcccagtactttgggaggctgaggtgggcgggtcacctgaggtc

SEQ ID NO: 135398 - DNA, 1047 bp, Homo sapiens
cttgctgttgtgctgtcttcacatccgtcccttccagcctgcccatccccaagccagagccccagtctcctcgcatgggtaatgttgctctcgtggagagagcacagagtggaagcctctctgtgggatttgggtcccagctctgcgtaactgtgggcaaaccctttccctcctgagtctgtttccccatctgtcatacaaggggtgggatgagtggtactttaggccgacctgggttcgcatcctgactgcagtgctttctagctgtgcaagctggggtagtcagctaacagctcagagcctcagtttccctatcatcaggaagatctgatgagacaacgttggcagatgttgaatgctgggctggcccactataagtacacagttgatggaagttcagttcctactccccatgcaggtatggggcgccgggggctccctgaaggtcaccattctgcagagcagtgacagccgggcctttagcactgtacccctgacacctgtcccccgccccagtgactccgtctcctccacccctgcggctaccagcactccctctaagcaggccctccagttcttctgctacatctgcaaggccagctgctccagccagcaggtactgatacaggagataagggtggggaggggtggggcctgcgtggaatgcccagcctgccctcccaagaatgcctcaggctgcaatgggccctgccccaagcagccatgcatttgcttgggaaacatttcctgacctgccaagaaggcaggttttggtggttttgttttttgttttgagacagggtcttactctgcctcccaggttggagtgcagtggcatgatctcagctcactgcagcctctacctcttgggctcaagcaggtttttagagtcagtcagacctggttcatatcggctctgagtagctgggagaccttggaaagcgaattccaccctgtgcctgtttcctcttgcatcagacaaaggaaagtttagggtcgggcacagtggctcacgcctgtaatcccagcactttgggaggctgaggt

SEQ ID NO: 135399 - DNA, 1119 bp, Homo sapiens
ttctctgcttttctacacagatggagtttgatgagaaggaactccgaagggagatcagctatgctatcaagaatatccatggcattaggcacgtattggggcctgggagggtggctgaaccccagaagtagggggtctgggacagaggcacagggagtgatgaagtgggcctccctcaggaaggactgaaagctctgttccccagtcctctcgaccccaactttctggctccctgcatgacaggctccagcttggggaggtggacccgggccaccccgcctactgcaacttgctgggccaactgggcacagcccagggcgcaggtggccggggaaacaccctctggggctgggcccatccccagggtgagatagctcccccagtgccacccaggtaaccggacaaagatgtccaaaccactacgagggcctggggtggagcatctaagtatgaggctgtgtccttttatgacggccggggactttgcaatcctccacaccctcctgtattcacagtagcccagagtcagtcccattccaccccaccgccctccttctaggcaacccgtggagtaggaaacaggattgggaggtggaatctgttccttaaaagcttagatccccttcagggacccagatctatgctgtgttcatccaacaaatccactgggccggaaaatttaaagcacctaccctatgccaagcagtgaacaagacccagtgtccccttgctctcatgcaggttcatttccaagatttggcatggaatttacttcctgataactgcactggccaattcacagaaaaaagatctctttcctagtcttaaaacaaaacactctattcctggaaaggctcttatggagaaccacgtttggcaattttcaagccatttctggccatagaacttcctatatgcacagacccttacgaggaagcaggacttacatatcagatactcaaccaccttgtcttgccccaaagagcctcattagggccgggcgcggtggctcacgcctgtaatcccagcactttggaaggccgaggcaggcggatcatgaggtcaggagatcgagaccatcctggctaacacggtgaaaccctgtctctactaaaaata

SEQ ID NO: 135400 - DNA, 1389 bp, Homo sapiens
ctctctctctttatctgtgtcgatgtctctctctcttcccccgtgcccgtgccatcctctccacccctggattcctgtctctgcttggctttcacccacttctcctccccacccacggctgctcctcctcctgtccccacctcctccccgggtgcaggacgggcctcttcacacctgacctcgcttttgaagccacagtgaaaaagcaggtgcagaagctcaaagagcccagtatcaagtgtgtggatatggtagtcagtgagctcacagccaccatcagaaagtgtagcgaaaaggtatgacggccgcctgggcggggctgggcctggccgtccattccttgtggccacagcctcccgtgggcagaaggatctgctgagccggcctcacggctacccgcagggacccagccctagtgtttcctgccagtttctaaccctgggtacttgcactcatgacccctccaggcccccatcccagaagacttgactccaacccaagcctccttggtggcacctatgctagtgatgaagatgatgttaaggagatggcagctgtttactgagcacctactatgtgccaagcacacgctaagtgcttgcccttactatctgactcagtcctctcaaccaccctaagacgtgggtagtgttgttattcccattttgcagatggcaaaacagagtctcagaaaagagaagcagagtgtgattcagttttaggaaggacagaggaaggggtctgaggtcagggcctcctgggcagggggagctgtcctagttcctcaaaaccaatttgcctgaaagcatattggattactcactttacagtaatccgtgcgtgagagacaggggcggtctcttttgagttgtctgtgactttttagatgcctttttcctatttgtctgcttttgggcattttgaggatttttagccaggttgtctaaagcagttcttcccaggggagtgcgagagaatcagttgcctgcaggagcttctccagcaggctaaatcagaggtgccaggggtgagcccagcctcacctatatctgaaggacttccctatgctggtgggtggaggcacatccaccttagcattgagtttcaaataagcatcaatcatctccattcctttttttttttttttttttttttgagatggaatcttgctctgtcgcccaggctggagtgcagtggcaccatcttggctcactgcaacctctgcctcctgggttcaagtattctcctgcctcagcctcccgggtggctgggattactagcatgtaccaccacacctggctaatttttgtatttttagtagagatggggttttgccacgttggccaggctggtcttgaacccctgaccggaggtgatccacctgcctcg

SEQ ID NO: 135401 - DNA, 1010 bp, Homo sapiens
tcctcccctcgagttttctaaggttatcaagtcactcctgccagaagtttaatgagtgttaataagtgaactctcattactgccagccctgctgggattagacttgccatctctgagtgaaatgaagagtttaatgttgggcatgggatgtgctgctcagttctctcaacaactctaggagggaaggtgtcattactaccccattttccacatggagaaactgaggcccagagaggtctggtcatttttctaaggagagtcagcggacagcggctggctttgaacccagggctgaatggctccaggggctgtgtccctgactgctaacccggtgggctccaggctgatcgccccctcagccaagggctgagaggggaacgttccttttgaaaagctggcggaacatcctggaaatgttcagaggcagccagaatggaaaaagatgctcaaaggggacagaacttctcaaaggggtggaggctgccctgccatgggtgacacgtggaaaacttgagacatgtgacatccaggcggttagtgggagaattggtcatgctctttggcaaattgcgccctcctcctccctccttctccctgctcctccaaactctaccctgggagggagcacttgggaccacctcagaggaggcctggtggctgtgacccagtcccaaatgtctgcccagacttggagactgcaaagagcgggagcccttccttgagcctcaggagcagtggggttcacagggcccctctagtcaccgtttttaagcccctggtctcagactgcccctccctcaggtctcctgagcttagccacatcatccacgcccttggcacagccacgggatgatgggtgtgatgcgggcatccctcgtgttggcatcctggaccgatatccagggccctgctttctccccatcctcctgcctctcccatgcccctcctcaaaactccttggcctccatcctgccctcagaatcaccacctgtgactcaggcacaccaatc

SEQ ID NO: 135402 - DNA, 1039 bp, Homo sapiens
ggcaggggcatgcaagggagacagagctgaatggattccaccaagagggccagggcccagccaggccccgcggggtactgctcatgctgctggcccccgccttgcatgtcccccagccctcgcatgcttttgcttgtgtttcctgcatgtcctctggtgtgactgctggttttcccctgaaccccctccccagctctgacaaggagcattgcctgtcccagcctgactcaggaggccaactggcaccttgggccctgtcctcccccgattcctcctggataggaatccagaggctgtcccctgcctgattccccatctagctgtccctccacgcctttaggaaggcacagggtagccctgagtatgagggaacaccttgggagctaacggtccccagaggccttaacctaaccagtctgcggggcaggctcattcccatggcctttctcccacgggaaccacccctctgccctgaagttgcccaggtaggccagtgaagagggcccggaaccaggaagacccttgaatcaccatttggaacccacacttgggggaaaggggtggccgtggcttggtgccatcagcgtcctgggaccctaggtctctcttccccgcgttgtgggcattctgtgtgtgcctcccaccctgcgccgcggatccctggactcgtggggtgtgggtgctccctgcccgtgccctctgtgtacgtggctttctgccctcctgcccttccccagctccagcagtacccgcggctacgggaggagatggagcgcatcgtgaccacccacatccgggagcgcgagggccgcactaaggagcaggtgagccccgcagcacccggcctggccgcgccttccttccactcctggccgcctgcgccttccactcctggccctggggttgcttccttcttgttttgtctcttctgtctcagtcttcctctgtctcatactgactctctgcttctctctcttttttattgcagtaaaatacacataacataccactttagccatgtttaagcgcacagttcagt

SEQ ID NO: 135403 - DNA, 1896 bp, Homo sapiens
caacctgtactcgtgtggggaccagaacacgctgatggaggagtcggcggagcaggcacagcggcgcgacgagatgctgcgcatgtaccacgcactgaaggaggcgctcagcatcatcggcgacatcaacacgaccaccgtcagcacgcccatgcccccgcccgtggacgactcctggctgcaggtgcagagcgtaccggccggacgcaggtaccagggccggcccccacggccccaaagccccccagcccggggcccgcgggaggaatgccgggaccgggcagtggcgcgcccgcgtcaccggggtggctcccacctggagcgaggggcggagcttagagagggcggggcttgtcgcggggcggggcttgccgtggagagctggctgcaaggctgggtggagctggggcgttggcgccgctgggggcggggcttaagctccggcgaccgccttaggggtgcggcagggaggggcttgcgtgcatgggcgtggccagcactgggctggggcggggcctctgggtgggcggagctgctcatctcgcctctccttgttcctcgctccctgtcgccctcaggtcgcccacgtccagccccacgccgcagcgccgagcccccgccgtgcccccagcccggcccgggtcgcggggccctgctcctgggcctccgcctgctgggtccgccctggggggggcgccccccgtgccctccaggccgggggcttcccctgaccctttcggccctccccctcaggtgccctcgcgccccaaccgcgccccgcccggggtccccaggtgagtaggggctgaatgcggctggagaggctgccggacgggcgtggccgggagggaaatggggctggattccagagcatcggacctggccgccagaaccggccgtttctatcccaggcaatcggactctgggtgccggagccacgccacgtgtggccgagggctggcggagcctgcccccgagggagcgctgagtcccggaggtggtcgtttctggggagggggctgtggggctcgtcccacctgcccccttctttccagcacttgcatggcgcttccctctattttcactcttggcggccgcccacacgttgcattcctcctcctttcttcttcttgctgtcctccatcctccattccgtccaattcctctcccagcccctggggagcctaccttaggtctgactctgaaccccgatctgctctgagtgtgtggatttccttcagctaccctgatgtccccacttcccagccctgactcctttgagccatcccagggggtgtccagccactggcccacaggagcagaggccaggctgtgactgtgtgactagaaaggtgtgtgatgtgtgtgtgggcgtgcacacgagtgtgagagtgtaagcatggcacccaggcccgggctaggacaggagcagctggggaagcagcctgggccgtgggcaaactgatggcttttttcctccccccaaccaccccctccgcgacttctggccctacccagtctaaaccaatgtggtaggggtggcggcaggggcagggatgggagtgcttgaagcctgcttcattcccaaagatttctagggaaaagctttctactacatcctttggcttgaccttcttgacccatgactctctttcaaggaagttcactccaattcccagtctgccctgtttccactggccacattctctaaggaagaacacagcagaacaatagcatctgttttgtttctgcatggctggagggtagggctgtcggtctagcacccataaaccaaaatgaggcagggattggggcttgccctatgatgctctgatgaccaaagcagatgcgtagaggcaagcagcatggtattgggcaagaggactggactgggag

SEQ ID NO: 135404 - DNA, 1049 bp, Homo sapiens
aacttatttattgatagcataggacagaggaaggaggcggggatggggtcgtggcgccctggtgatgcgactcctgtttattttgctttttatttcggaataaatggatttagccatactgctctgcctgatgtgttcctgtttctctcactgggtcctggagtttgtgccactgaacagggagccccagagtgtctgagcatgtgcagctgggctgttgggaccttccaggcttgttacctgtatgctgcctggtgacatcttggggattacacggggactaccatggtacctatggggacagtttggccccgatggccaacaggctcagaagcctgatctagcggtggccaggaagacaggatgccagcacccaagggcactgacttccatccagcccaggtgtcttccattctgtccccctgcctccctcgcctgcctgagcctggtggcctgttctgtctgtccctccagaatgccagccgccctgccggcgccctccaggctgagttaatggccctgccccctagtggccagagcccgcttcacaggatgagagccccctaagctccaggggctttccaggaaaaatgtcccttggaaaagatgtggtcttttcaccacccccagcagcaccctagtaatggcttagcccttcccctcccctgagctccagagagaacacaaccagcagaggagacattccccatcatccagaaatgggttttattctcagccgagggacagcaggactggtagaaactgtcaggccacacggctgcctgcacagcacccccatgcttggtagggggtgggagggatggcgggggctggctgtccacaggccgggcatgacaaggaggctcactggaggtggcacactttggagtgggatgtcgggggacagcgttctctggtagttgggccacaagactccacaaggatagcacagtgactgattcccagcgctagaggcgaggcggttggccatgtgtaggtgtgtatatatatgagtatttatagatatttatagaacagggcaagggcat

SEQ ID NO: 135405 - DNA, 1394 bp, Homo sapiens
cagcccatgccaagcatcccggaggacctggagagccgggaagccatggtgaggctgactccccctccccaacctttgctgcctccctctgtggtccctcccagacccccttctgctcttggtttcccggccttctgatttcttcggaccctcacccctttcctgggagccagtggtgagacaccatttcacttgggaccaacaagtgcaccctctgaggccccaagggaagggctgctctctacctccctgccctgttcatcctatatatcctcctacaagaatgcacccctcttgcctgcaggtggcatttttcaactcagctgtagccagtgccgaggaggagcaggcaaggctacgtgggcagctgaaggagcaaagggtgcgctgccggcgcctggctcacctgctggcctcggcccagaaggagcctgaggcagcagccccagccccagggaccgggggtgattctgtgtgtggggagacccaccgggccctgcagggggccatggagaagctgcaggtgaatgagtctctcctggcatgggtcaagaagggtgggggcggggcaggtcgctgccgatatatgactccattattttggttccagagccgctttatggagctcatgcaggagaaggcagacctgaaggagagggtagaggaactggaacatcgctgcatccagctttctggagagacagacaccattggtgagtgggaggccagggcacggcaggaggagctgcacagcggtcggagggaacccagcatctgagccctgtcctcccgcaggagagtacattgcactgtaccagagccagagggcagtgctgaaggagcggcaccgggagaaggaggagtacatcagcaggctggcccaagacaaggaggagatgaaggtagggtgtggaacatctctgggggtggaggtgggcacgggcatgggcatggcagcttagcacccctccctccaggtgaagctgctggagctgcaggagctggtcttacggcttgtgggcgaccgcaacgagtggcatggcagattcctggcagctgcccagaaccctgctgatgagcccacttcaggggccccagccccccaggaacttggggctgccaaccagcagggtggtgagtagagccctcgggaggggtgggcaggcaggagtaagggagggctcgcgtggcactcagagccctgcctctctctctccaaagatctttgcgaggtgagcctcgccggcagtgtggagcctgcccaaggagaggccagggagggttctccccgtgacaaccccactgcacagcagatcatgcagctgcttcgtgagatgcagaacccccgggagcgcccaggcttgggcagcaacccctgcattccttttttttac

SEQ ID NO: 135406 - DNA, 1038 bp, Homo sapiens
gtgcctcaggagtggcagagactctggccatggtcctgccatcggagtggggctggggctgggtcggggggccgcgacccggtgcactttacctttttcttcgctgcggccaatttgctctgtcgggtttcttccgacatcgcggggcggggagggaggcggggttggggccacatcagcgcgatcccggcaaccactgcggaagtcagtcagccaccgcgcagctgtgcgacggagccagaggaggcgtaaccagggcgatactggagcgcagaatgggggcgtggcctcaaagatcaaagcccattggtcaatgagaaatatgaagcggaagggggcgtggctatgcagcggcgtggccagagggacctgtggcgtcacaacaaaagctgcgcacgcaaccgctgtccccgcccacctcgggagaggggcggggccggctttccttgggtgcgcgcgcagctttctgtgcgccagttcacactccgggtcagagttcctggcccggtgcacctgagaggtcgctctccgactcccgcgctggaccctcttgcgccattgaaccccctgatccgggggcctcggaccccagggctcaggaggtgggcgaggaacggactccacagtttctttcctgactcctcacagccctgccccagactctcccttcccagaaatcacctccaaagactcccatccagtgctccagacaacccccgtctcagaacgcccccttcctagagggtctctaccctgatcctgagagcgtgtctgccccctttccagatggatccagtccctggcgctcctacttcccaactgctcctcctcccgcatccccacagtaccccgtcctcacagcgggctgtgggtccaatcagactttcccctcggattcctctctaggactgaaccaagacttacccgaagttgccgcggggccttccgatcccctgtgagtatttcttcccccacaccccctttcccatcctcgaccttcccttgtgcgctcccggccccactccccatcccaacagc

SEQ ID NO: 135407 - DNA, 1064 bp, Homo sapiens
catgcctgtaatcccagcactttgggagaccgaggtgggcagatcacgaggtcaggagttcgagaccagcctggccaatatggtgaaaccccatctctactaaaaaattagccgggcatggtggcgcatgcctgtagtcccagctactcgggaggctgagacaggagaatcacttgaacctgggaggcggaggttgcagtgagccaagatcaggttactgcactccagtctgggcaacagagcgagactccgtctcaaaaaaaaaaaaaaaaaaaatcccagatgattaagttctacttgctggaacttagtcatagggccacatctaattccaaggaaggcttggaaatgcagtcttattgagggggttagggtgcctattagcaagcagaagcagggagtgactactgggggacatgtaggctgtgaattgtggataactggtcagtctggctgatgactttttctgcctctcagaggccattgcccaagtctggccaggctgatgggaccagcgaggagtctctgcaccttgacattcagaaactgaaggagaagagggacatgctggacaaggagatctcccagttcgtatctgagtaagtttcattgggttccccatcatggttaagataactttgggctaggcatagtggttcacgcctgtaatcccagcactttgggaggctgaggtgggtggatcacttgaggtcaggagtttgagaccagcctggccaacatggcaaaaccctgtctctactaaaaatacaaaaaatagctgggcacagtggtacgcgcatgtagtcccagctacttgggaggctgaggcagaagaatcgcttaaacctgggagatggaggttgcagtcagctgagatcacgccactgcactccagcctgggcgatggagtgagaatctgtctttaaaaaaaaaaaaaaaaaaaaaaaaggtttaactctctaactgcccagtaactgaaaaacccagtcgcactggcctagcatagaaatacgactgtgcgctactcaggaggctgaggcaggagaatcgcttgaacctggcag

SEQ ID NO: 135408 - DNA, 1001 bp, Homo sapiens
agaggaggaatagcatcatggaggctgcagaggggcaaactcgagcagtgggccatactgaggagtctggaatgttcagcaggcacagcatacaatcagcttacatttgaagcagatgaatccagcagctctgtgtggagaatggaatcgaggaagctctgtttcattcctctgcaaaatggggtgagggtccaaggagtccttgtaggtccattgttgaatacagtggctggcacatggcagagctccagcgtggccaggtggggcccgtgggggacagcctggaaggagtagcagggagcttaccttggccagttaggcaaggcacaagtgtggggactggcttgaagccagaggtggtcctgggtgggtcagggcagtgacactggctcggggcattggctgtactccctcccacctctccccactgcacattcagcctgccttccttcctttcagctgtgatccgaggtgtcaccaccaaagagttgtatccagagtttgggctggacatgaatgactgagcaggctcatcgccccttgtccacagctcccagggacagaagggtgtggacatgataaacactgagagcccaaccagcacacctacagagtttccagcgagacaatgccagaagcacttttctagagagcccaagcccaatcaggaggaggctagagaagaggcgggcagggaggaaggggcgttcccagctccaaggttcctgaaatgtcgcagtgatacttgtgtaggggtacatgtactttatttgtcaataaacgtatctgtacactgattccctcttctccaatagcccccgatagtacctgggataaagagagcgtgcctttgattagaacaggcttacatgagccaggcattgtgctaagtgctttatatccattgtctctgatgcttaaaatcatcctgtgaggaattagcataattatccccatcttacagatgaagacgttgaggctcagagaggagacaaagtgac

SEQ ID NO: 135409 - DNA, 1020 bp, Homo sapiens
cattttacagatagggaaaccgagtcttagtaaaaggcaggttctaacctgggcaagatggcgagaccctgtctctacaaaaaataaaaaattagccagttgtgatggctcagaacgtcccagctactccggaggctgaggcaggtggatcatgtgagcctaggaggtcaaggctgcagtgatctgttatcacaccactgcactccagcctgggtgatggaatgagaccctgttgccaaaaaagggcagattctgacttggcaggtcccggtggggcctgaggttctgcaagtcttaacacatttcaggtggcacccacagggcaggtcctctgaatagcacaacctggagagcttaggggtcttgctaaggttgttacacacctaggaggtatccaaggggtgtgcgttcacaaccacacactagaggctgtgctctcaccaccatgtctgtcattgtgtgtccctggcagaggtgcagtgcatgcatgagacgcagaaagagctgcggaagttggttcatgaaatcggcctggaactaaagaccactgctgtctgcacccaagtgcggcgcacgcgcgacggcttcttcacgctagacagtgccctcctgaggacccagtgggacctaaccaacatccaggatgctatccgggctgctacccctcaggtagctgcagagctggagaagagcttgagcccggggctggacaccaagcagctccccagtccgggatggtcctgggactcccagggcccgagctctaccttggggctggagaggggtgcggggcagtgaatgcccaggcagctcctggggcagtggatggataaatagaagaactgctatgagctggacctgatagctgtgcagaaagtgagagcaggggcaccttttctacgtaagacacaaaactcaagctgtaacagaaaggtcaatggacttgacccaactgagaaggaaaaacttctgtatggaggaaaagacagtaaacatgacagactgatagaaagtattggc

SEQ ID NO: 135410 - DNA, 1006 bp, Homo sapiens
gctgccagtgctggttgtcatggaaaccagccagcagtcttgtaggaagcctgctgactgggagccaggtaccatgtcctgctgaatccaggcagcagtactgtgagactggccctgttactgtccccaggtgacaggagagcttgaatacaaagagagcaagagctgctgaaggccacatgacagagctggtgcccttcctcctggggctgtggagcagctgggcaggggctgggcacatgagcttcctgagggagacctgaggaccccccacccccagcttctggggcaggggctactagggcttagaatggggtcactgacggatctttacctccctgtccttgaaggattacacagtgcgtggcctcctgggcaaagctacagatgacttccgtgaggacgggaggctggtagagaagacaacctatggtgagaaccggaagtggctgccgctgcctccctccgcatttgctttccctgagtcctctccccgccctaggccacgctggccccttctcagttccactgcacacactaggcttgggctgaggctttggccacgggatctgtgctccaggagcatcctctactcccctgcttgcctagctcaaatgtaacgtcacttccaaagactctagtttctctccatctcgtcagtctttgaccttttccttttcttttctttttttttttttttttttgagacggagtctcgctctgtcgcccaggctggagtgcagtggcacgatctcagctcgctgcaagcaccacctcccgggttcacgccattctcctgcctcagcctccctagtagctgggactacaggcgcccgccaccacgcccggcttttttttttttgtatttttagtagagatgggagacggggtttcaccatgttagccaagatggtctggatctcctgacctcatgatccgccctccttggcctcccaaagtgctgggattacaggcatgagccaccgcgcccagcctttccttttct

SEQ ID NO: 135411 - DNA, 3019 bp, Homo sapiens
ttacaggtgtgagccactgcgcccagccgaaagagtgatttttttactgaataaagttgcccaacaatggaactggttctggtaatgtgtccccatcactagatgtgattaaggcatgtgtcagggaatctagaggtttgaccagaaacctcaaaaacccgttggacttgtgatattcaatgactctattatatggtaacaataagaagtataatgtattgagtcgccactctgtactaggcattgtgttaagcttcccccaagtacaatcctcattgatatcaccacagtgctgtgagatgggtcctattttcatttcacaagggagaaaactgaggctcagtgttgacatttagtaacatggcctggattcaataggcccttaactaccctggactcttcccctagattcctcttaatctgtagaagtgtaaacacttctggctcattcctgcatttattctttcagtagttctttcctgagcagctagtgagttgacacacccaggttctgccttaaggagctcacagcctccattttcctccagggactcttcctcagtagagctgggcagggaaccccgcactcttgaccttcagtgttacgccagtcttcttagagcctctcactgggagactgatgataggcagagtaagaggcatcttgggctgccctttggatcccagggcactgaggatacagttcagggtcccagattccatgacggggaagcctgagagtctggcctgatgctagtttgggctccatgaggcccattctgagaacgaggtcaacatgcagcccaaagccatcctggggtggcatttagttgagaaaatggaccttgtttgtttctttccagtatgtggaccagcattcgcccatctcaaggttggcgtgggacatcggttggatgcccaggcttctggagtacttggtaggtgatgtgagaagcctgggggtacagtgataaggcttgagaaaagatcctgaagctaccaggagcccagcccacttcttacctggcacccacgtcccaccactcctctcctgccctgattcctgccccaaggctgatcagctggggagtggataggtgggacggaggtaatcacaggttaataccacagtcacccacctttattcagtgattcccacacatgacatagttcgaggccctttatgcacatttatttaccacaacaactttattaggtagatactatatgattttatggaagaagaaagtaggatttaggtgacttgttctgggtcccatggccagtgaatacccctggtccggagaaggaaaaccatcattgcatcatggggcagccaggcgcgtgactctggacctaatggccagggcctgcatgtggctgggtctggacacacaaagccctagtcatgagccatctgtgtccccagggtcaggtggtgcccacatcctccagccgcgacagtcacagtccccttgtcttgcttcctgaggcacaggcaggcagacatgatctcatgccccctctccctgttctgtctccccacgagtgaatgcagagttattctgtccctcagccagagggagaaacagaccgggagaaaggcaggaagtgaccacagtggccaccgtttattgggcccttcctctgtgccgactgcacagcacccacaggaatcagtattttttttttttcctgagacagagtcttgctctgtctcccaggctggagtgcaatggcatgatctcggctcactggaacctccgcctcctgggttcaagcaattctccctgccttagcctcccgagtaggtgggattacaggtgcccgccaccacgcctggctaattttttttttttttttttgtgagacggagtctcactcttgttgcccaagctggagtgtagtgtagcaccacacctggttaattttgtattttttggtagagatggggtttcaccatgttggccaagctggtctcaaactcctgacctcaggtgatccacctgcctcggcctcccaaagttctgggattacaggcatgagccactgcgcctggccttcagacagtatttttacccccattttactgatggggaacttgacgctcaaagaggctaaagattatactcagagctgtccctgatttgagtgcaggtttgtgtgactaggccagggatctcttcctctcaggtgtcagaatcctgtggagagcttggcagggatcctaggccccctccaaccatgagtcagattcagtgcatatgggtaaggcccagcaatctgcatgtgatatatacccagaggggtgcacctgccccctgtagaagatctttttgccttcttgttgcctttggcagcatcagaaaagggagtattctgatggtgggggtaggggtggggatacttaggggaatgggaagggggtcccaggtgtgagatgacgctggctgcttttcagtgctcggcgtgggacatggatgcaggctcctcaccgatatgtacaatgctcatcttaccaaggtacgagggtctggggacagcctgcttctcccttggtcctttcctgggggtcaccagcaggattctgaagcttagaggattccgtgggggaacacccaagccataagcaagcatttttttgatgatcgtgtgctgtgcaggggctgtaataataataacaataataactaccagtgttagtgtatgccgactactctgtgctgagcactgtacgtggattcctttagggaagcctcacagcctccctgtaaagtggaatctgttgttagccacatttcacagatgagagaactgaggctcagagaggagatgttacttacctaggtcatgtagttgttagggctttaagagctgggatttgaacctaggtctctccaacaccagagcttgatcatgatgccattccctattctgtcccaagactgagaggtagatgtcagcatcctacccacagggagcttaccatccagaggtggggtcggggctatggagtctg

SEQ ID NO: 135412 - DNA, 1697 bp, Homo sapiens
cgcagcagagtcgccatggcagcgggcgtccgcggaggatgggcgggtacgaagaacgccgcgattctgtcaggcgacggagcgtcggaggggtcaaaactcactgaaaaaccgattctgacggcgtagcctacggcctttcgaggggaaacatcgcttcacgggcagaaggcatgtaggccaagtaggcgaaggaaacgcacgcgaactgtctaccgtctacgtccaccgatccaagactctcgccatgtcacctcgccccagaaagtgtctgcaaaggacacgcaaccacgctcactcagcgccgggccctatttccttctccacagccggttttccccgaagactataaaatgcgaacctcttccggctgtggaacatggcggcgcccgtggaaaggaccacatttgggggcggggcctggcggtacttccgtccaggtccagcgggtgctgtgatcttcaagtatggggtctgctggcttgtcgcggctgcatgggcttttcgcggtctataagcccccggggctaaaatggaagcacctgcgggatacagtggagctacaacttctgaagggtgagtgcctcgaaccagacccacgttcccgctctcgttctcttggaagtccatctccgcttctggtccttaccccaaaacaaaatcacgtgacctattcacctgggcagagcgctttcccaaacgcctgttctctgtgctttcttactcctcactttcctctgttttccgagggggaaactgactcagtattgttccttgtcacacggttactacgttgtagagtctgtttgaatccgcctgtttcttaactactgctatactgccctctgcaccatgggcttctgctttgtcttctacatcatacttccctgttgtctaatcccccaagtgtttggacagaacaagatattcctggtcagcatcgtggtgcacgcctgtaatcccagctactctggaggctgaggcaggaggatcgcttgagcccaagagtttgacgttacagtgagctatgatggcgccattgcacttcagcctgggctacagaacgaggccctgtctcttaaaaaatattttatatgtacatatatttgtatgtatgtgtgtatatattatctctgtgtgttcaggtctcaatgccaggaagcctcccgctcctaaacagcgtgttcgcttcttgctgggccccatggaaggcagcgaagagaaggagctgaccctcacagccaccagcgtaccctctttcatcaaccatccactgggtaaggcagatttaagcaggatcctgtgtgtcacttcccaggaaatccctgagccgagtcagtgtcccagtgctcagattcctgtgccaggcccttgaaggtccacagaggagtgaggtattagaccaggaattggcagatttccttggaaagggccagatactgaatgttttagttttcaggccatgtgatttccgttggaactgctcaactctgccaatgtagtgccaaacagctatagacagtatctaaaggaatgagcctagctgtattccaatagaactttatgaatattcatatttgaacttcaggtaattttcacgtgtcactaagtacagttgcctctgagtccatgagttccacatcccatgatccagcttcagattggcagtatttgggaagaaaaacacaaagttccaa

SEQ ID NO: 135413 - DNA, 1106 bp, Homo sapiens
gagctgaggaggagcattctgagtagagggaatggcaagggcaaaggccccttgtgtttaggaaaaggaaggttgaccagtgtggccgcagaggagggagtagcagggagacagtgagtgggctggaaggggagccagggctgcgccctgtaggccaccagaaggaggagtctgtattttgtaataggagcagtaggaaacttgtggaaggttttgagcaggacagtaaagtgacctgatttgtaaaggaccttaggatccagttggcccatcttccctgtccctgtcccatcttccctccctcctgcaacacagatacatcccatcaaggcacccctgccaaatggcgagccagtctggctgatggaggtgaggggtctccaaaggttgccctagaacagtttctcaagccgggcatgttaatgtttaggctggatcactctttgttgtgggggcggtcctgagcctggtaggatgtttagtggcatccctggcttctacccactggatgccaggagcacccccccgtcaagttgtgacaaccacagatgtctccagagattacagatgttccctggtgggcagttgagaaccactgctctgaatggttattgtccccgagacgatgttctgttcctcacagtctcctgcacagctaccttgacggggcgatcacctgcactattttaaaccatctctctcagatttcaccaggatgcaagtcatttcatcagtgggaaactcaccagggtgacctgcctcaagtgctacacagggagggacagtctgaatttcccccagtctttagccctgtcgctgtggaggggagggggtagcagggacaggactgctaggacaccttgctcagccacagccccacttgtaaccgcgctggcgattgtgacacttgtagagcaaggaaatcagcagctcatggaatgtgaaggagcacctttgtccccagagagatttagataaaggttcaaggtgaggctaccctcccctccctgaggctgattttggtgagaggtgtggtcatcttgtagtatcaagactacaggcatgggcttgagaattaggaggagcctgagtgagaatcctggctc

SEQ ID NO: 135414 - DNA, 1403 bp, Homo sapiens
cagagcgagactccgtctcaaaaaaaaaaaaaaaagttgttttaaattgaaaaaaggatgagcacaccagcctcacagtgtgtgtggcagtgtcccacggggcatctgggcctgtctcatttcagtttgtttccacagatatgcatggcattgctgcttgtttgtaggggcttaagggaagacagcttgaataaatatagctcctgccctccaggtgcttagagtcgggtgtatatgtgagtgtaggagagaggcagggagcaagagggcagcaccagggaagagcctggtgatggaagccggggaggcttcttggaggaggtcacccaaggcaggcagatgtgaggtgcagaagcctgcagggcagcacaagcctgcctggctggatggcagtatcactgatttggggccggggagggtcttcatctcgctgaccctcaggggccatccctctgcctccaggaaacatcgtgggaatcggccagtgcctgctgcatggcatgacggtggtgattcggaagaagttctcagcctcccggttctgggacgattgtatcaagtacaactgcacggtgagcgagagcgggaagggtgagctgtccctttcccctagttaccctcttcccaactacactccggggcatctgtcttatagctgaggtggccagtcattccaaagggctcatttgtggcaaagttcccattgttcagatgggaaggctgagacccggagagggaaaggatggcatggccagcccctggggagagtaggggcttgagggatcaggagaatcctagtgtagtgagggcagcctctggagcctcgaatcacaccaagttcacccccagattgtgcagtacattggtgaactgtgccgctacctcctgaaccagccaccgcgggaggcagaaaaccagcaccaggttcgcatggcactaggcaatggcctccggcagtccatctggaccaacttttccagccgcttccacataccccaggtggctgagttctacggggccacagagtgcaactgtagcctgggcaacttcgacagccaggtgcggccaggttggggatgggcgaggctgctgcagggatggcccacagaaggcactggatgcagaggggagggcagagttcgagcgtgagagtgtgggtgctggagtcccacttccccctcattgtccagttttgggcccatggtgagagagcccaggcccaagtcttggccttcgcaggtgggggcctgtggtttcaatagccgcatcctgtccttcgtgtaccccatccggttggtacgtgtcaacgaggacaccatggagctgatccgggggcccgacggcgtctgcattccctgccagccaggtctgccacttcggggtcagagagggaggggttggcc

SEQ ID NO: 135415 - DNA, 1006 bp, Homo sapiens
gggaccaggcctaccttactggtgggtccccagcccttcacagccccttcctgagggttgggggaggaggggaccttctcccacctccagaggacaccttcccaggactcccccagtcctggcccttgtggtcaaacaaatccttgggctccagcaaagcctccctggcttgagccctggtctcagagctggccaggcccagccctgcctcatccggcccctccctaggtgatgtgctggtgatggacgagctgggctacctgtacttccgagaccgcactggggacacgttccgctggaaaggtgagaacgtgtccaccaccgaggtggaaggcacactcagccgcctgctggacatggctgacgtggccgtgtatggtgtcgaggtgccaggtatgtgcaggcaggcgcgaggtgtgggtagggaggcaccacccaggggcaccaccagctactcagtgtctaccctgccacccccaggaaccgagggccgggccggaatggctgctgtggccagccccactggcaactgtgacctggagcgctttgctcaggtcttggagaaggaactgcccctgtatgcgcgccccatcttcctgcgcctcctgcctgagctgcacaaaacaggtgtgtccctcccctgctccagctctcggatcccaggtcccttcccgtttccttctggagagacccggttggctgttacttgacctctgcacacagcctggccgggcagttggtaaagtgacctgcctgtgtagaggtgagcagacggggctggcagagaagacacacattgttccttagtagaacacatattaggtgccaggcacagcgctaagcctcgggatacggctggtgagctctggatgttttgccttcttggagttttagagcaggagagaggctggcctaggacaaggcattccaaaggtaaagaatcgaccacataatctgtcatgagattagagttaaacagataaaaagaaaaatgaaccacagagca

SEQ ID NO: 135416 - DNA, 1033 bp, Homo sapiens
gcaagcacgtccgtgttagaatccagagaatacggttgagcacctgccttatggggctgatgtacagatgaaataagctcacactgttacctggtaggtactcaaagggagacatcacagtcagaagacctccgttctggtccccactctgctgtcactcagcatgtgacactaggcaaatagcctcccttctccaggcctgttttcccatctgcaaagtaggggtgggtgggtaactagcagctgtccccatgccccaactttgccacagctgctgtatgaccattctttgcaaactgtaaagggctgtgcctcctcccccacttccctcccctgtttgtcctccagccctgctccctgccttcctcagtactggtggttgggaagctgggagctcgggcccctgccctgcactgagtcttcttccctgctctcccaggaacctacaagttccagaagacagagctacggaaggagggctttgacccggctattgtgaaagacccgctgttctatctagatgcccagaagggccgctacgtcccgctggaccaagaggcctacagccgcatccaggcaggcgaggagaagctgtgattccccccatccctctgagggccggcggatgctggatccggagccccaggttccgccccagagcggtcctggacaaggccagaccaaagcaagcagggcctggcacctccatcctgaggtgctgcccctccatccaaaactgccaagtgactcattgccttcccaacccttccagaggctttctgtgaaagtctcatgtccaagttccgtcttctgggctgggcaggccctctggttcccaggctgagactgacgggttttctcaggatgatgtcttgggtgagggtagggagaggacaaggggtcaccgagcccttcccagagagcagggagcttataaatggaaccagagcagaagtccccagactcaggaagtcaacagagtgggcagggacagtggtagcatccatctggtggccaaagagaatcgtagccc

SEQ ID NO: 135417 - DNA, 1052 bp, Homo sapiens
agactggcctctcagactctcctaggcgggtagcgtagctcacagcgggcactgggacacccagtgattcggccgtgtcaggccccacggcagaaggaaaggaattctgggcccgacgacttcaatccatccccacggcgccccagctctgtgactcacccgaactccacctccactgacaagggcgcagccatgttgaggaagccgagctcgcaggaaactcccctcaacttccggcgcgcccgcaaatttccgggcgtctccgggtgccgcggacggaagaggcggtgcccagggatccagcttcgtcagctgttggaggaagtcatcgaggggaggggaggggaggggagggcagcggagggaaaggggtggcagagggactatcaccggcgctgttggggctgtgaatcggtctccttccgtctttcaccgactgggctcagagacccagggtgggaagcgccttgtacgggaccacaagcaggcggaggagagcccccaggttttttgcgacgtgaccgtgagccacgtagctgcttatcttgcatgagttagaatctcttcagtctacacaccgcttgggccagcccatctactcgtctggttggaattataaatgactcccagatctttatttccgacccagaatctctcctgagcgggcgactcgctatccagccgccccctttgctgtcgatttggaagtcactcgttcaacagctgttcattgcgcctccctgtgccaggcattttgatcggtgctagtggtaaaggggatgggcaaggttcctgcctttagggcactcacagtctagcggggagactaactgtaatcaaataagcatactaagacatgtacaacctcaaacttaaataaaggaactgaagttataggaacttcaaaaagaaaactgagtagactggacttgctgggctctaaaacctgagtaaactaggtggctgtgaggggagagaaacctctaggagcattccagtgaggaggacaaaaggcccagaggctctgggtgagaacatgctggaacatggag

SEQ ID NO: 135418 - DNA, 1006 bp, Homo sapiens
caggacaacattcctccacccacccacccacccacccaccttctatcacctcctgtcacagcacagcgttccatgaaaattgcagcattctcaggaatgcccaacatgatgctcaacccaggttccttctctctttgtccttgtgttgatgcacgtttttgccctgacctttctttcatttcctatgtatcttagcagacatgattcacccttatccagaactggagcaaatttgcaaaggctaacacgcccttcattttctctcttttgtcccttagtggccccactcccactccagttctggaagggtctccctcctgagcagatgtagtcctcttggccccaccagctcctccagagaccctctggaaggcctctaacaccttccttcttgtcagtgaccacgtctgccaccctttgtcttccccctgaattgttctcagcagagcgttttctcaggtcacgcaggattcaaagtatgtaatatagttgtgttttgtgtccctgtggtccatgttgtaaaggcccagatatggagttctctccgtcccacccctcttcctccttcccaagttggggaggtattggcaaaaggagggaatgtcattgaggtcagagaagaactgggagaaatgggcatttcctttcctttagcagatatttgttgagtgtctaccatgtgccaggccctgttttaggcagagcttgcagcccagcaggtggagaggaagtaaataaacaaaatatatatatacgtgtatatgtatgtgtatatacagaagattaaaagatgaagatacatcagaaaaggtgaaggtggttttgagaatatctatacctgtcactggtatctacaaacacatccaccaagaattgggggggttgaaggaagatggagatatgtcagttgagtttgaatagcagatcttataagacataagagagtctggccttggtctctcctgggctagaacaggccccttgtctgcctccctgaatcactctt

SEQ ID NO: 135419 - DNA, 1023 bp, Homo sapiens
gatcctgtcagccaagggcagtcccccttcctggagcctctcccctctggcatctctgtacccccagggcactgggatcgaaggccacaacccctggtctgtagacaccagaacagggaggagtccctggctgaggttgggggtaaactgagaaaaatgacaagccaccctcttcaacacaccacagttgggctgggggggtggagccctggcctggggaggccgcccacaattaccacagtttgggagtttgttagttcccacccctgtaagacttgacacgtagtcttcatttctggggaattggcttaaaggggcagcatcacccaaaacctgggcacttggctaaacccccacctctgttatgggggccccttccccaggagaggggaggctgtgccccatgacagcagagcttggacccatctgcattcttagggacgcttagagcatggtttggtccttattacaacctgggggtggaggaaagcagcagctcttctgtctagtccccattcagagagggacaggggctggcctgtggtcacacagccacaggtcacataggtaggtatctgcccacctaacgaaggtaaccagggaatgcaccaggtgtgatccttaaagtcgaggtacttttcatctttcaaaatgcattcgttggccaggtgtggtggctcacgcctgtaatttcagcactttgggaggccgaagtgggcagatcacctgaggtgaggagttcaagaccagcctggctaacatggtgaaaccccatctctactaaacaaacaaaaattagccgggcatggtggtgcacacctgtaatcccaggtactcaggaggctgaggcaggagaatcacttgaacccgggaggcggaggttgcagtgagtcgagatcataccactgcactacagcctgggcgacagagcaagattccatctcaaaaaaaatgcattattcttctcttatctttgtccatgacataagcaggacagcttaagttatagagggaggacgtgaa

SEQ ID NO: 135420 - DNA, 1095 bp, Homo sapiens
gatcttagaagcactaggtgagggctggggaactgttccacccacctgctgccggggctccctgcctccccacggtgcccctttccctaggccctggacggagcgggcattggccttggggttccagctttgtccctaactcgttccatgactctgagaaagtccctttccctgttgggccttagtctagcatccctacaatgggggcaggtggatcctgtgatctctgaggtcccgtcctgtggggtgttctgccaaagggggcaggaatgaggctgggggctaggacttcagggtgactgctaacaggagtcagtagggactcgtgcttggggtgtgcttccctttgcagtggacggcccccgcatgcaggcctcagctcatgtgactcggccctctaagaggcccagcaagatagggtttgacgaggtaagtcccccagcctgtgggctcgctgttaggaggtggatgggccctcctcttccgctcccttgcacttaccgcccacccccctgcctcctccaggtctttgtcatcagcctggctcgcaggcctgaccgtcgggaacgcatgctcgcctcgctctgggagatggagatctctgggagggtggtggacgctgtggatggctggtgagcctgcctggtggggggggccctgtgcgcttggggaagcagtgtggtccatctcctagcccgctaggactgggaaaagcagacaggttgaatgagtttcctgtcccatgtagtatccaaatagggtctgagtaatatcctctcagggagttccggagcagacacacgtgggagaagatgccctcctgctgctcaccagaggaggagagcacagtggctgaggctccagggcctgggttccagctctaccagttactgaatgtgtgacctccagccagctacccccatctctcagcccgtttgtataaacagcagataactgtgcccttctcttagggttttgtgagtttagtgaagttagccagggccgggcacatagtttccaaaggcttaggtgtctcccttattattactctccatcctggacttgagctactgatgcgtggggattaggaaaggc

SEQ ID NO: 135421 - DNA, 1050 bp, Homo sapiens
ctcatgcctgtaatcccagcactttgggaggctgaggtgggtggatcacctgaggtcaggagttcgagaccagcctggccaacatggtgaaaccccatctctactaaaaaaaaaaaaaaaacattagctgggcacctgtaatctcagctacttgtgaggctgaggcaggaaaatcacttgaacctgggaggtagaggtttcagtgagctgagatggtgccactgcactccagcctgggcaacaggggctccagttccccaggtccagtcccttgacagcttcaggtcacacaaaggagttacaaggcagaaaccttcttcaaacccgactccagtgtgactgtccccaacatgcacaggcctggcccctctggaggggtctctggcaggcacccctcaccccgccacacctgtgtccctcaggatgctcaacagcagtgccatcaggaacctcggcgtagacctgctcccgggctaccaggacccttactcgggccgcactctgaccaagggcgaggtgggctgcttcctcagccattactccatctgggaagaggtgagggtgcctgcttcctccatccacagccttcggggagaacggggccagtttgttctattcactgctctgtgaacgagtgagtgaatgaagacattcatcaaaacctggccagcagctttcaatctcctctgtgttcaacaccccagtgggcaccactaagcggtgcttgttttcattctgcagtctctcttgagcatctactatgtgctaggagatattctgctctgagaacacagaggaggacaggaacaatgcatgtctgctccttcctgcaataaagggatccccctggggctcagggaccagagcgggattatggaaatcaaaaccaagcttgcagtggaggggagaggtatgggccactttgagaggtgcctcgtgtgggagggggtcagaatggacctcaccattgaggggccgggagaagaggcttctaggcagaagagaacagtgggtgccaaggccctgaggcaggaaggtgtttaggagcag

SEQ ID NO: 135422 - DNA, 1371 bp, Homo sapiens
catttcactccagtctgggcaacaagagtgaaacttcgtctcaaaaaaaaaggaaaattgcaggaggccaaagtgacaagctgggccctggtgttcagcagatgcgggttcatatcccagctctgccacttcctggctgtgtgtccttggacaggcagtttcccatccctgcatgtccacctccttcctgcgattgaggatcatcatctcctgcctcctgagggcccctgcagatacgcagtggcacagccctggggcacagtagcactcagggaatgtagcaagggccacggttaccatcatgattctatctggagatcctcaaatgccagagcgaggttgggatttccggtcccaggcagtggggcccccagcaggctttggggcaactgcatgatgtggccaggccaactgaggccaggcagaggctgtgagcttcagcgtggagggaggggggttgtttaactccgaagagccatctcccaccccattgtatgccacaggtggttgccaggggcctggcccgggtcctggtgtttgaggatgacgtgcgctttgagagcaacttcagggggcggctggagcggctgatggaggatgtggaggcagagaaactgtcttgggacctgatgtaggcagcctgcaccctcagggacaagggggcagggtgggcctccggagtctgccttttcctgcttgggaccctggccggcccatcccctgagagcctggccctgtaggagcgggtgtgggagggtcccatgacacccaggacctaagtgactcctgggccccttggtgtcacttacagctacctcggacggaagcaggtgaaccctgagaaggagacggccgtggaggggctgccgggcctggtggtggctgggtactcctactggacgctggcctatgccctgcgtctggcgggtgcccgcaagctgctggcctcacagcctctgcgccgcatgctgcccgtggacgagttcctgcccatcatgttcgaccagcaccccaagtgaggctctgatgggggccgggcatggcagggcagaggcgtcccctccaggaactcacctcagtcagcaggaagtcccctcacctggcagatggggagactgggactggcaaggccaagccacttggcccaggtcaccaaggagtggctcagcctagccttagagtcagtccattctcggtgtgtactttgcacagtgcatgcaggcttttttttgaaatggagtcttgctctgttgcccaggctagaatgcagtggcatgattttgactcactgcaccttctgcctcccaggttcaagcaattctgctgcctcagcctcctgagtagctgggattacagggaagtgccaccaca

SEQ ID NO: 135423 - DNA, 1086 bp, Homo sapiens
cccaccctccctgccaccccctggtcgctccagcctctctgatctccccccactttggggggccaggtgcggtggctcatgcctgtgcaatcctagcactttgagaggccaaggtgggtggatcacctgaggtcaggagtttgagaccagcctgaccaacatggtgaaaccccgtctttactagaaacataaaaaattagctgggcatggtggcacacgcctgtaatcccagctactcaggagcctggggcaggagaattggagaattgcttgaagccaggaggcagaggttgcagtaagccaagattgggccactgcactccagcctgggcgacagagcgagactctatctcaaaaaaaaaaaaaaaaaaaaggccaggagatggatcagatggttattccaaggcccttcccatcctggactttttggatatactgctgaaagattttggagcaaatagacttttgctctctctcttttttttttttttatttggctgtctttgcagatctggtgatggagctgtacagtatatgtgtaagcaaggtgaattagacatggcattaaaaaaaaatcccctgctgcttgagagcttaaaggatagcaagtggaatattttgggaactagatacttttttattctcttaggggaatatttgagccttaatttgatgagtgtgcgtcacagtgacctctcgtgcctgagcctaatgctctttgaaaaaatttttttttcttttttgttgttgttttgaaacggggtctccctctgccacctaggctggagtgcagtggcgtggttacggctcactgcagcctccacctcccaggcttaattgattctcccacctcagcctcccgagtagctgggactacagacacacgccaccacgccaagctaatttttgtatgttttgtagagatggggtcttgccatgttgcccaggctggtctcaaactcctgggctcaagcaatctgcctgccttggcctccaaaagtgctgggattacaggcatgagacatggcttgtggccactaatgctctatttttgtcactcactcactgcatctttctccagggccg

SEQ ID NO: 135424 - DNA, 1556 bp, Homo sapiens
cctggcatgcagcctgtgtagttctcaattggaaggctccttatttttttgtttttgtttttttttttttgagatggagtctcactcttgtccgcccaggctggagtgcagtgggcacgatctcggctcactgcaacctctggctcctgggttcaggcgactctcttgcttcagcttccagagtagctgggatcacaggcatgtgccaccacatctggctaatttttgtattttcagtagagatggggtttcaccatgttggtcaggctggtctcgaactcctgaccaaaagtgacctacccaccttggcctcccaaagtgctgggattacaggcgtgagccaccacgcccggccggggccttattttggtccaaagcattgagcctagcaatgtggcatagaggaaggacctcccttcagtggcccctgcctgggtccccctgctcaggtcaagatgcaaaaaggtgagcgccagatggccaaaaggttcctggaggaacggaaggaagagctggaggaggtggcccacgaactggctgagactgagcacgagaacacggtgttgaggcacaacatcgagcgcatgaaggaggagaaggacttcaccatgtaaggtggctcctgctctgtccccgctgatctattcctccctaccaggctgccttgagccctgggcaataatggaaagcaacgtaggaggtgggcacaggcactgtgcctgtgccctggagcctgttcaacagtcacacaattaattacagttaattacctggttgtgcttatgatttgtactatgagggaaagggaggaccccgtggattgtggtgtgggactgggtagcagggaactgtttctggaacaagtgatatttaaggggtgtcctgcaggatggttaagcattcggcaggtgggtgctagggaagaaagcacgctactcagtgggaacatcttatgcgaaggccccaaggtgggaaagtgtttgtagctgagaaatggaaggcaggccagagtgggtgggcagaggataagggggccacataggttggcagggggctggctctcagcagccactttgaggcatttgcattgagggcatttggaagccatggaaaggatttattttatttaattaatttatttggccgggcgtggtggctcacgcctgtaatcccagccctttgggagccaaggcgggcaaatcacaaggtcaggagttcgagaccagcctggccaacatggtgaaaccctgtctctactaaaaatacaaaaattaagccgggcgtcgcggcgggcgcctataatcctagctactctggaggctgaggcaggagaactgcttgatcctgggaggcatctcaaaatttttgagatggagtctcgctctgtcatccaggctggagtgcagtggcgtgatcctggctcactgcaatgtccgcctccttgactaaagtaatcctcctgcctcagcctcccaagtaactggaattacaggtgcccactaccatgcccggctaacttttgtatttttagtagagatggggttttagctgttggc

SEQ ID NO: 135425 - DNA, 1103 bp, Homo sapiens
tagcattcactattttatagtgagaatatattcacattacttttcaaattagaactacagttttttgggccaggtgtggtggctcacacctgtaatcccagcacttggggaggccaaagcaggcagattgtttgaacccaggagttcaagaccagcctgggcaaacagggagaccctccaactctacaaataataataatgtttaaaaagttgggcatggtagtgcatgcttgttgttccagctactttggaggctgagatgggaggatggcttgagcccagaaggaccaggctgcagtgagccatgattgcaccactgcactccagcctgggcaacagagtaagactctaaaaaaaaaaaaaaatacaatttttggaaaaggtaaagaatcaataaaatgtagacatctgggtttattgcttaatgacttgactttttcctttgcctttctttgaaggattctgaaagactaatggagcaacaaggagcactgctgaaacggctggcggaggccgactcagagaaagcggtaactaaggctgcccttgtctactctagtgggtacaggtggcaagagcgtcgttccactacaaagtgtagaggtgcttggatcaaggcaggagggctggagcatttcgctaggtcttagtttcacgatctgtaaaatgggctgatgtcctcctgtcacgcttgttctgataggcttgtctagttagttacttgagaccttgagccacaaagctggacaccaacatagagagggtaatgatgatgttggatttgtaaatcatccgtgtctgttaaagctggatttccatcaaattagtattatggattcaaagccatcaaaaagtacacacctttggactcagtaatcctaattctaggaatctctcccaaagcagcatgttccaaagtctgttcatggaaccctaagttcctcaagatgttaatgagtgcaagaaaccgaaggggaggttccatagccagttaaatttgggaaaccataggctggcctgaacatgaagttcaacagcttctttcaagacttttttggagtgtctgctgtattaatgcttttgtaagtctccaagagagggga

SEQ ID NO: 135426 - DNA, 1050 bp, Homo sapiens
gctcaagaacccttgttaagttatgatatacatcagtaacttgaaccgtcaagcagctctttcaaaagacacagaagatttaatcacattatggtaaacatgagcttttaggctatggaacgaagtaggcatatgactttttttttttaacggtgctgagcatatgagtttcaatgtgcattaactggttatctctgcatggggggttacggggtttctttggaggatttttttggtgtgttctcaatgttttctacagttaacattgctgttcttaaattgcaaaataaatacatgttcattgttttaaaaaaatgttttaatgcatatgttaggtgcttcctaccagaatctctgacatgggccaatgtatgtaggaccttgggccccagtggccaggtactcacaaatctctgtcctccctgggccgggcctctttgcccttcccaggggcacctgacagcctgtgttctctcccagcgcctgctgttactgctgcaagacaaggacaaggaggtggaagagctccttcaggaaatacaatgtgagaaggtagtgtgctttttttttttttttttttagacggagtctcgctctgtcgccaggctggagtgcaatggcgcgatctcagctcgctgcaacctctgcctcccggatttgagtgattctcctgcctcagcctcccgagtagctgggactacaggcgtgcgccaccacgcccagctaatttttgtatttttagtagagacggggtttcaccatgttggccaggatggtcttgatctcttgacctcgtgatctgcctgcctcggcctcccaaagtgctggattacaggcatgagccactgcgcccagccgcagttgtgcatttttatgagccagtagaatataatggatatgcagagagctgggttcaaatcctgtctttgggccgggtgcagtagctcatgtctggcactttttcgagaccagcctaggccactccctagcactttgggaggccaatgcaggaggactcattgaggccaggagtttgagactgtcctgggc

SEQ ID NO: 135427 - DNA, 2483 bp, Homo sapiens
tgctgagatgggaggatcacttgagcctgggagactgaggctgcaatgagtcatggtcacgccactgcactccagccttggcaacagtgataccctgtctcaaaaaaaaaaaaaaaaattattgaccatgcgcggtggctcacgcctgtaatcccagcactttgggaggccgaggcaggtggatcacttgaggtcaggagatcgagaccagtctggccaacatggtgaaaccctgtctctactaaaaatacaaaaaactagccggttttgatggcacgtgactgtaaccccagctactcaggaggctgaggcgggagaatcgctggagcccaagaggtggaggttgcagtgagctgagattgcgccactgcactccagcctgggaaacggagcaagactccgtatgaaaaaaacaaacaaaaaattgtgcctccatcactttttccgtctctccacaggctcaagcaaagacagcctctgagctttctaaatccatggagtccatgcgtgggcatttgcaggcacagcttcggtccaaagaggctgagaacagtcgcctgtgcatgcagattaaggtacctattggccccacaagtggggaaagaggaggcaagggcctgccaatttgatggtagcggcctggcccagatatcacactcaggaagtgtgcctccaaaggtttctgaggcagctgatgacaaaatactcaggcctcagagacattccaggacagtggcaagagcaatggacagagacccaggaggtgttgggcatccttcccaacagtgacggggttgcgtgccatgccccccaggcctatcacttaatcccctaggccctcagttctcctcattacccaagggaaagggatggtctctttgtagcccaggggtcctctgaggtcatactctgctgagtgaccaaggaactatctctgaccacaaggctgggagttcagggaaggattccagagcagttctgacctaatatcaagaccccatgggctgagagatccagggaggtgtcgtggggagctgggagggactgtgtctctggtccgagttaggggagcctctcacacagctaagcacttttttctgtcttcctcgtttcctctttgctcttgccttttcctccctttctccttcaccctctgctttgccttcccacaacctccttgtctctcttctccctctctttctcaccccttcccccttccagaatctggagcgcagcgggaatcagcataaggcagaagtggaggccatcatggagcagctgaaggagttgaagcagaagggagaccgagacaaagagagcttgaagaaggccatccgagcccagaaggagcgagccgagaagagcgaggagtatgctgagcagctacacgtgcaactcgctgacaaggtcgcaggcccgcggtgcccagctcctcacctgccctgaggagggctgggtgatggcagaggggtggtcagccagatgggtagcggggaggggtgggtggatgagggatggtagtggtggaaaggatagatggctggggaggagggagagggagttaaggggatcaaatgggtaaaagctggagggatgggtggctggagatgattggaggctttgtaggagagttcagccacatcagctttgtgggtgagaataatggttaaggaaggatttacaaacaggatgcatttgattgctagaaatctgggagcactagctgggctcccactgttgcttccagcgccctctagaaaggtgaattccagaatgaggtttaggttaccagggtgagaaaccacctaggatgagcccgctcccagctcctggcagcctcaccactgacactaggctaacaggcccttttgtcccgtgttcccaggatctttatgtcgctgaagctttatccactctggaatcctggaggagccgctacaaccaagttgtaaaagaaaagggagaccttgagctggaaattattgtcctgaatgagtacgtcttagagtaggagagggaatgtggcgctgttgagggacttgggtgtgcaggtgggaggggcctagtggctcagggaaggccacgtggctgctgtttgtactctccgggttgggggctgcactgggctgtgatgtgggtagccctgagctgggctttctggttggagctggggtgcaagctctggccctagtcctggggtcctaccctactgtcaggcactggctaggggccgggtctttctggtcagaggtgtgggtctgacttcatcacctgggcctgatcctgtcctcagtctacacagcatttgaaatgggcaccgtggtgtcctcattcctattggggaatggggcagatggtgacccgagtgtcttctctctgttgtctgtccagggacagcagctgtttgccagtgcctgccagtcagtaggtcagtggtatggcatgggagtagggggcaaaagtggcctcaatttgcaagtgac

SEQ ID NO: 135428 - DNA, 1050 bp, Homo sapiens
caggcaggcagtatattgagtgatgagaacgctgggtcccacaccacacaaagacctgggttctttagaacctgtgtaattggccgggtgcggtggctcacacctgtaatcccagcattttgggaggccgaggcgggcagatcacgaggtcaggagatcgagaccatcctggctaacacggtgaaaccccgtctctactaaaaatacaagaacttagccgggcgtggcggtgggcgcctgtagtcccagctactcgggaggctgaggcaggagaatggcatgaacacgggaggcggagcttgcagtgagccaagatcgcgccactgcactccagcctaggtgacagagcgagactccgtctaaaaaaacaaacaaacaaaacacacacacacacacacacacacacacacaaacaaacctgtgtaattgattctctctgtctgctttcactttgtgatcttccagccgggtaacagatcttgtaaaccaacaacaaaccctggaggagaagatgcgggaagaccgggatagcctggtggagagactacaccgtcagactgctgagtattccgcattcaagctggagaatgagaggctgaaggttcgcagtgagagctggggaccaggcagctggatggggcccagcgagctgatgaggggtcttgtcttacgtgggcctgggggcatcttgactaagagggagtcagaaaagcctggatttgaccaggcatggtggcttaggcctgtaatcccaacactttgggaggccaaggcaggtggatcacttgagcctagttcgagaccagcctgggcaacatggcaaaatcctgtgtctgcaaaacatacaaaaagtagccaggcgtggaggcatgcgcctgtagtcccagctactcgggaggctgagttgggagaatcgcttgagcctgggaggttgaggctgtggtgagccgagatcgccccactgcactccagcctggaaaacagagagagactctgtgtcaaaaaagaaaagaaagcctggattcaagtccttactctgctgcttcctgg

SEQ ID NO: 135429 - DNA, 5495 bp, Homo sapiens
cccatggtggggaaaaactatgttacatagcagtaagtatagtatagtctcattctttttgacagaaacgaaaaagttatgcagctatagatatatagccatatccaagtcattaagcattaggattagtgtgtcttggttttatccccattttcttttttttttttttttttgagacggagtcttgctctgtcgcccaggctggagtgcaggggcacgatctcaccttactgcaagctccgctttcgggttcatgccatcctcctgcctcagcctcccgagtagctgggactacaggcgcccgccaccacgcccggctaattttttgtacctttagtagagacaggatttcactgtgttagccaggatggtcttgatctcctaaccttgtgatccgcccacctcggcctcccaaagtgctgggattataggcgtgagccaccgcgcccggcctggttttatccccattttctttaatgattatatattgcttttggattaagaaaaaacagaagtcatttatttgcatctctattcacttgaggtggtaacattaggagtcttacctgcttctcggtgcttctctcagggaaagtgctctgtgggttagagtagggggcctttccttttctggttctttggatagagttgagggtaggaggtccacctgaagcagaaccttcctgtgggttactcatgagccatcccttccaggccagctttgctccaatggaggacaaactcaaccaggcacacctcgaggtccagcagctgaaggcctcagtgaagaactatgaggggatgattgacaactataagagtcaggtaggcctcactggggccctggcccttctgagcagtgccctccctgcccccatcagactgggggctccctaccaggccactcccagggagggttgggtatggaagatggttttcatcaaaacgtggctctacctaagatgaaccacagtgttgttggtccctaggtgatgaagaccagattggaggctgatgaagtagctgcccagctagaacgctgtgacaaagagaacaagatccttaaagatgagatgaacaaagagattgaggcggtactgctttccttccttgttttcttctcctacccaattccatatctaactcaatgactgtgagtctgttccccttgtttgcctttgaccctacctgatttgggcaacaaaggtgagctcattttctcattggtgggctcatccactctaccctgtgcctctctctcctttgtctctttcttgtttcctctcttctctctctcatgctgctgctttgtcttttttttttttttctcttggttttcttctacctccttttcaattttcttaaaataacaacaacaaaaaaactctcctggctgggcacggtctctcacacctgtaatcccagcactttgggagactgaggcaggcaggtcaactgaggttgggagttcaagaccagcctgaccaacatggtgaaacccctgtctctactaaaaatacaaaattagccgggtctggtggcgcatgcctgtaatcccagctactcggaaggctgaggcaggagaatcgcttgaacccaggaggtggaggtagcagtgagccgtcattgtgccactacgctctagcctgggcaacaagagtaaatactctgtctcaaaacaaacaaacaaacaaacaaaaaacctcatgcttggagcatccaagtagacagaaatctacagttatgccaggtctttggcatgcctatttcattctatatggtgtccttattttgtaccagccagaaaatatgtctcccatcctcttcccaaagagccttattcttctacagatggtttggctgattagagcagcgggattatcttaatggttaccttggagatgggctgagtccaggctcagccactaatttgtttcataaccttgggcaagtcaagcccctctctggtcctcagtctccgtgttaagtacaaggatggacttagaccagatatttctccctttccctctgacctgtagcattgtgactgctttcctaggggctttagagttagacttttaaaatttattttattttttttgagacagagtcttgctgtgtcacccaggctggagtgcagtggtgtgatctcagctcactgcaacctccacctcccgggttcaagtgattctcctgcctcagcgtcccaagtagctgggactacaggcgtgtgccaccattcccagctaatttttgtatttttagtagagacagggtttcaccttgttggccagggtggtgtcgaactcctgacctcaaataatctgcgccccttggctttccagagtgctagattacaggtgtgagccactgcacctggcttggagttagactagactttaatcctgtgtttaccagtttttagctgaatgaccttgggcaaatgacttagctctcttgatgcttactatacttgtatggggacagcatcacctattttacaggttgtctgaattaaatgagcaagtgtgcagagagcccctggtacaatgcctgggtcttggtgtttactgtgtggttgccattgttacgggataactaaatgaatggcaagccacctgctcaatggccagcggggagtgtaggccacacttctgctgtggattttgcaggatcctccactggggactgtgtcagccctgccctaactctaaaggactctgcctggctccactaggagccaggtctttcctaactgtgggtctttccttcctgtgggtctttccttcctgtttcaggcacgaaggcagttccagtctcagctggctgacctgcagcagctccctgacatcctgaagatcacggaggcgaagctggctgagtgccaagaccaactgcagggctatgagcggaagaacatcgacctcacagccatcatatcagacctgcgcagccgggtaagggactggcagaaagggtcccacgaactgacccgagcaggggcccgcataccaagatgagctgcacgccccccaagggaggactacttcctttttcttggctgctgctttttaaaaggagtgagctatcatcagtgctgtgaaataaaagtctggtgtgccaaatgccatgtgtttgcacaaagtgattgtagttataggagccgtcacttgcgtggagtcactgggccctcctgctgttgcccccacccaagactgctgcctctgcctgtgtgctccgcagctgtcctcagctccacacccacagctgggagatgccagcagacaccgagccgtagaatttctttttttctcttgctttagctgcttctcctgactctttaacagatgcactgcctgagattctgtcctgaaagaagcaagcatccctttctcccagaagcagtctgtctctgggttactggaaccatgcctacggcctgcagtgtccaagaaattatataccactcatttgcagcgtgaccttgggcaaggcccctttcccactcttgacgtgtgtacttgtgataattagaaaaggggctaccattttttgagcacctcttctgtgttcctgcattctctcatttaattccatcaggaactctgtgaggtgcatgtgttattttccccattttacagaaagcagcccaaggcatagagaggagaagtaattccccaccatcacagagctagtacctagtaagcagggattggaacccagccagctctgtctggttcccaagcccacattctcagtactgtaaccttacattgcctgccttctccgttgaacctgagcattctcagggactttgagccttgatagctgaggcttctgcataaaacagccctctgggtaaattctcaaacttgccaactcaaaaggattgacagatttcctgttgtcttgcctgcacttgtccccagttaagaggaggttgagatcaatagtaccagcaacataacaggtaaagctctgtggttggtttgtatgggccagttagccctgccagctgtttctgccttctcatgtctgtcctggatcctagctgggtctctctgagtggcctcccctgatcgagaaagcatctttgtcattctttagcatcaaacctggtttctcccagtgtggggagagccttttgtctttggagttgggcctaacctgtccctgctgtcctttctcctctaggttgtgcgttgagacttggacacctgctgagggcactgtgcccctttcctgggtgtggacaacaggtcatagggaaaggggagggctctagcgggaaattcctttgtaaaccagtctgtgttcctgtcattttagatcgaacaccagggggacaagctggagatggcgagagagaaacatcaggcttcccagaaggaaaataaacagctgagtctgaaggtggatgaactggagaggttagaggcacttggtcccatctctgtcctcttcctaggacctgagactttcagccacttagctgttttttgcttagtgtgcggaagtgttgagggactcgaggccctggaaggtactaggcagacctcagaggaaaagctgcttccatttcagtggtaagcattgtgggagagagcaagggggcctctcagcctggggagacactccatgacagcatgatcaggatctgcccacctgtaggcaccacctgtcccaaaaggcatgcctggtccaggcctgccaggagggcccagtttgaatggagcagccagtatactgtggtgggggcacttccccactcttttctgccctttcttgccagtcacccttcccaagacctttctgatctgaccgttctctgttatttacggattgttggaggcagtcagaggtgaagggtacggctttgggaatcagaagccctggccttggggcccagctctgccacttaccagcattgtgatcttgagcaaatcatttaattcctttgaagctcaatttcctccttttgaggaaagggtcaaggtagagtttatctatctatctatctatctatctatcatctatctatcatgtcactctgtcacccaggctggagtgcagtggtgcaatctcagctcactgcaacctcgacctcctgggctcaagcaattctcctgccacagcctcccaagtagctgggactacaggcgtatgccaccatgcctggctaatttttgtattttttgtagagatggggtttcgccgtgttgcccaggctggtcctgaactcctgggttcaagtgatccacccacctaggcctcctagagtgctgggagtacaggcgggagccaccacacctggctgataataatcttttcatggtggtggtgtgagtcttcaatgatataatcctggtaaaggtcctagcatgttacctggcatagagaagcgctcagtatagcttagaacatgttattagttagctggtattatcccagttttaaatatgaggaaactgagcttggggaggagttaagtgact

SEQ ID NO: 135430 - DNA, 1049 bp, Homo sapiens
tcagtcccgatttcatgaatgactagctctgtgaccttgggcaaatcacctaaactctcagcttatttctccatctgaaaaatgggcacacagtagtacccgcttcatgaattagttgtaaggatcacattttcatcgtagagggctcagcacttgatatctgatgattgctcatttactcactaccctcttgagcctcacataggcttaccacatcttaggtggtgactcctggagcactggcaaagctgggtggcaggcatagtccccatagttagttcctgccccagcgttctagagaacacagtccacaatgatgtgcaagtgctgtctgcaagaccagatagtgggcccagccttctctttgccaagtgttccccatgtccggtaaaccagtctcatgtctgggcctttgaatgtgcaggtggaacaaaccaaggagcacgcactctccaaggagcgagcagcccagaacaaaatcctggaccttgagacccagctgagcagaaccaaaacggaattgagccagctgcggcggagccgtgatgatgtgagtcaggctggtgggccgggctaggagagtgggcagcagacctagcttctgtggggcctgtgggccaaggtgttttgttgttactgtttttgtgaatatgacatggttttatttttctccaatcactttctatcccttaaggatatcctgggtagatatttatttatttatttagagacggagtctccctgtgtcacccaggctggaatgcagtggtacgatctcagctcactgcaacctctgcctcctggtttcatatgatccccaccccaccctcagcctcccaagtagctgggattacaagtatgtgccaccatccctggctacttttttgtgtgtatttttagtagagatggggtttcgccatgttggccaggctggtcttcaactcgtgatctcaaatgatctgcccatcatggcctcccaaagtgctgggattacaggtgtgagccactgcacccagactcacgttttgttttgttttgttttgttttgt

SEQ ID NO: 135431 - DNA, 1289 bp, Homo sapiens
tcactgcagcttcaaactcctggggtcaagtagtcctcccaccccagcctcctgagcagctaggactacaggcgcacaccatcacacccagctaatttttgtattttttgtagagatagagtctcactatgttgcccatgctggtcttgaactcctaggctccagtgatcattccgtcctgacctcccgaagtgttgggattataggcatgagccactgtgcctggtcttagaatattttcagaaagaaaccccatacccattagaagtcactccacactcgcctccccaaacctcctggcaactcctaagaaagtccctatgtctctatggatttctattttggacactgcacagcgggcccatgctctgtttctcctcgttaggcggaccgccgctaccagagccggctgcaagacctgaaagatcgcctggagcagtccgagagcaccaaccgcagcatgcagaactacgtccagttcctcaaatcatcatacgccaacgtgtttggggatggtccctattccaccttcctgactagctctcccatccgctcccgatctcctcctgcctgaggccacttatcagggcctggagccctgatggaagccataggaactccagagttgccaagccatagctgagaagcctggtggttttcctctcccagtgaaaaaatgggttcagggtcttgtccttagctactagctctagaaaagtcccaaaagcagcagaaggtgaagcaggaagcacttggttttctccttcctgatatagtcacctgttggaagtgttaaaatttcctcgacaggccttaaatttactactacattagggtaccacattttaacttaccatgactttgctccttcctttcctgagaaaatatttccactggattttttccaccagtccccttacagccctcattgttttaggaatctctctcaggttttttctgacctaaaccagcaggaagtcgtcctgggctgtaagcaccatcacttgctttttttttttttctgatttcacaagtgtggtgttttcccaaggctcccttcccaagctcagtgcaaacctctcactcccaagtttctttgaggccacttgcccccaagcacttcacaatagaccctcgagggcttgtgtccatttggccttttacaagtgtaatgccaatttcattgatttttgtttcttttggcctgatttgtatctctggaatgcatttattcttgaaatatttgtgtgattttacaaaaagcttttgtaatcagttatttaaggctc

SEQ ID NO: 135432 - DNA, 1137 bp, Homo sapiens
tgtatatcataggtgtgattcatgtgtctttctctccctgtagaattgaagctatcacaagctcaggacagatgggctccttcatacgcctcaagcagttcttggaggtaagatgcccttagaccaacatgccccacactgttgttgggctggaatgcacctatgtctgacaagtcttggaccttccgatgctctgattgcactctcttccttagttcttccaaacccttctttttgttcctaattccctcttaacctttggagtaagggctgccatttcctcttctttatatgtatcattctctatactgcctgtgagaaagctatgctgagatgagtaaaatatatttagtgtatctcctctcattaatatatattttttttgcatgttggccaaggttattttcttagtctcaggtctggggaattggtaagtgtcatcacttttctccatgagatcaaactgcactttcagttggactcttcccctacttccaagtgccaagagattgtaaaaggttaattttgacaaagaatttagaacactatagtgggtttgccaagatagcctgctgacttttcagcttctcaaagctcgattgtgaaaatagtgattgtgaaagatgaggttagcctgtagggagacaagagtgggacaggaataataagagcatttcatttgttgtctggagcagatcatgcagaagtggacatcttatacagaaccatcagtcttactggctttttcctttttgttcactgttccatagggctgaaatatggtgttcctcaaagcttcttttaaccattaagtgttgggaacactgttatcagaaactcattctgttttcttcatctttccctgaccagaaatgtttgcaacacaaggacattcctgtccccaagggctttctgacttcctccttctggcgctcctgatgtcactccatcacccaccatcaccgctgctgcaaagaggcaataataaaggaactgaagacagctgtatttgggagaagtcatgtcagattcagaaatttgccattatgtatttttatgtatttatgccttgtgactaggagaggagattttcatgggtcacaaaattcttggaggtcccttagtagatttggtagt

SEQ ID NO: 135433 - DNA, 1060 bp, Homo sapiens
tggctcaaatcaaataacttaatagcttagcgttcttgtttgtgtgtgtgtttcctgggactgggtctttcgagtcgagatacagtgtcaaaaattctaccataccactgttgaatgatagaacagtcttttgtttgaaagctgtccctgagaatttgattagacgcttcccctagaacatcgctttcaaaagtctctgatgtactagagtaaaatatattttaaataagcgccttgttaaaagttgaatatgttttaaatgaaaagcctaaatagctcagaaagctgggttgagatgatgcttgaactgttccaacatctaatcagatctcttttatataatagatcctaaaatatttaagccctttgttctgtcttcatcatgttattttagaaaaacttaccatcatggctgttcgggaagaacaggagagaggccatatgaagtattttcataatgtgttgagaaattgcgtcgtcatagcaattggccttaagtaaaacagaatgtatcaaagatggaagggtgggggtgtcttggagccaggaaacagaaaatcttggaaatagcaggaggaacactcagctatatgaagccattgagtcaaggttccgactccttaactagtcgtttattttccctttcattgcagctaactaatgtcttagattttgaaaggtcaaattgaatgtgctgcggaggaaaaaaaaagtgctgcagtaaaggcctctgtgcaggaaattaacaataagccttttttagtaactgggccaataattactcaaagggaccctcaaagtgtgttaactgttatccagggaccttgatggagagactggaaaggaggatttttgcttcatcctggacaagtgtgaagcagttcttatggcaaaccatcagcctagtaactgattctctgatatgctttggtcttggcagtgtgttttgtagtcatctaataattggagaaatctggtatgtcacaggctgcagtgtaagcctgtcaagcaatatgatgaagaggtgcacatggggagagctgttttaagtatgtctttt

SEQ ID NO: 135434 - DNA, 1043 bp, Homo sapiens
ttattactttaacaagtggggaaattgaggccccaaggagaatgagacttgaccagggcagcatatctagaaagtaactgccaagacctgggaaccttggttctccttccacattttaaatcccttgtgggatttagacgctatacagaatgtcagagagaagacactgaaaaaatatctgaaattggatttttaatctgtattcatattttttaaataatctgttttcttcatgattttgttccgtttgcccttagaagcttgttatcttgctcttccccctccctctttagactccacattcctccatcatgttgtcatcgtttcgtaaacgcagagtccaggtatttgacgagcatgcagaaaacgggttgcctttttggttttgcctggcttgcagtgaaggcatattcgtgtcaaagaggttgaatgatccaaagaaagggggaaaaaaaccctgcctgcatgacgtttctgttaaacaaattggttaggatttgtttggggttttttggtgttaaattatcagaagtattagtaaatttacttgaaaatttgcaaagcctttttttttttttttttttttttaacctccctctctttctctttaaggcatgaatatattaatttcttaccaccattctggtgtttgcatgtagtgtttgctgactttttattggtggctacttggtttttaagaaccaagggactaaacatattatcctagatatttggagaaaataatctgaaaatacatagtaaaaattgtgtttttaaaatttgacaaatattgtaaacttgggtttgtttcctgttgcattgacttcttccaccacaatttctataatagagcttaccttttcatgtttaaaaaatagctctcgggctgggtgcggtggctcatgcctgtaatcccagcgctttgggaggctaaggtgggtggatcacttggtcaggagttcaagaccagcctggccaacatagtgaaaccccatctctactaaaaatacaaaaaattagccgggtgttgtggtgggcccctg

SEQ ID NO: 135435 - DNA, 1051 bp, Homo sapiens
cctttttcacaaaaaaaaaatttagtatcttgatatcccaaaataaaaaatataaacattggaaatttctagtgtttataggtgataaatccaaggcaggcctttttataaatcagatgagttatttacttaaatgaggtttataaaaatgggccacattataaccatttcctgttttgagtcatagtaacaataaggaacttaaatacctctcatctgaattttgcaggttaaaaggtaagtagcagcaagatagtatttgggaagcaatcagaagtaagttttctcaatattgctctgcatttctggattttgatgcaatgcagtatgaatcttttgctttcttaaagctaagtccctgctcacctctgcaaaattgcgctaacaagttgaaatgaattaatcagtttgaaggctgacatgctgatccacaatcctgattggaatgtggtttaagcaaaaatatttgttgtttttatttatggtgttcagtcatcctttatgtattattgacctctctgcttaccatcaaatctgccactaaaatctgcagctaagctggttttgagttaattttgtttgatctgagaatcaactggtatacaattttatgagtgctaatcaattctttggtggtttgttcttagggaagcccttccacatccatggatatagttctcttgctttgcaaatctgaaatttggtaataggctggcatcctaagccacggaaaaaagacattgttggttctgcacatttgggttctgactaagcaacaaaagcaactgatgaatggtttctatgatcttttgctttgggtgatgtttatgaatttttccataaccaaatgaccaaacgacccgttcatcctgttagtccctaaaaatccctttcttgcaaaactgtatgtctagtggtgtcctgcctgagaatcagaattcattttgtagtattccaaatgtctcttacatccagtgcattcaacttgctgaaagaatggcaatcccaatgctttgtttttaatagagactcctttcagcttcactataat

SEQ ID NO: 135436 - DNA, 1042 bp, Homo sapiens
ttcctctgaatccttgaagcctttgtagaattgacagtacaaaccatagttctcccattcacagttttcatttggtttccttgccgtgtgtgggttaggcatcttctgagggccctatgtaggtaggtgttgcaggggaatggatggccgtttttaataaagaaataggatctgggcttcattgttcctaagaaggggctgtcttctcaattcatttgtctcctgggtttatctgataattatttctttccttcagagaggctaattacttttcatctattttggtgcctattggtacttatctcagcgcattttgtcatttcagaaaatggacccaagtggggtcaaagtgctggaaacagcagaggacatccaggagaggcggcagcaggtcctagaccgataccaccgcttcaaggaactctcaacccttaggcgtcagaagctggaagattcctatcgattccagttctttcaaagagatgctgaagagctggagaaatggatacaggaaaaacttcagattgcatctgatgagaattataaagacccaaccaacttgcaggtacgtctgatctcctgggattcctgccaaaattcaagagcccaaatgttcttacccaaaaatcagacgaggaaagttacttaattatgaccttgagagattggacaagaagaatataataaggaaggacaaactcattgttttcctgtattagtgagggtgaatgtggaatcttagaggtattaattgtcttttctggatgctttaaactgatggttctcaaacctctgccttgatactactggtgagctttaaacatttttcagggaagttctgggttaatctcttggaatgaggttttttgttttgttttgttttgtttttgttttttgaggcagagttgcgctcatgtcgcccaggctggagtgcaatggtgtgatcttggcttactgcaacctccacctcccaggttcgagtgattctccagcctcagcctcccaggttgctgggattacaggcgcctgccactgtgcccag

SEQ ID NO: 135437 - DNA, 1064 bp, Homo sapiens
taggcagggtcaaagagtctggcctctaaagcaagtgaaagaaagtctcatgtgtgagtgaatatggatggatttttcaagagtaagcactgaatgttgagaaaactgttggtatggttctgtatttctagaagggactggatgttcacataaaggctaattttctgatagcaaaaacaaaaaattattaataggatattttgtagcatcttccattgacaatgttagttctcaatggtgagtgaggaccattgatggccctcgctggccaggctttcagaggaccaggagaaatgcagtcagagtatttgaggaattgagcaggtaagagaatgggcaaggtgccaaatgatgtatccctaactagagggagcaggattgaggaggggaggaacacggggaacagcggggacaaaatgctgatgctgtgtggttgcgtctgaggctcacttcaaggtccgccaacagggaaagcttcagaagcatcaagcatttgaagctgaagtgcaggccaactcaggagccattgttaagctggatgaaactggaaacctgatgatctcagaagggcattttgcatctgaaaccatacgggtgagtatgagtagctcgtggagtggatggcttcatctgggtggagcattgtagattcatgcatacatgtcagtttgggttcccaaaaagatagacttttccagcttttaaaagaatttatgaagtctccttaagaagttacccgaatcctgcctttgtaatatgacagcatgaatgcaagcgtttgtatactcagtgaggaaattaatattccttttgcagagcaaattagaatgtgattatactttaaagaaaactgtgaatttaacatttataagtggcagtgagatggcagagcatattagtgaaattggcaaatttaaggactcagatgcaaagataaatagaaacaagcacagacactataaagaaggttatctgtgggaaagcttgctgtcttgaatcttggcttgccctgggaggggtttacgtctaggcagcaagcctgttaaagctccagctctaaggaa

SEQ ID NO: 135438 - DNA, 1125 bp, Homo sapiens
catgtttatgaagtgcacctgcctccctgcccactcacgctctcaaataatagtaagcctgtgaagccagactctctctaacctgcagtatttacaagatcagacacatcagcaatgggacaatggttccagtactgggacaggccttgccctagttctttcttgagggtgtaaaaatgaaatatgtgagatggacaattgacttgaatgtgagaggattttctctagtcttctgtggcctcatttttaatttgagcaggagctctcatttaatcttttactttcatgctcacagttactatggtgatcttggcttggtcatttatttggtcccctaactcagtaccttagtttggcagaaagtggtagcagaggaaggtgggtggcatgtgagggcatgtctgtgtcctggataacctgtctgtcactggtttagactttcacaccataccggacagcgtggcgccccatagtcaccgccacccacatcgggtcccacatccgagtaggtggagtattgacttggttgccttttcccccttgctttggagtgcctttcacttctttctcagtggtggggtcacagttttgccaacagtggtggaagtgaattgtgtgagcatgtattcctctgctgctttctcctttcaagtaaaacatccacacttgtttctaagagaatccacccatgttgactgtcacatggttttcaggttttcattttgctaggagtgacatctcaatcatgggtggatcccagacttcttttctgttagtgtttaaaccgctttgtttgttttacttatgtctgtcagtgttgtacagaaactcccagtatcttgggtaggcataatcaaggcattgaggttggattggaataccagaatgcatcatctaagcttgaattgattactaatttcctccaattcttgataagtccttactgggcctgtgttatgagaacccaaagatgctgggaagtgaatacgtttgaccctgtggctgccacttgggtgaagtttggaataaacctcacttgagatgtaccacaaactgtcttttcacagaaggtccaaagttttttctatcagggatcctttttgatagctgatgacttttcaggac

SEQ ID NO: 135439 - DNA, 1560 bp, Homo sapiens
gattaggaattccactctaataatttaataataattaatagtatcaattgtgtacctattattatataatactaaaatatataactatacaatataaatatatcataaatataattataaatgaaatataaagatattattaataatataaatgataatgattttcctgatgtaaactagagtaaatctacctgtgaaagaactagagtagatctacctacttgtaacttgaagaccaccaaaaaaccactgtgaactgtggacttttccctactgccagttaaatttactatttcctctcagtttagggattatcttttaaaaatatttttattcagcgctccataaggtctctaacttgtctaaactctatggaagagccagatcccacagagccagttgtgatctgattaaaactctgatttgaaactttcagacccgtttgatggagctgcaccgccagtgggaattacttttggagaagatgcgagaaaaaggaatcaaactgctgcaggcccagaagttggtgcagtacttacgagaatgtgaggacgtgatggactggatcaatgacaaggcacgttttgggaagaagggtttgctaagctttactcaaagaaaagggaagagactcctctgtgatctgtagtgagacccagtgttagcacagatacggccattttaagtaaaagggtggaagtggggttgctgtctctccagctgctctctaggtgtatgtgctattctgtaactctgaagcctggagtcgctgagacagaaatgccgtgaactcaacctcttaactttctgtgggaggaactaaaatcacaaaccacagacaaaactgtatccattaaagctaacatggctccgtccctaatgtgtctgtttgatgtttctggaagccattgttaacaaatgttggttggtgactctggctctcttatggtccctgaataggaagcaattgttacttctgaagagctgggccaggatctggagcatgtagaggttttacagaagaaatttgaagagtttcaaacagatatggctgctcatgaagaaagagttaatgaagtgaaccagtttgctgccaaactcatacaggtaaatagcaaagtgctgtatgcttctcacaacattattatgttaactttttagtatattcaggataaaattttgatgattggtcccctaatttctgagtgagcaagtttttgtaagcatgtctgagagttttgtttagatgtgaggcacaatactgattactcctaaattggaaaatgcttttcaatgtgttgccttgggcaggaagggcagagttcatttgatctgtttcctctacccacttttgggtagggctgggtgaagcttttattggactgctgaagctaggtctcagggtttctcagacgagggtgtggtggtgaatgctaagttagtattggcagatgtccaccaatgcattagggctcttgccttccttttttatttgaagcttccctgggctctcttgggagcctgggagaaccttgtcgtgaataggctctccactctggc

SEQ ID NO: 135440 - DNA, 1050 bp, Homo sapiens
cgctttaacaggtgtcaagccagagtgggctttggggaatgggtctcaacctggaggggagttgtgaagcacagggcatgtgctggtgagctgtcgaggctgactaggccttggtcccatggggtgttcctagttctagggagtcatcattgctgtggattaactggtgcctttgttctgtagggatgtggatgagactatcagttggattaaggaaaaggagcagttaatggcctctgatgattttggccgagacctggcaagtgttcaggctctgcttcggaagcacgagggtctggagagagatcttgctgctctagaagacaaggtgggttttacaagcagctgattctgtaaataagttaccaagggtcaggagaatagttctgacggagttcatttctaggtcaaagccctgtgtgctgaggctgaccgcctgcaacagtcccaccctctgagtgcaacacagattcaagtgaagcgagaggaactgattacaaactgggagcagatccgcaccttggcggcagagagacatgcacggctcaatgattcatacaggtgcaaataatgctccaggtcttaaccagtatcatttggcttcttttttggaagcaggaatagcagagttaagggtctgttctgtgttctgtgaaagtgtcaggtatcacctacaaatgcaaatcacttcttacctatgttctctctgtttggagactggcaactgtatcatgtgtagtatacgtatggtatttacaacttcataaattcttctattctgcatcactgcattatgattgatagaatgggaatgtccctttaagtatctgagtatcacatgaaatatcttattaaaaccaggattagaaaggaaaagaatccttgctagccaagggttgaacctgggaataacaaggaagttgaaaatgtgggacaggattggggcattatagtgatggagagaacctaagttttaaagggttgatttcagccttctcttgctttccttcacagtctagattgggaaattttcatatttcccagaattag

SEQ ID NO: 135441 - DNA, 2088 bp, Homo sapiens
ggttataatgagttatgatttgcaccactgcactctggcttgagtgacagagtgagaccctgtctctaaaaaaaaataaataaataaaaataaaatatgtatatatatacatattttattttactttttttatatgtgtatatatatacacatatgtatataagttttgaagtatcttcgagtataaaattgcctaggaacattagataaataatgatttatatgatttatatgttttttagtattacatagagtaaagacatttcaaagacttgtcattagtagcttcggagcctaaagtctagggagtttctgaatttattttccatatgttatggagcacccactcagttgacatttcttagtggagagtccctactccatttatactccattaaactccatttatactgcctcacttttaaatggatgccctatttcttctacctgggagtttacttactgtttttacctaaagtcatttgtgatcatttggcaataaattaattctagattaattaaaacaggccatcccttttatattgaacatgcacatacaagtgaatgttgtttttccccttttgcaaatcggaaaaaaggcctgaagattagcactaggattaggaattccaggatagctgttctgtctgcctcggaggcattggggctgacctcatctccctgaccatgtctcctatgcccccaagctgaccgtcctttccgaggagagagcggcgctgctggagctgtgggagctgcgcaggcagcagtacgagcagtgcatggacctgcagctcttctaccgggacactgagcaggtggacaactggatgagcaagcaggaggtaatctgtgagcaaagccttgccagtggtgggagaagaagggcctgtgttttgcctcctcgggtagtgtgcttgttttgttttaggacatcagtaccatgttagttctgaatccattgaagagggggaattgagcaagcttctctcagctctgccagcatctctccctgctgagattgcaaggccttcagaaaaggccccagcttttcagattagtgtgatgtaaaatgttttattaaagagatttttttcttagaacttagcattgctgggtgcagtggctccctgctgtaatcccagcactttgggaggctgagatgggagtatcccttgagcccaggagctcaaggctgcagcaagctatgatcgtaccaccgcactctagcctgtgcaacagaccgagatcctgtctcacaaaaaaaaaaaaaacaaacaaaaaaaacaaaccttagcattatgtaacatctgaatctaatagaagcaacaaaaactatgtaagagaagtttcaatagaatgtggaataggatttcatgatatggctggattgattttaagaaaatccaaaaggactttagacttcctagaagagatcttagaagtttagcagccataaaatctctttccttctttttatattttggccaaaataccctttgcttcacagtcttagaagatcaaaggaataggacattattctgaacactttgtttcctttggcaaggcgttcctgttgaatgaagacttgggagattccttggatagtgtggaagcgcttcttaagaagcacgaagactttgagaaatcccttagtgcccaggaggaaaagattacagtaagaccccttcttgtcagtgctttcaaatgacccttatagtaagccagagtctttttccctggaaggattccaaacagatttgatgaaagattcatatgcagagtactcctgtgggtgcttaaactttcacaaggatgacatgctatctcgttgaagacataatacaactttatggaaaaatgatttacttaatggaaacctccaaacttctttaagtttgtacccttcattaaaagtaggtcagggttaatattaagaggtactcttcccattgaaaatacatcttagaaataagaatttggaaagctgttaacctgtgtttgacccctgccaggagatcgtgccacaactaatgtctccagtcttgaatggaggtagtgcagtcttatgatatctgactggtgaca

SEQ ID NO: 135442 - DNA, 1129 bp, Homo sapiens
gcgcctggctccgagcctgaatttcttatctgtgaaacggggatgacagcacctctcctgacactgtagtggggagtaagtgaaaccaagtaggaaaagagctgatagagtgcctgcacgtgccagtctcagtaactgagcgctacagtggtactgttactagtctttatgatactatcactaatgccaacttgcgatatctgcttcttagagtctagatagaggtcatggtttgaggaggcaaaaaatgaaacagtccattagagggttagaacctgagcctctcaaaaaaaatggaattatgaaagggcacagctcaccaaaacatagtaatgaaagtgccgtgaacacacagagaaaacttatttttgtccttctgtgatgtgtcaacgtagtttttgttatcctctttccctacccatcttccaggccattttgctgcagaggatgtgaaggccaagcttcacgagctgaaccaaaagtgggaggcactgaaagccaaagcttcccagcgtcggcaggacctggaggactctctgcaggcccagcagtactttgctgatgctaacgaggctgaatcctggatgcgggagaaggaacccattgtgggcagcactgactatggcaaggacgaagactctgctgaggtaaccaggcgtgggaagcgtctcacctgccagggaagtggaacagggcttgtactgagaaggaagttaggagaagtagtgatgcgcgggaggtgtgcattacagtgattgttttttaaaatgttttggaatccatttttcacttggtttttttttttttttttttttttttggagacagagtctcactcttgcccaggctggactgcaatgttacaattgtggctcactgcagcctcaaactcctgggctcaagcgatcctcctgcctcagcctcccaagtagttggaactataggcaggtaccactacctgcctagctacgctttttaattttaattttatttttagtagagacagggtctcgctatgttgtcccatctggtttcaaactcctggcctcaaacaatcctcctgccaaagcctcccaaaatgctaggatgataggaatgaaccaccccttctggcccatttttcacttttt

SEQ ID NO: 135443 - DNA, 1768 bp, Homo sapiens
tcttctgcctgtgaccctctgcaggtatggcaggtgaggaagggactgaattatcagaccttatagaaagtgattttaatatcattttggaccttttttttttatgagacagagtctcgctctgacgcccaggctggagtgcagtggcgcaatctcagctcactgcaagctctgcctcctgggttcatgccattctcctgcatcagcctcccgagtagctggggctacaggtgcccaccaccatgtccagctaattttttttgtatcttttttagtagagacggggtttcactgtgttggccaggatggtctccatctcctgacctcgtaatccacccgcctcggtctcccaaagtgctgggattataggtgtgagccactgtggccggccgttttggacctcttaaaacaacgctctcgtgtgtgtgtatacacgtgacctccttggattctccctctcagagaaggaatttactttcagttctccctcttttttccttaggattggtggaaagtggaagtgaacgatcgtcagggttttgtgccggctgcgtacgtgaagaaattggaccccgcccagtcagcctcccgggagaatctcctggaggagcaaggcagcatagcactgcggcaggagcagattgacaatcagtaaggatgacactgggggccgcaagggctaggcgtcccataggcatactctgttccacatgggccgaagcttaggcgtgtcctgaggctcctggagcccacctgcacgcctcctgctgtctccaccccactttgagcccacagacctccctgtgtgggtctcagacccctgactgatgacttatattgctttgttttttttccaccagtgttcatgagtttttcctaaccagaatttttctaatcattgccatttgccttttggttcgagatgctttttgaaattggattttcagatactctacgcccctacagctctgtccactttgaaaagctgctttcagagcttctctgtctgccatagctttgagttctgagaatggaattttgtaatgaaatggctctgtcctctttcctctagctgagcccccatattgccctgtgtccctcctttagggtatttctgactccactagtggaatcagcagttttggacacttgggaaatatccaggaaatacattcccactagagtttgggtagaatagtgaaatttttgggctccagtgatcctcagtaagatcagagttatttgtccactttatagattctgttactatagagataagaatgggaggttttggtttgtgttctttttttttttttttgagacagattctcgctctgtcatccagactggagtgcagtggtgtgatcttggcttactgcaacctctgcctcctgggttcaagtgattctcctgcctcagcctcccaagtagctgggactgctggcacatgccaccatgcccagctaatttttgtatttttagtagagatggggtttcactgtgttggccaggctggtctcaaactcctgacctcgtgatccgcccgccttggcctcccagagtgctgggattacaggcgtgagccaccacgcctggccttggtttgtattcttaccagtagtctgggtcataaatataagaggaaaaagatcaaatacgtggctaaattgcctgttagcactcagtaaaatttctttctaagggtagtccagtctgttccctgaccttgctctgtgaagttaccagtgttttcagcacaggaaaatct

SEQ ID NO: 135444 - DNA, 1652 bp, Homo sapiens
gattacaggcgtgagccaccgcacccggcctgttttgttttgtttttgagatggagtttcgctcttgttgcacaggctggagtgcaatggcgcaatctcagctcaccgcaacctctgcctaccgggttcaagcgattctcctgcctcagcctcccgagtagctgggattacaggcatggacccccacacccagctaattttgtattttcagtagggacagggtttctccatgttggttaggttggtctcgaactcccgacctcaggtgatccgcccacttgggcctcccaaagtgctgggattacaggcgtgagccaccatgcccccagccatagcttatttttttaatcccccccttttttttttttggtaggcctctgtagaagaatccttatagtttcaagccatagtttgtgactatgtctcctttgactttggcttgctattttgggttttagttattatggcttttgctttaaaggacctgaaggccaatgagtcacggttgaaggacattaacaaggtagctgaagacctggagtctgaaggtctcatggcagaggaggtgcaggctgtgcaacaacaggtaggtgtctccatcttggagtgaggctctgttgctgtaaggatgcagctttgttcctcttgtgtctgtcatagcccaacaagcagtgtttcataacacagaactgtggcttggctgtaggtcaggtcctctatgtgaccaaaaccattttgattaacttctttatacccatatccctcactttcacttggtttggaggggggtgggggcttctgtcttctccgtaagctcattaaatatttaatgtttatatagccattaactaatggtaatttcataagttcctcaaagaaaaagtttatatataaatacttgaagctctgctggacatttggactggcatttccatttgtccttttggaattatctcctgtgtttccaggtttggccataataagtattcttgagagatgtgtatttcttctaataataaaactggtttctctctctccttgtaggaagtgtatggcatgatgcccagggtaagtttcgggtgctgtgtgtggatcttgaacatgagaaggacttaaatcttgggaagaatatcaagccaagaacttcttcatcagaattgctgttcctgaacctcagatgccttttgtgtgtaaagatttgtggaaaactccaaaaattgatttctttttttttgagacggagtctcactctgtcaaccaggctggagtgcagtggtgtgatcttggctcactgcaacctccacctcccaggttcaagcgattctcccatctcagcttcctgagtagctggaattccacgcatgtggcaccacacccagctaatttttgtatttttagtagagatggggtttcaccatgttgtccaggctggtctcgaactcccaacctcaggtgatctgcccacctcagcttcccagagtgctgggattacagacgtgagccaccatgcccagcccagaaattgatttctatttgccattctccaaaagacaaaaaaagttggtttttttttttttcggtcttttgtttgtttgtttgttttttaagagatagggtcttgctttgttgcccagactggaggtcagtggctt

SEQ ID NO: 135445 - DNA, 1906 bp, Homo sapiens
tgacatatctcactctattgggtccaagcatgtcctaagtaaacatcagcacattcatggccgctgggtagcttggtggctttcctggtcaagagcctgccagttctcaacagtggagcaagccttccctctgatttccagtagggcagggagctggaaggagcacagtctcagtaatgcagtgagcggcttccttgccgcctgcagtgcgaggtcctgtggcgtgtcggctcttcccaggcctgctctggcctgagagtctgctgattgggtgttgggaggcagcagactcgctgggatttctccacgcagctgtgacttaggaagcagttgctacctgccaggccccaggctaggaggtgagagtaaggaaaagtcagctgtgtctctcctgctgcctcagagaggatgcctaggtcaggtgtttgtgggtgttgaagctgtcaagcacagctagttttggcttggctcttactggaatattgtatactaatttattcagcgaggaaggttggaaacaggaaattatatatgccctagcatctccttcaaacaaagtcattttcccaaagtctgactgggggcatgacaggagagggagtgcagtggagctgatgttttgctgtcctgcaggagctgaatgagcgctggcggtccctacagcagctggccgaggaacggagccagctcttgggcagcgcccatgaagtacagaggttccacaggtgaggggtcagccctgggctgggagagggagaaacaggtgactgctggtttcctgacagcccccaagcttgctgactgagatcctagagcaactgctggctcttactgatgtttatttgtgacatggggtgggtgctcagtaaatcctgctaagtgaattatttggctttttagagttattggtggtagccacagacaaatatacaaatgtcagctaaataaatttttttaggctgggcgtggtggctcatgcctgtaatcccagcactttgggaggccaaggcaggcagatcacctgaggtcaggagttcaagaccagcctggccaacatggggaaacccacctctactaaaaataaaaaaattagctgggcatggtggtgggcgcctgtaatcctagctacttgggaggttgaggcaggagaatcacttgaacccggtgggggcggaggttgcagtgagctgagattgtgcattgtgctccagcctgggtgacaagaatgaaactccatctcagtaaataaataaataaataaataaataaattttttttagtgtcctgtaatcaaggcagttgtacttggcatttcttaacctgaatgtgtctcgcctttagagatgctgatgaaaccaaagaatggattgaagagaagaatcaagctctaaacacagacaattatggacatgatctcgccagtgtccaggccctgcaacgcaagcatgagggcttcgagagggaccttgcggctctcggtgacaaggtgagaggacccaaagtcatcttctgtctggcatttttgccccagaaagagcagagtcttctgttctgcagagcatacccccttactgcaagctcattcaccactttcttcccataggtaaactcccttggtgaaacagcagagcgcctgatccagtcccatcccgagtcagcagaagacctgcaggaaaagtgcacagagttaaaccaggcctggagcagcctggggaaacgtgcagatcagcgcaaggcaaagttgggtgactcccacgacctgcagcgcttccttagcgatttccggtacggagccatgttcactcagacttctggaacatagagccttctttgtaggggtcatttttattgtgaaaatagtacatgctcagcagggtacaatggctcacacctataatccaagcac

SEQ ID NO: 135446 - DNA, 1633 bp, Homo sapiens
gtatgcccaggcctagggcttcaagggttaatcctaaagaaaggctttttcttttttttcttttttttttagagacagggttgcaccacattgcccaaactgatcttgaattcctgagctcaagcgatcctcctgcctcagcctcccaaagtgctgggattacaggcatgagccaccacgcctggccaacaaaagctttttcatttgaagctatcaaagacttaattgtagctagaacttgttattctggagggtgaaaagatcttaattataagcctactgacttttcctctgagaaattcggacttttaaaaaaataacaagaagttttttaacactttgcccaaagacctagcctcattcagtagatcagattaacccaagataactttctgaggcaagaattatgtcattctctgttttcctgggcagaagatctccttaccaggtaatataatagctatttttctggggtgctggtttccagggacctcatgtcttggatcaatggaatacgggggttggtgtcctcagatgagctagccaaggatgtcaccggagctgaggcattgctggagcgacaccaggtgggtggacctgcctgctgagtagcaaagacgtggctgctctgcagggccctagaggcctcattcccaccctttgtggtgagtcggtggttgacgtcagagtgggcatctgctgccagttacctaatcccttccctccttttggcaggaacaccggacagaaatcgatgccagggctggcactttccaggcatttgagcagtttggacagcagctgttggctcacggacactatgccagccctgagatcaagcagaaacttgatattcttgaccaggagcgtgcagacctggagaaggcctgggttcagcgcaggatgatgctggatcagtgccttgaactgcaggtgtgtgtgctcctggtttctgaccaagtgtttccttgctgaagggcctcattttctcacctgcctcttgccctctttagctgttccatcgggactgtgagcaagctgagaactggatggctgcccgggaggccttcttgaataccgaagacaaaggagactcactggacagcgtagaggctctgatcaaaaaacatgaagactttgacaaagcgattaacgtccaggtgaggcctctggaccatggagttggagtctggatttttcctgattgacatctgtttcttggcttatatagtcactgttatatctccaaggaatacctgcgttgtctaagaaaaatatgtacataaataatctttaaaactttatagattctggtatttctgagattttaataatgggggtgccacaggaaaaaaaaatattatcaaagggatggaaaacaaatgtgtgggtaggtaagggaataatgaacaaacaacaaggaagatgtaaaactgtttgatttatacgtcactttgctgtaaatctgacagcattttcctattatcaggcttaattttgttctgttctgatattctaacacctgccccacctgagtgacctggagacttcttgagttaaactctactctagtaatgaatgaaatcaagctttcttttggcattttacactcttgcttctaaagtgtcagtgt

SEQ ID NO: 135447 - DNA, 1060 bp, Homo sapiens
tctccacggtaagatatgctcatgttggatctcatggtttcactctttcaggtggcgacgtctgaaagcccagatgattgagaaaaggtcaaagctaggagaatctcaaaccctccaacagttcagccgggatgtggatgagattgaggcttggatcagtgaaaaattgcaaacagcgagtgatgagtcgtacaaggatcccaccaacatccaggtaagctgaagtgactgggtgttggtcttgatgtagccttatgttattgagtagattttgttaaataaagcatttataaaacaatctccttgcacccatgggaagtcagtgagaaatatttcagtaagcccagccagtgggaaagccctagtcaagtttcagagccatttaaaagttgccttcctcatttgtctccattaaaactatttctgctgtaataaaagtctatagaatcccccttctattactgttcccaaatgctgagcttcctgggggaagtatgacaaaatgagtttctatttaatagctgatatgtgtgtccacatcagtgtactgaactcttgttcttttaatctgtttttgtagctttccaagctgctggtaagtttttaatttttttaagagttgtagttaaatgagctccagtatttgtgttactctgcgtagattattgttattattgtggtcacacggtttgctggtgtctcttcatccatccttttcatttctaatcatccattacactccattcaagtgtccctgtgggatgtggctttttctgttgtaattagcctgcaacgccttactcccccttctctcccccagtttatcacttaggcaaattctgtacagtgtttgatttgcggggcagtaattgaccattttctttcaaggagtgcttccttttgaagatggaacatcagcttcagctttttctgtgtagacattggctcagacttgctatgagctcatggtgttcggtggcctgggttggggaggccagtctggtgtgagggttttaatgcatacccactctggcatccagaggtgccagtcaggagagga

SEQ ID NO: 135448 - DNA, 1068 bp, Homo sapiens
tttttggtatttttagagcaagcaccagaagcaccaggcttttgaagcagagctgcatgccaacgctgaccggatccgtggggttatcgacatgggcaactccctcattgaacgtggagcctgtgccggcagtgaggatgctgtcaaggtatggcccaccagctcccggtgcccagggaggaagatgaccaccgtcactgtcaacctgatataataacttggacatacagtcttaagacactaaatggattatagaagactttaggctgaattacagatggggaatgctagtgagaatggctcctatgagtgttttccattctcttctcttagaagttctcaaattgagctttaggagagggacgattcttcatagatttcatctctttttggctcccttctgttccccaggcccgcctggctgccttagctgaccagtggcagttcttggtgcaaaagtcagcggaaaagagccagaaactgaaagaagccaacaagcagcagaacttcaacacagggatcaaggactttgacttctggctgtctgaggtaacactgagtggttcctcttcctaccagtgggggatttctagtcatttggcacagtgggtccatcagtgcccaaaaccacgaaaaggcagggctcaccagacaccccttttgacagaaacccttattatatatgagttgcatgctgtaagggatttatgagcaaagggagtgaatgttaagagagctgacttgtagtggcacttggactacaggtcactcacatccatagggaaggcaaataggaagagattatgggtagttatatggcatgcagctctaacaagcctatgccaggttagaaaccaagatagtagcatctgggaagccagagtcagtcatgtattctccatggagaatgtttggaaagcacagactataaaaacatagaggttttggccaggtgcagtggctcacgcctgtaatcccaacactttgggaggccgaggcaggcagatcacttgaggtcaggagttcgagaccagcctgaccaacatagtgaaatcctgtctctactaa

SEQ ID NO: 135449 - DNA, 1015 bp, Homo sapiens
cagctactcaggaggctgagcaggagaatcgcttgaacctgggaggtggaggttgcagtgagctgggatcacaccattgcactccagcctgggcaacagagcgagacttcatctcaaaaaaaaaaaatttttttttttaataattgcgtaagtttatcatagagccatgccataatgtaaccattcccatattgttggacattgaggtgttcccagccttttggtgtatatattttgctgtagtgaatatctttgaatattaatctttgtccacactgctgattctttcctaggggggtttccttgaactaggattgctgtgcattttgccttagctgtagtatttactatgaatagactctggagtctaggtttgactgaccgagtggagagagtgtctcaggccgggcaggctgattggggtggctaggaatcacagtaacacattgtgatggagaagtattcaactgtccaagcaaggccctggaatagccactgggcaacctgaattttccagaatgctgagtatacaccacacagtagcctttgctttttgtgttttcattgccaggtggaggccctgctggcatccgaagattatggcaaagacctagcttctgtgaacaacctgctgaaaaagcatcaactgctggaagcagatatatctgcccatgaggtaagcaaagggaggcgggccaggcccgagtgcctgggacacagctctgcctgactcctaaggaaaacaagcgtgtttgagaaaagagagtgacttctttcacttaaagcagccattctcaaaggttgtggcctcaggatcattatacacttggcagttattgagggctcttgagagatttttattatgtaggttttatcaatgctcaccattattaaaaattacataaattttaaggccaggtgcagtggcttacggctgtaatcccagcactttgggaggcccagacaggcagatctcctgaggtcaggagttcgagaccactccggccaacgtggt

SEQ ID NO: 135450 - DNA, 1044 bp, Homo sapiens
cgtctcaaaaagaaaaaaaaaagacatgacttggaaggccttttctgagatgtgttcaagttaaaccttaaaaatgtgtcgtttttgtttgggtgtatatcttcagcttgctttgtgtcattcttgtggtcctcttgggggagagaccataagtcactgttgatggatgacaaagggtttgacccttcccaaaggtccaaagactgtccctgctgaagcctgtcccaccactgctggttactctcactgcctcactgcctcctgttttccttccttttatgattctctatttattaatgttcctctttattatcctcttccccagctagactgtaatgtgtgcatggacagggaccatagcagttttgtcactctctgtccccggggcctagcccacaacacatagcaggctctcaatagtgtgccttggctgcttctactccagggcttactgaagaaacatgaagcttttgagacagacttcaccgtccacaaggatcgcgtgaatgatgtctgcaccaatggacaagacctcattaagaaggtgagtccagcccattggtaagacctccatcgcccactgggacacccacgtgttggtaccacagaggtcccccaaagttcacttcctgggatgttcaccaaaccaaggtctgcgtggagaccagcagcaattccattcctgtgtttcgtgacaagttggatatttccccctttttgaagccagtaaagttattctgcagtgcttattttttctgcattaagcaacagagacactggcactcccaaatgctgctcttagtttatttctcaagcaatacagtctctttatagggacagtagaaaatgcaaataagcaaaacataaaataaaaattacccataaagccccaccctgacaccacacattagatctttgtgtctgacctgccagacctttcttttctctccacaggtttagagctaccagctagatcaaacagccgcagactcccgtttaataggatcatatcactccataaattatcaaaaacctcgaggctgt

SEQ ID NO: 135451 - DNA, 1853 bp, Homo sapiens
gtaatcccagcactttgggaagccgaggtgggcaaatcacctgaggtcaggagttcgagaccagcctgaccaacatggtgaaacccccatctctactaaaaataattagctgtgcatggtggtgttcgcctattagtcccagctactcgggaggctgaggcaggagaatctcttgaacccgggaggcggaggttgcagtgagccgagatcacgccactgcattccagcctgggcgacggagtgaaattcactccgtctcaaaaaaaaaaaaaaaaaaaaaaaaaagaattcctaaaagtagaattgtcagtacgtgtatttgtgtgaagcctttgaccgcattgctcttacaaaagccttaccctatcattgtttacccagcagtggacaggggagcaagtggcccattttatagaagtttagagcctttccagggagggcatagtcaggtaaccacagcaggtaaggctgaccagtgtgtgcctctctccatggcctagaacaatcaccatgaggagaacatctcttcaaagatgaagggcctgaacgggaaagtgtcagacctggagaaagctgcagcccagagaaaggcgaagctggatgagaactcggccttccttcagttcaactggaaggcggacgtggtggagtcctggatcggtgagcactgtcagcaaggcccggaagagccttcccagagctgctctttgtctccttccgtgtcattggttttcttctgcagagaagaaactgatcaattgtgggcatggcagagaacctactaccagggcagaccactgactgccagctaggaggagacagtgtcctgaggccagaactgccacccggaactgggctggcaccagggtcaataaacaaaagcctgtaaacgctgctgcacgcagagatggcataatgtgacgtcatggcatgaacaaagttggcacagcaaaggcaccactagctgccctggtcaggggcgccacccagctcctgggtgagggaaaactgggtccggatatcggggtccacgtgtcctgggtagtagtaatagcaactgaactagaagacgggctgcagggagctcgtcatggcacagatggaggccaggcctgggtgcagggaggggcctgctaatgtgggttctgaggctgtagttaggaagattgggatttatctgtacacaaaaaatggtttgtctgggttttgatgtttttcctttctaatccatctccactgaggagggcagtatattttccacacttcgttttctaggtgaaaaggagaacagcttgaagacagatgattatggccgagacctgtcttctgtgcagacgctcctcaccaaacaggtctgccctggccccttcactggttgaaatgtatgcagatagcatctgtgagatgactggtggcgtctttcactgaggcatttatcttctgttagcccctggggatcagcaggaaaaagatcctgtcctggtcctcagggagcttccagactaactggggaagcagacacagaaccaggcatctctgcagcagcctgctgggtgctgacgggactgggcactgcaggagcactcactcagttttcagcaggcgagggttgaaggggcaagttctcctaagcgaaatcatgaggggtgaatgaaaacggtcagggagagaggcagggcgagtgttctgggcagagctggcagggatccctggggcgggagagcggaaggctggggtcagggaggtgggaggaggctgccgcagtgatctgcggtctgaaggagagcaggaaagggggcatgtgtgactgagtctcagcagtgtccaggtggacagtttggcttgggcatctg

SEQ ID NO: 135452 - DNA, 2453 bp, Homo sapiens
tggggccacgtgaagcttagctggcccacagctcaaggaaggacgcccaccttctgtctgcccagctctgccactcccccttgaggaagctgtgagctcagtgcagagctttcaaacatgggtgtggctggcatcaattaaaaccagggcaaatgagagggccctgtgagatcgccattcagaagcacgcaggacagactagagacaagggcaaagggtaggaaggggaaaaaaggctggtgaagacttgaagggggagcaggagacaggagcagaggggagctaagctcccagcaggctgtgtgcgcctctgattcccaggaaccaccccgcaccccacctcctgcactgcgtcggcacgtccagccctggcgactccgccaactcagtctcttctgcttccaggtggaggacctcttcctgaccttcgccaaaaaggcttctgccttcaacagctggtttgaaaatgcagaggaggacttaacagaccccgtgcgctgcaactccttggaagaaatcaaagctttgcgcgaggcccacgacgccttccgctcctccctcagctctgcccaggctgacttcaaccagctggccgagctggaccgccagatcaagagcttccgcgtagcctccaacccctacacctggtttaccatggaggccctggaggagacctggaggaacctacagaaaatcatcaaggtacacctcccgctgccctcaggagctgctcggcctcccagagccctctctgggccctgctcagagcccacacttaactgagtcacgacaagacgagcaggatggaggagcatggtttcatcagaagtttcatttctttttgtgttcttgaggcagggtctctgtcacccaggcttcagtgcagtggtgctaccatggctccctgtagcctcaacctcccaggctcaggtgatcctcttgcctgagcctcttgaataactgggactacaagcacgtgccaccacgcctggctaattattttaatttttgtagacagggtgttgctatgttgcccaggctggtcttcaactcctggcctcaagcagtcctcctgcccaggcctcccaaagtgctgggattacaggtgtgagccactgtacccagccagaagtttccatttctgacagtccagcaactccctgcttgactgaccagtcgcttccctccaggtccgcctcttccttgaagcccctggggggtgggaacagagaaagaactaccaagtgctctgagccggcctcatgtctcccagcctcctcctctcatctttggggaggttccttgtggggaggccaccaccaccctgagcccatctgtgaaggaggggctggtgtcactgccacagcagcgcacagcatctgcccccctttggccctcaggagagggagctggagctgcagaaggaacagcggcggcaggaggagaacgacaagctgcgccaggagtttgcccagcacgccaacgccttccaccagtggatccaagagaccaggtgccagcccgctggggccggggagcagcagcatgtccctgctgtacttaagccctggggagcttccagccccaaggaggtggtggtgctttgtgtaaaaccagaggcagcctgggaataaagctgggctggcaacgcctggtcgggctctggagccgggagtgggggcataggtggagcagcctctcagtgctgcatgtcccagacatcaagttgttagagatcccggattgagtgggaccatgcagggcgcgtggtcagccccagccatgacttggtgacagacgatgcagggtctgtgcgttgggtactgatgttcttgcttttgttttcctttctttcttgtgtcttctctctgtccccccgattgctgctgttgtccggacaccaccttgtctcccggctgcttggatctgctctccacaggacatacctcctcgatgggttaatattgttttcttccttctctgggcttgtcatgtgggggtctcgtgcgcttgcccctcgtggcctggcttgtggaggatcccgggatgggccttcctgcccagggcgggctgcacttcccctcccacccttctcgtcacctgatgaggagtgtgtgccttgccccatagcccatggtccctggtccccgatagagccttcaagccagggggagccgtccttgcctcactgggcgattccaagggctcactttgggtagggaaggtgatgaagcacgaaggccagagctggagtccagaggccctaagaacccccgtgcctgtccagccaccgggctctgttgggctctcacctctgcttccccagcgagtccaacagtggtcagtgggcatgaagcagatggcagtgctgggggctcaggcagggtacagtaagtccacagctgagaagggctgggcactgacaccccctaagtagctgaggctgccacttt

SEQ ID NO: 135453 - DNA, 2472 bp, Homo sapiens
actaaaaatacaaaaattaggcaggtgtggtgatgggcacctgttagttccagctactcaggagattgaggcaggagaatcacttgaacccgggaggttgcagtgagcgtgattgcgccactgcactctagcctaggcgacagtgagactccatctcaaaaaaatttataaaaatctttggccactgcttcctggagtcctcgccgtacttgtccttggcgtgcactgccctctggcaggtctaccagctgctttggaaccctcacattgaaagtctctccctctattgaggtggttgggatttcttcagcttcaccccatcccactattcctattctagaatgttcttgttttacgaggtctcaggccaggcctggagcaggaaccagagggcagtaagtggctcctgggctggtgactgagctgagggcccccgtctgagcatctgtgctccccacccctgcagcgcaagcaccaggaaatccgagccatgagaagtcagctcaaaaagatcgaggacctgggggccgccatggaggaggccctcatcctggacaacaagtacacggagcacagcaccgtgggcctcgcccagcagtgggaccagctggaccagctgggcatgcgcatgcagcacaacctggagcagcagatccaggccaggtacccgggagggctgtgggccaggctcagcccagagcagggggaggaaaagacacagtcacctgctgtgtggagggtctgttccctaatttctgtttttcttccaggaacacaacaggtgtgactgaggaggccctcaaagaattcagcatgatgtttaagtgagttcagccttactcgccctggctgggtggggggtgttcggcagcagggctgcctgctgagccgccctcggctttgtgctgcagacactttgacaaggacaagtctggcaggctgaaccatcaggagttcaaatcttgcctgcgctccctgggctatgacctgcccatggtggaggaaggggaacctgaccctgagttcgaggcaatcctggacacggtggatccgaacaggtaaattaattaaggccaggtgctgtgagcctctgcccggggcacccacctgccctccctgctcaggctcttgcttcccccgctcctagagatggccatgtctccttgcaagaatacatggctttcatgatcagccgcgaaactgagaacgtcaagtccagcgaggagattgagagcgccttccgggccctcagctcagagggaaagccttacgtgaccaaggaggagctctaccaggtatgggcctcaggaggtgggtgaagaggtgtcctttggaaaactaaagccaaatttgtggcagagctgagtctggggtaacaggccctgcgctgggtattctccccatttacaaatcaaactcagtatggacagaagtcccggatctgcttgtagaagcagctccgagcccccagcatcctgagacctgggaggtcgggtttgaagtgggtgcagctggctcaggcaccaggtgccatctcttaccccacagaacctgacccgggaacaagccgactactgcgtctcccacatgaagccctacgtggacggcaagggccgcgagctccccaccgcgttcgactacgtggagttcacccgctcgcttttcgtgaactgagccactccctgggtcacccacccctcgctgcttgccctgcgtcgccttgctgcatgtccgctcctctgtgtgctctcactttccactgtaaccttaagcctgcttagcttggaataagacttaggagaaaatggtgcttcactaacccgcttccggtccagtcacaatcatcatgtcactgtggggacccagatctgtgtcttgaagcagctgccctcattccgacttcagaaaatcgaagcagctggctcctccccttgttctctctcccaccctcccccaaatctgttttcatgtaaaagacaaataaatgatgacttcccccaaagctttgcttttcttcatttggcttgcgtcagaaacacaaggctcggcacagcgaaggcttgcacccgcctcccgggacccctcaggccgccacctctgctgccaggcagtccaggtcctcagcttcccggggcccttgttccgtgaactctgtgctcagctgccacaccttcactgtgccctgggcatcgcccgcagccaagagctgagtctgctggctgttgaactccagacagtagacagggctttcatcctgggtttgcttgatcaaaactgtgggtttctgggagcttttctggagatcaaacagctgcacgtcacctgcaaagagagacagatacgtggagtaagagaaactctagagaccaaccacatggcaggaggaggctaatgcccgggttcaatcctgttgtgtgcagccacagtggctttgagttgggttgctggagggaagccgtccttacccccatg

SEQ ID NO: 135454 - DNA, 1357 bp, Homo sapiens
gtgagctgttcccccttccacaggtacgtagggcaggcctggggcacagtggggccagggtgtccctgccctgcgggtctctagcctgccaagcctcatgacaaactgcttcaagtgcttgccttctgcccactctgagacccgtgttcaggtctttggtggttggcccaggcatcgtcccttctctaatgagaggaccaactccaggctgagggacccgggaggctcttcacgagcctggcagcccaggaggggtctggtgttgggggccagcaccacccagaccccagcactgattcccttgcctggccccctgcatcccgtctaggaatctcttcctgagcgctgggactgacgggcatgtccacctgtactccatgctgcaggcccctcccttgacttcgctgcagctctccctcaagtatctgtttgctgtgcgctggtccccagtgcggcccttggtttttgcagctgcctctgggaaaggtaggaaggggccgctaggcctggatctgtttaaggggtgggtggtctgggccctgcttgtacctggggttctgggttggggaaaagaccacacatgggggtaaggacggcttccctccagcaacccaactcaaagccactgtggctgcacacaacaggattgaacccgggcattagcctcctcctgccatgtggttggtctctagagtttctcttactccacgtatctgtctctctttgcaggtgacgtgcagctgtttgatctccagaaaagctcccagaaacccacagttttgatcaagcaaacccaggatgaaagccctgtctactgtctggagttcaacagccagcagactcagctcttggctgcgggcgatgcccagggcacagtgaaggtgtggcagctgagcacagagttcacggaacaagggccccgggaagctgaggacctggactgcctggcagcagaggtggcggcctgaggggtcccgggaggcgggtgcaagccttcgctgtgccgagccttgtgtttctgacgcaagccaaatgaagaaaagcaaagctttgggggaagtcatcatttatttgtcttttacatgaaaacagatttgggggagggtgggagagagaacaaggggaggagccagctgcttcgattttctgaagtcggaatgagggcagctgcttcaagacacagatctgggtccccacagtgacatgatgattgtgactggaccggaagcgggttagtgaagcaccattttctcctaagtcttattccaagctaagcaggcttaaggttacagtggaaagtgagagcacacagaggagcggacatgcagcaaggcgacgcagggcaagcagcgagggg

SEQ ID NO: 135455 - DNA, 1621 bp, Homo sapiens
agactctgtctcaaaaagaaaaccaaccaactaaccaccacaaacaacaaaaaatcatgtgcgtgtagcacagcgtgacgtcgggtggttcgcttgaccccttgtacttggccgcgttgggcacttttatgctgctgggcaaccatccccaccttcctgctgcagcccctgaggcttggaaactgtggagtgtgcctgtgagggcagccacccctctgggcgggagcctggtcggccttgcttctcaggccatgccttctgggcttctggaagcattctgctggggcagatgtggggatgaacgtgccacattttcctctaggcctggctgatggacttgagggcctctagggctaagggtggcctggcctaggtggggtttggttaggcagtcatgaggcccctgctggtggctttggactcagggttggggacgtctccgcaggtgtcttgtctgtataccctgggctacccgccagcccaagcgcagggtctgcatgtgaccagcatctcctggaactccactggctctgtggtggcctgtgcctacggccggtgagtggcagcggggcaggtgaggggcagctcgccaccccaggaccctccttgggccttgtctctgtagctgcacagggaagggctggttctaagagcttggccatcctgggagtctcttctcaagccttcctgggcagggttgacaacaagtggcagaagagcaggcagtggggctgagtgccaggatcaccctcccccctgcctggaggccctgggcctgcctgcctcgcccgccccaccagctgcttccccatcctgcatggcatggactgtccttggtgcctggggaccattttccagagaatgccacacccttggggtgctagagtggagtgtgggccacttcaatacccagagtagtgtctggtggtgacaaggacacagcgagtgtgtccggggctagtggggagagaggtggggtgggtgataggagccccacccaggggcacagccggctcaagcctgtccctgcacaggctggaccatggggactggagcacgcttaagtccttcgtgtgtgcctggaacctggaccggcgagacctgcgtccccagcagccgtcggccgtggtggaggtccccagcgctgtcctgtgtctggccttccaccccacgcagccctcccacgtcgcaggtgagctgcctgctgtgtccgcctcctctcctctcaggactcagcttcccgccctgcagagggcacaagggagctttccatgggccctttggcccggagacaggaaggcgggccctgaccctctcagtctggagcccaggtgaaggtctgcagtgagccctgaggggtggaactcgggggaggagtctggaagggggccagggtcggggccaggacagggggctgtggagaggccagaagaggcaggtgcccttgggaagccgtcagtggtagggggcaggcaacgctggagggagctgccaggtgcagggcaggggtgtccggcaaagctccctggggtacaacaggggagctgggggctaggactctccctctgtggggatgacttccagccaagtggctctgccgcctggccctggccctggccct

SEQ ID NO: 135456 - DNA, 1031 bp, Homo sapiens
ctctcgtgcggacgcactcaggcgcgacctccgcccctacgccgccatgagcggaaaacggggaatgtgaggctgacggcgccatgtttgaattggtcgcagcgcctcctgcaagacctggaagaaagaaaagtaacgattcttctcggccagagagagaagcatgaccggttttgcataccctgtccccagaaaaagcactctaagagtaggcgcgctactcctgggcgaggaaactgcggaagtgaggcattggtgccaggttcaaagatggcgctgagcagccaagcgcagaagcgaagagagggcggcagcctgcggccgtggccggcccgcgaggtctgggcctgggagcgcagatctggctgagcagctgattcttccagcagatccgagaaccgcgccactcgaacaggctgtcacctcgaagccaagtgatctccctttaatcctcagtctctgtctcaatagaatgatgatgaaaaatattcctacggagatcctaaatgtggttaaaaagctgggaggcccaaatgaggtcttctacagaaacatgcttattaaatcgaaattaaaagcaaataactaaataatgtgcctactgtgtgtcaggcaaagagcccagaacgtctctttcttattaagttctcaccctgaggaaagaattgctttttatactatattatgtcgttctgccattccgcgcgccccaccggaattaaaaaaactggagattctgacctgaggactaaaaaataaaaataaagaataaacaaataggccaggtgcggtggctcacacctgtaatcccggtactttgagaggccaaggcaggaggatcgcttgaagccaggagttcgaaaccagcctgagcaacatagtgagagcccgtctctacaaaaaaaatgttttaaaacttagctgggcatggtggcacgtgcctgtagtcccacctactcggcaggctgagtgtaaagatcccttgagtccagtagtttgaggctgcagtgagctatgattacaccactaca

SEQ ID NO: 135457 - DNA, 1673 bp, Homo sapiens
ctggcacctggggcagtctcagtgttcagcctgcttccggacgggcgaggagactcgtggtctggttctgggacttccctaacagcatggcccctaaacgccagtctccactcccgcctcaaaagaagaaaccaagaccacctcctgctctgggaccggaggagacatcggcctctgcaggcttgccgaagaagggaggtacgtttctgcgctaagttttattggagatttaagggatttgcaaggattgactctctgatttttaccccccaatccctcttgagatgtgacccctaagcacccccaaagggttttaaacctgggatggtggattaagtttgcgtgaagaaccagaagggactagactgggagaacgggagtgcacgggagctcatccctgcccccaactcaacactgacccctgagcttgtctccccagcccccaaacttcctcctctggggctccctttcttggcaaggggcactgccagccagcctgaggcccctccttcacccctccacatccagccaaatccccgattcctggtggttctacctcagtatctctcagatctgtccacctctctctctgttcttgctgccgacggcggcccacaactctggcctgaatctctgccacctcctcatcttggcttccagcttcctcctcctccccttcagcctgagcatagccaatcacgtggcccactccccggcttaaacccctcccttgcctccccgcgtcctccaggtgctcagaaacttctctggcccgccaacccggtccccgccgacctctcctggttcacacttctgagactccccacctggaggcctccctcaaggtggtacccttcaccttgacctcttgggactctaccctctgatctcggggcctagacacccacttgccctttcctctccttacctgtgcaccacctccagctctctgctggaaagtcacttcctgtgggcaatctgtgagccccaacacttgggagttaggagtcccagagtcatgctgcctcaccctcttgtcattacattgtaaccagcagtttcatgcctgcccttccccccattaaacttagaggtgagggctgcattttgggagacgtagctggagctggatagagagttgactgttctggtgactaggtctggctcataggggagggttgtggtggagccttcctgggctgggtgtggataggcccagggcctgcaaggaaacgggaagctttgattggctgagggcaggcaactcttatggaagaagcactgaggaggagtcctacctcagggctcagtgtggacctgttggcacttttactgggtctcagtcccttttcctccacatgggatgcagagacctcctgcccagcttgaaacctaccttgctgggtgagccacataaaacaacttgtgcttgttttctcttctataaaatgggatccacagtactgatctccaggcttgctgtgagtctgaaatctaaggggagcactagacagcgcctagcacatcatcagtgctctagagtgcatttgtgcgcagcaaaatgtgggtgagtcttcctagtttccttccagtgagcttcctgggagcattaacaggactggaagggatggaaaggtgtgagggggttcatctaaacccaaagaacagctcct

SEQ ID NO: 135458 - DNA, 1307 bp, Homo sapiens
caaaacaaacaaacaaatgctactaatcagggtttttctggctttttatggttcatgtcttggggtgctggagggacagaatgtggggcatccgcattacttgaaaagtattatttaaacaaaatgctttggccctccttagtggttcagaactttgcctctcaagtagaacttgttggcccctttcatctctatgaacagaacaccgcctatcgcttggggctgttgtgaggcctcggtgagataaccgtgccatgcgctgctgaaactggcacttaacgctcagtatgattcttgcgggcgctgggcaccgcggactaatgtggtacctccctgccttcacaggacttcgagtttaatgtggcttcagtgtcgtaacctttatcatttcataacagaaacgggttcagagaggaagggtgacttgctcaagggtacaagcttgctgggcagggcttggactaaaacccaggaatggccctgcgcgcggattacacagcctggggcttcgcacacgagcccgagtttgagtccgatcggcagttccccatctggcatccagaatggggtgccccctgctttctccacgaagtggaaggcgccgagaggccgggcggaattcggggcccccatacgaggccgggcctgcactttcggggtggtgggcgccccgctcccggtgccccgcggagcagggaagccgctcgctcaccacgtgacgcgccggccgggggcacccgcgcctccgtgcgacgccccgcccaccggcctgccgcgcgccagtgtcctgggtcgggccggagaggggagagcgggggaggggacgcggcgcggggggcggccgtgcgtcgccgcgcgccttcctcccacctctcgccgggccctgtgtctccgcgccgcgactccgccccctcatcccgccgcccaggccaatggcgccgcggcgcgagcctccccggccggaggcggagcatccgcgcggggcctggcgcgcctgcgccctgcgcccgcccctcgccgtaggaggaggtggaggaggaggcggctcgggagagcgagcagcgagctggctggatcgccgagcgcgagtgagggagccgagccgcccgccgccgccgcctccgcctcccctccgcgaacaggagcccgggccggggcccggcacgccgccccagcccgtccctcggcgtcaggccgcgagggtagcgcgcgcgagcgagcgagggggagggagagcgagcgagcgccgggaggaggcggccggaccgagcgggcgcccgcgcgtgtggcgtgaggggaagccgctt

SEQ ID NO: 135459 - DNA, 1001 bp, Homo sapiens
tctgtgcctcactgctttccgatctcatagttgctcccagtaagtgctccaaagtcgtgtggggccgcatctgaggtctgcccgcctgaattgggttggaggggttcatgttctgagaaggcgaaggccagggtgtaggatggtgccccgtgactttccagtctttgtaggcgtgcctggtatcttcatcgtaatagcagagtcgtcaactttctatgaaaggtggttttaccttgataggtggtagtggtggcctaatttgtatcattgtcatgggtttagtttccatattctagttagcagctgctactgttctcttgcaagtgtataatgtgaaataataaacgtgaagacttctgaataaggttattctgtgtctttcatagtagaaaccttaatgatcggtctgttgtagtgaaactctttaaaaaggcgctatagaaaaccaatttctgagtaaaccagcagacagcatgacttgtaaatggtcttttaattaattaaaaagaaattagtcagctacaagcatgaacatgtggaacgcttgcctttgtactaggcgtttttgtttttgttttaatggcttttggaatattatagtattaacatctggaaaactaggtaaatttatcttagaattaagttttttgctccttttttgcagaaaaagaacagcaagaagcgattgaacacattgatgaagtacaaaatgaaatagacaggtaacatttttcttaatatacttcggagaaattttctgagatgtgtctaatagcccggtaattatcgaagctatggtcaaatctatccactgtcaaaggggaaatgattctaacttggttggaaatacttatgtagattcagtgttttttggtgaagtgattgtacagaagtttttgaaagtgcattgaccttacaaggtttgggtttgctttcaaagactgaaaattgtctgaattgcagtgtaggtcttctgatggtttagcagtgtggcatcagtg

SEQ ID NO: 135460 - DNA, 1078 bp, Homo sapiens
ttgcgtgcaacaaagacaggctgggtgcggtggcgcacctgtaatcccagcactttgggaggccgaggtgggtggatcacttgaggtcaggggttcgaaaccagcttggccaacaggttgaaaccccgtctctactaaaaatacaaaaaaaattagctgggcgtggtggcgcgcgcttgtaatcccagctactcgctacttgggaggctgaggcaggagaatcgcttgaacccaggagggggaggttgcagtgagccgagattgtgcgcttttgcattccagcctgggcgacaagagtgagactgtttcaaaaaaaaaaaaaaaaaaaaaaaaacctcaaagacgggaaaagatatacagctactgctttctattctgtttaggagaagctatattctaattgcttgatgaaagatagtgacagtctgatattgagcaattgcctttagttaataatgggtttataaaaccaaagatgctcactaagttcggaaaaattttaaagggatcacttaaattgttgttagtgtgtgcctgttgaaaattcagctgacctgtaattttctggcctagtgtctgcactgcttggggaggaagatgaagaggcactgcattatttgaccagagttgaagtgacagaatttgaagatattaaatcaggttacagaatagattttgtaagtatctctaacttaatcttgtttgccactgtggaaattaatgtgagctttggttggaagacctgttcatatttctaatctttcaattatttattacagtattttgatgaaaatccttactttgaaaataaagttctctccaaagaatttcatctgaatgagagtggtgatccatcttcgaagtccaccgaaatcaaatggaaatctggaaaggtatgttttgaggaattatttgacaaaaatagcattttgcctatttcagtttagttttaaccacttacaagtgcttgatactttggtcatgtggctaaatacaaaaccttaaaatataaaacgttccagtgtgctgaagccaagtattacagtagtttagggttctcattagatactacagatgt

SEQ ID NO: 135461 - DNA, 1002 bp, Homo sapiens
ctaattttatggaaaaccaaatgtagttgatactacctctacctgctgcacagttttataattgctcttaggtaataatggtagcgtagatagtatactgatatttgttttgcttagcttttggggaaaatcttattttttaaattatagggagtttgggtgttatggagagattgtatcaaaagctcttccggtattcatttaggatttgacgaaacgttcgagtcaaacgcagaataaagccagcaggaagaggcagcatgaggaaccagagagcttctttacctggtttactgaccattctgatgcaggtgctgatgagttaggagaggtcatcaaagatgatatttggccaaacccattacagtactacttggtgagttctaatactcatttattcaaggttggacttgtctcggttgtttaaaaatgagtccttatattgtgcttttttttttttaaggttcccgatatggatgatgaagaaggagaaggagaagaagatgatgatgatgatgaagaggaggaaggattagaagatattgacgaagaaggggatgaggatgaaggtgaagaagatgaagatgatgatgaaggggaggaaggagaggtaaaagaaaatttggctaaacccacaaagataacttttaaagaattcatgttattttggggtgtatatatatatatatagtgtggtagaactgaccagaactgattgtggaaaaaaagtaagccattttgttgttcaagaattaaggaaatgtttgataagcacatggtactaatgtttaactaggttttttttggtttttttttgggtttttttggttagacttatcaccacccaagcttgtttttccctagccagtacttaggcaatataggcagtgtagctggtcaaattctgacatctctgaaataacaaagtttcatgtattttcgacaaactgcacaatttctgaatagtcaaattaggataggttggttttatttcggattatt

SEQ ID NO: 135462 - DNA, 1792 bp, Homo sapiens
ttcaggaggatgaaggagaagatgactaaatagaacactgatggattccaaccttcctttttttaaattttctccagtccctgggagcaagttgcagtcttttttttttttttttttttttttccctcttgtgctcagtcgccctgttcttgaggtctcttttctctactccatggttctcaatttatttggggggaaataccttgagcagaatacaatgggaaaagagtctctacccctttctgttcgaagttcatttttatcccttcctgtctgaacaaaaactgtatggaatcaacaccaccgagctctgtgggaaaaaagaaaaacctgctcccttcgctctgctggaagctggagggtgctaggcccctgtgtagtagtgcatagaattctagcttttttcctcctttctctgtatattgggctcagagagtacactgtgtctctatgtgaatatggacagttagcatttaccaacatgtatctgtctactttctcttgtttaaaaaaagaaaaaaaaacttaaaaaaatggggttatagaaggtcagcaaagggtgggtttgagatgtttgggtgggttaagtgggcattttgacaacatggcttctcctttggcatgtttaattgtgatatttgacagacatccttgcagtttaagatgacacttttaaaataaattctctcctaatgatgacttgagccctgccactcaatgggagaatcagcagaacctgtaggatcttatttggaattgacattctctattgtaattttgttcctgtttatttttaaattttctttttgtttcactggaaaggaaagatgatgctcagttttaaacgttaaaagtgtacaagttgctttgttacaataaaactaaatgtgtacacaaaggatttgatgcttttctctcagcataggtatgcttactatgaccttccaagtttgacttgtataacatcactgtcaaactttgtcaccctaacttcgtattttttgatacgcactttgcaggatgacctcagggctatgtggattgagtaatgggatttgaatcaatgtattaatatctccatagctgggaaacgtgggttcaatttgccattggtttctgaaagtattcacatcatttgggataccagatagctcaatactctctgagtacattgtgcccttgatttttatctccaagtggcagtttttaaaattggccttttacctggatataaattaattgtgcctgccaccaccatccaacagacctggtgctctaatgccaagttatacacgggacagttgctggcatgtcttcattggctatataaaatgtggccaagaagataggctctcagtaagaagtctgatggtgagcagtaactgtccctgctttctggtataaagctctcaaatgtgaccatgtgaatctgggtgggataatggactcagctctgtctgctcaatgccattgtgcagagaagcaccctaatgcataagctttttaatgctgtaaaatatagtcgctgaaattaaatgccactttttcagaggtgaattaatggacagtctggtgaacttcaaaagctttttgatgtataaaacttgataaatggaactattccatcaataggcaaaagtgtaacaacctatctagatggatagtatgtaatttctgcacaggtctctgtttagtaaatacatcactgtataccgatcaggaatcttgctccaataaaggaacataaagattttttttggactggggtcattctccttgttttatagagaaa

SEQ ID NO: 135463 - DNA, 1035 bp, Homo sapiens
ccgtgggacagcagaccccctgccacccatccttagagcgctctgggccagcgtgcttggggcctgtggatgatggcagtgcctggggctgaatgccctaagtgagcgcctgtcctattgcccagctcctccagaagtgcccggagaagcgcctcggggcaggtgagcaggatgccgaggagatcaaggtccagccattcttcagggtgagcggctggggtggcggtggtcccctgtgcctggcagggtaggtggcatggagtgactcctggagctgctgttcctgccgtctcaggcgcctctcctttgccctcagaccaccaactggcaagccctgctcgcccgcaccatccagccccccttcgtgcctaccctgtgtggccctgcggacctgcgctactttgagggcgagttcacagggctgccgcctgccctgaccccacctgcaccccacagcctcctcactgcccgccaacaggccgccttccgggacttcgactttgtgtcagagcgattcctggaaccctgagggcatctcctggcacctctgtccccttcccccacagactgttagagcctctgctcgttcacccgtgcgccctgcctggaggtccaggccttgctgggtacttctgagcccttgggattcaaagtggcagccatggggccactgttgtgggctttgctcagtgtcactgggcaaagtgtgtcccttccccctccagctcgccctcttctacctcccagcgagacctggcccagaaagggtgccgcagcaaggagtgatatggtttgtctttttaagactggacttgctttatattaaatttgtaaaagtgtgcactggcagcagcctgggcggggctggggtggagcccggggtctgcttgggcctgagccacccacaggtccttttcttccccttcttccttggaaggcagaactgcccaccaaggcagggatctgtctgacttgaagctccgttctggggtctgggaggcgtgggcaggagtgagggccccaggccctctgagc

SEQ ID NO: 135464 - DNA, 1020 bp, Homo sapiens
caaacatacacagccgccctcagtccagggtgctccgccataccccacacctccattctgcatgggatgggtcccaaactccatacccagagctaagccggcccctaggggagctgcccgccaatgccatctgtctcccaaggggaccctgtcttacaccccacccctcattccaggaggagctcaaagaggagcagacagccatggttcctccagccatccctcttcggcgctgcagatactgcctggtgctggtgagtgatgcacggacacccgtgggagaggttgggccaaagctgagactcctcgacctcctcctgccccactgcctgggcctcgcccctcctccaagaaggccttccagaatcaggccctgattccttccctcagtggtgggcccacagcagggctggcactgagcctccactctcctccatgcccacagcagcccctgagggctcggcactgccgtgagtgccgccgttgcgtccgccgctacgaccaccactgcccctggatggagaactgtgtgggagagcgcaaccacccactctttgtggtctacctggcgctgcagctggtggtgcttctgtggggcctgtacctggcatggtgggtgctgctgcccgggtgtagagggagggtgggatgaatgctcccacaggggtggacagagccaggactcccagggacccggcatggggagggaagggctcccctgccctcccccagcaccaggcccctgtcccctgcaccgcaggtcaggcctccggttcttccagccctggggtcagtggttgcggtccagcgggctcctgttcgccaccttcctgctgctgtccctcttctcgttggtggccagcctgctcctcgtctcgcacctctacctggtggccagcaacaccaccacctgggaattcatctcctcacaccgcatcgcctatctccgccagcgccccagcaaccccttcgaccgaggcctgacccgcaacctggcccacttcttctgtggatggccct

SEQ ID NO: 135465 - DNA, 1172 bp, Homo sapiens
tcaggtgatccacctacctcagtctcccaaagttttgggattacaggtgtgagccactgcacctggcctgaaatgtcacttctaaggatacctgctctgactccccagtccagggcaagtcccctgattgggcatccagagccccaggccccttctcctgcaagacactggtcccagttacgcgacaggcgcttatgggccctgtaggtggatctgtctccctccggagccagtacgctccatgtggtcaaggaccttgtccggctcgctcaccaaggacccccagtgctcagcagggactgagtgagcaggtccagggaggtgataccaaacaagacagcctggttttgccctcatggacctggccatccatcaaggatgctgaatcatcaaagccacatcgtaccaagtgttcattgctgtggtagatcgggcctgtggggggactcagcaggcacaccctggtgggttaagcatggcttcccagaggaagtaactttgacactgggaccataggtatcagctacgtgaaaggagagttcaaagatcatgtgggctggagtggccaggagatacttcctggaggaaggacatggagtgtatttgggtaggggaggggagaaggcagtatttaaattagaaagtgcagtaattagttgaatttggatggtcctggttgaaagagaacagactgggcaaaggtctgaaggtgacctgtgccgagggccttttgccaggacagtgaatgatgaggccaggctggctggagtaggggggcagtggggaccaagtaggccagaaagctggctgtaattccggtgggcttgaaaagagttgctttccaagagtggggactctctgccagcagtgctccctctggttccagtttcccaggcaagagaggctgctgggctcttaaagatcttgaagcaaatgaaggcaaaggaaggccatgcccggggcccaggcatcctggcttttgtgccttccctcgagggtgccatgctgccagtgggacagctgacacaatgagccttgttgtgggagacccaggccggggagcacaggcccggagctgggagccagggcagatgaggtaggagaaggtaatgattataacaacaacataataacggttgtctttattgagcaatgactacatgccagacacc

SEQ ID NO: 135466 - DNA, 2064 bp, Homo sapiens
gctggggggcctgaacagtttagcaggggaggccgagactcctgtaacaatcatgcagtagttaattacaggggggtgagtgcagggaagacgacagggtgacaggtatattgcgtaagtagacactgaggcccagggaagcgcaaggaatagtccagagacacacagtctgcgctgtcaccggcgggttctcaaatttggcccgcagggtcggcggcgctggggctcccggcccgcgattgccacgcccaccagacccgaggttgccccgctcaacccggccggccgtagccgccagtaccgtgtggaagcgtgagagtcgaggggtggcacgtgactggcggggcggggcggggctgaggcggtggaacgcgcaggctagtggctgtgtttcccgccggaggcttttgcgcagagccccgcgtccctggggggcggcggcggcggcggcagcgcaggcggcagaggcgcaggcggcggaggcggctggggggtccggaagtcaacaccatgtcaagtctgcacaagagccggtaaggggccatggggcctgacccggctgggccactcctggccaggctgccccttctgcccctcagaagggggaagcgcgggtgtggccaggaatcggcagaccccctcggcagagggtctcgagcgtccaccttctaacctcattgcctgtgggctgcaggaacgacggaggggcggcccttctcctgcccctgatgtcactgcttctgcctccctcatcctggacccctggtgtcccccttcccctgagtcttcctcatccagacccccatgccccgcccccgtgcctttcccccttttgatccccctgctcccgtactctctccaagtgcaccctgtcccccgtgcctttttcttactaggattgctagagaacttgcattctccagtctggcccctcccccaggccagatcctgcagcattggctgaattttgctcactcttcagttttccttcaggacgtgttttttaaaccctttgtccttgccttctggcaggcccagaggtcttgtaatggttatatttgtgagcatggtccattgtctgcatatcaaattactcctggttcctgaggtccaaggagttcagttggtggctgtgcgtggacccggcctggccggcaggaagtgcccagtaaatgtcagctcactaagtattagaatgttggaatatgtctaattttatggtcctcatttgggaacttctagacaagaatatctctcaagtttcttccctggcattctgtgtttctggttgtagaggaagaagtgaaatatagttttgttgttctccaaagctgtctttggtgaggaccttgactaagctgtgtgatttttatgtcctaaaggggagagaggcacaggttggaaactggcagtgtgagggagctgagggctgtgggtctcactgagccgatatcagcatgcttcatttgccgccctatctccccttccagaattgcagatttccaggatgtcctgaaggagccctcaattgcattggaaaagctgcgggaactcagctttagtggtaagaagccattctgtattttcacggtttccctacagcagccctgtggctagaatacagggggaggccacacctggtcagctctggggcccagctgctgggggctggggccttggaaggaaattacacacagactcttggggccttttccagattctgtagagctgaacaggcagtgactgccttgagcttggaggggtttcccagaggggcagtggccacacttagcatgccctaagctttcctaagctttccgcaggaggtgccagattcctgagagtaacaggacaggactgaagcctggagaatgagagttgggaccttttgagcccaggacagtctttcctcattccttagctagcttcctgtgttggtgagtttggttaactgcagggttgttccttgttctctccctggcttggggtctaagctgcctgaactaaaccttggctagtggtaaaatgggtagccttgggacactgactttaaggagctgatcc

SEQ ID NO: 135467 - DNA, 1023 bp, Homo sapiens
acagagcaagactttgtctccaaaaaaaaaaaaaaaaaaattagcatccagtctaggctgggtatggtggctcacgcctgtaatcctaacagtttgggaggccgaagtggggggatcacctgaggtcaggagttcaagcccagcctagccaacatggtgaaaccttgtctctactaaaaatacaaaaattagctgagcacagtggcgcgtgcctgtaatcccagctacctgggaggctgaggctggagaatcgctggaactcgggaggcggaggctgcagtgagccgagattgcgccacttcactccagcctaggtgttagagggagactccatctcaaaaaaaagaaaccatccaatctagtcatctttcttggggaaatgattcttgaagaagtacttcttgcccactctactccccgccagttggctccacggtgaagggctgggggttctgggactctggcctggggcatgacctttgcctgctgtgtccacaggcatcccctgtgagggcggactgcggtgcctctgctggaaggtgggtgtgcctggggtggggcttctgctctgctgagagtccctgggttttcctgcatgggctgcccctacccctggcttcttcctcctgttctgcacctttccttgcttgtctgagggagcttttctgggaagtcctgggttttctgttcctcttggtgtcttctctgggatccccttggggatgggacactttgtaatgccaacaatgaagacctctgcttcctggtccgtgaagtacagtgaaagtcatgcttattgggacaaaacaaaggctgtgctttgcccaaagctcccagctcaggtggccatggaagcccagtgtcctggtttccagccctttagagcacagggtctgatgatcatgtggaagagtctgtgtgaggaaaagcagagggaagggctggtttgggttaaaggaggagggaggcagtggggaggaagggggaggctacccctagctcatgctggcattcctggatttt

SEQ ID NO: 135468 - DNA, 1047 bp, Homo sapiens
caaatgctgagctcctccctgggcttcacagcacgtgagaaagaaatcgatgggccccaggcccagactcacagataggaattgacgactcagagcatcgatgaatgagagccgaagaaaccaaattcattcattcagcaagcaaacatttactgagcacctgttatatgcaaagttcttgagctagagcaacggacagaaaaggaacagagtccctgcccagcagagaagtcctcagagctggtccccaggctgggctcccggctgtggagtttgaacggattcaggaggctgagggaagggctgtgttggctcctctgagtatcttgcaggtggtgtcaggaccacacctcagtgtgcagtgggattgttgcagcaaggccactgctcaggtttccgggatagaatcgggccccggggcctagctgggccttggacagagcatcttcatttctccccacagccactcaaccccaaccctgacagccggtggaacacgtacttcaaggacaacgaggtgctgctgcagatcgacaaagatgtccggtaggcagggtgcctggggccgggagctggcccatgggacttctggggctctctgcagctctgtcttttccatttgcaggccgggcctatgggtgagtgtttgcggagctgctggtggattgtcccagcggttgggtccaggcactattgatgataggctgagaacgaggctagcgagggagattctgtgcttgcatgtacctggctgttcttatctgagctgtagtttcatttgtaccccaggtgtttatggattcatctgacattcattcaacaagtattgagccccttttgtgtgccaggcttagcactaagttcagggttgagcactggtgtgttccctctccttaaggatcttagaacctagaagggaggatggcaagacagacattcagcccattagatcttagcagatggcattcgtggtaaatgctcctgaaggaaaatttgagggggtttggggaaacctcacctgagaagcagtgattcagctgagatctg

SEQ ID NO: 135469 - DNA, 1492 bp, Homo sapiens
aatcacggctcactgcagcctcgaccactggggctcagctcccacctcagcctcccaaagtgctgggatttcaggcatgagccactgaccccagcattgtctttcttgatgggctcctcctcttctcctccagatgagctccccacacaagaactctgtgccatcatccctaaatgagtatgaggtgctgcccaatggctgtgaggcccactgggaggtggtggagcggatcctgttcatctacgccaagctcaaccctggcatcgcttatgtgcaaggcatgaatgaaatcgtggggcccctctactacacctttgccaccgaccccaatagtgagtggaaaggtaagaaggctcttggtgcccacatccctcgttgctggcccgtgtcaggctgtgcacctcactttccctctcgggcctctgttctccctctgccagatgaggagttggcctggatcatctctgagatcctttgcagctgtgatcttctagaatgttggttgtttactgatctcttgatatttgtaatttaattctgatagagaaggtggatatgtaggaagccgaattataagatttaaataatgatttttaaattgtcatcaggagagtgtgtaataaactgctaagtgaatgtacagtattgccagatgtgagaagaaagaggcgatgtctttagcctgggggtggagaggggtcaaggacagaggaaggactgagccagaccatgaggatggggcaactcggcggggctcagagcagggcagatgtctggtaggtgagaggtggggtgggcctggagtgcgccacttctgcccccatcctgctctctcccagagcacgccgaggcagacacctttttctgcttcaccaacctcatggccgagatccgggacaactttatcaagagcctggatgactcgcagtgtggcatcacctacaagatggagaaggtttactccaccttgaaagataaggatgtggagctctacctgaaactggtgaggaccccaggaacagacgggtggaaagggacaggaggcagagagttgctgtgccatcccagcccagggcgaggtctcgcttgagtctgggggtcagaagtagctgctgctgctgctgcccgggacgctgacccatgtgctgaggcagctgatggtggagcccagctgggagggaaggggaaagttgagaatggtgcccattgtgtgccaggcatactgcagggcatttactatgaactaaattggttaagctgttagtagtcttctgaggtaagtgttaacttcattttttttttttttttgagatggagtctcgctctgtcgcccagactggagtgcagtggcacaatctcggctcactgcaagctccacctcccaggttcatgccattctcctgcctcagcctcccaagcagctgggactacaggcacccgccactgtgcccggctaattttttgtatttttagtagagatggagtttcactg

SEQ ID NO: 135470 - DNA, 1009 bp, Homo sapiens
aaaggaagtatgcttttgctgttttgtagcatgctttttcagttaatattcactgtggctgaccagaaggcttgtctctactgggaataattgcctgtggaattgttctgtggattaaatgagtgagaggacatatttaatattctaagcatagcccaggcttttagtaagtgccctgtgatggtcactcagcacatccacaaacccaaggctatcatctgcaaagtgtgtgaaaagagtttgagccatcatttataaatctggagagcttattatataaaggtttgggtttccagcttctctttaaaaaataggaagatctgaggatgttggctggcagcaaacaggctccgcccctttaccaggcaaggctgtccggcagcctggtgccagccctggtgctcacacctggcatgctgggccctgctgttctgaattcacttctgacccactgcgtggtgctccatggccggcagccaacacagagtcatgccccccaccccccacgctgtctccccagcaagagcagaacatcaagcctcagttctttgccttccgctggctgacactgctgctgtcccaggagttcttgctgcctgacgtcatccgcatctgggactccctcttcgccgatgacaaccgctttgacttcctcctcctcgtctgctgcgccatgctcatgtgagtgcgggcatgagctgtcatcagctcacctgggcagtccttggagaagccagacaggaggaccctccgccccgaagggtgggcagggctgctctttcatggctggagtgggattctggagtccttgggagggcgacaaaccaaacttgaggtgggtagggagggaggagtgggcagggcctgcactcagagcatcccaggtcccagcgcttttgctgctgcttttcataggctgatccgggagcagttgctggaaggggacttcactgtgaatatgcggctgctgcaggtaatgggagttgggggcaggctcagccactgccat

SEQ ID NO: 135471 - DNA, 1047 bp, Homo sapiens
atgttgggtggccttgagcaagtgacttggccttcaaaccgtgtactctacgtaggtgttcacacctaggacacagcaggtgcccagaacatggccgtgcttgctggtggccatgctcaggcccggggaaggagggtggggtgtagtgattaagaacatgggctcaccgggcgcggtggctcatgcctataatcccagcactttgggaggctggggtgggtggaccacctgaggtctggagttcaagaccagcctggccaacatggcgaaaccccgtctctactaaaaatacaaaaattagccgggcttggtggcatgcacctgtaattcccagctgcttgggaggctgaggtaggagaatcactttaacttgggaggtggaggttgcagtgagccaagatcgcatcactgcactccagcctgggggacagagcaagactctgtctcagaaaaaaagaacatgggctcaagggcctacagctttaggtccacagttttgctctgctgtgctcatcatgtgacccaagccaagttacagcatctctgggtctcagcttcttcaccagcacgtggccttagtgttgctttgttgttgtttttttttttttgagacagagtctcgctctgttgtccaggctggagtgcagtggtgcaatctcggttcactgcaacctccacctcccaggttcaagtgattctcctgccttagcctcccgagtagctgggattacaggtgtgtgccaccacgtctggctaatttttgtacctttagtagagacagggtttcaccatcttggtcaggctggtctcgaactcctgacctcaggtgatccgcccacctcagcctcccaaagtgctgagattacaggtgtgagccaccaagcccagcctagagttgcttttccctaacttcatggaccagatctggaaaaagtgcagaatcacagtggccactcacagggctgttgggacttcgcgctgatgctcagacactggcccagtcctactggctccacacgagggagctcgggttcagtggcagtagtg

SEQ ID NO: 135472 - DNA, 2785 bp, Homo sapiens
tgtgcccaggactaccccatcacagatgtctgccagatcctgcagaaagccaaggagctccaagactcaaagtagcccggcggcaagaggcccatgttccggagagaagcctcccgaccctgtgccctggctcccgggacacatagaaacctgtaggaacccagcctgaggggaagccacaggatcggcccgagacccaggccatgcccactggggacacactgtgccgtgctccttctgccgccacgcccagctccccacctgccctgcactctgccctctttgcccaggatactgaggagggctggagctcgggaagttgtccttcctgggccagggccgtttctggcactgggaggctggcaggggcccctccctgcctcggctctgccgccccagcctcagttcctgcttctggtcttctcctgggctccactcaggggaggtgcttggccaatgggccagaaaccgcttctgagcggggcacttcggctgctccacagggaaggcgacactgaaagctgagtcctgccgtctgtctcacccacagatgtctgtagtcggtcggtgtgaatgtgggcccaagtccccaggcatcttctccgtgtgtgtgtgtgtgtgtgtgtgtgtgtgtgtgtgtgtgtgtgtgtgttagggagtgagggtctctcaggcctccaggtctcccagcccctccttctctgtctctacctctctgcctgtctccttccacctccttcccagagtgggactgtgtcttgcttcatgattcctctctccattactctccctgcccttctctgttggggtgccttatcctgagccacctcctctccccgcttgcctctgctcccctgaacctgggagacagatgaggagactggctcagcaaggcccctggaggtcaagcttggcctttgcctcctgttcccatcccccagccctggctcctaggtcctcccaactgggagggagtcctccgtgcctcacttagagggttctgaacccgttccctacacagaaatcttggaaaccaaatgctgctgagtaaggatgaagctttgagcctcctgcccctgctttctgcccagggagggagaaggaagagggggagctggtttttctggaggttcccccagaggccctcctgtccgaaaagaaaaggaccttgattctgagcccagggtcggaacccattgcttcagaagagttgtcattccctcggcttccaggtcccaacccagggttgggttgagtgagtcccacaaagggcaagtggggcccgaggaagcctctctggggccaggggtagctgagcttaaaggccctgggtcctgccagttccaggagggccatgtctgtgcctctgtgtacccctccacccgctgcgggctgagggaggtgcagggccttctctgacccctgcctgagctgttcccagggctggagcaggtgtaccctgagcaggggcagctggccactcccagttctcaccaagtcacctccctccttgtacaaggtttgcgtccggaagccgggtgccatagtgaggaccctcgtcctccagactggctggcaggagtcaggccccagcagccctcctgcccccaaagctttccgagtctggtgggcaggacttctcgctgcccttccaagcccggctttgggccaggaaaggcttccccaggtggctcttctaccaggcttttcctttgatgccgcctggatttccgcacctgcctgtctcctctcccagagcacagtatttgggagactttgactatttattcagactcctggctatgtattgcacattggcaagtgctctggggatgaggcatgggtataggaagggagaaaggagttggagacaagatcctcttcattttccaagatcaaagtcagcctcttctccccatgcttctaggaactgcctggttttcgagcaggtcctggctgagcgggctctgagttctgtactggaattgagtgtaaagatgggaagagaactgggctgactccaggacctccaggatgaggcagaggcatgatgcttcctgctcacctgggccaccctctctccaggacttgtcagctggtggttcagccccttctccaaccccttcataagcttgggccactgcctgggacccagcagacactgcccaggactctttagtgcactcactcttgtctgccccctaccttccctcctggaaccacactacttgaatcaccattactttgcctcgctggcagagttgggtcaagtgccctctccttgaccttgagatgaaggtcaagagcacagggaccaggccttggttaggctgagctcccagcaggacaccgcctgcagaaaggacctgccctgataatgtcccttccccagattctcaagcagatgcccaagggaggtccccacagagccagagtgcctgaggcttcctgcttgagaacctgccccctggatcttggacacttacagattgagctgtatgaattcagcgggtctcactccagagggtcagaacgtttgctttagttttttcatctgttttgttccttgagtcagtgctgttgatgacgagttgtcttgaataaatcatgtgttctttgcaatgggcattggtgctgtgatgagctgaaactttggagacctcagaacagggaaaaatgaacagggatggagtcagagtctcttagagtagcccttctaagaaaaggtccaggaaatccttctgggaagagcctgttggattcttccagttcagcctcagcagtc

SEQ ID NO: 135473 - DNA, 1029 bp, Homo sapiens
actgaggcgggggtgggtgggaagagctgtgtggtgtgtgtgtgtgtgtgtgtgcgtgtgtgtactaaggtaggggtgggtgggtagagctctgcctgtgtgtgcattgaggcaggggtgtgtgtgtaccgagcaggggtgggtagagctgttcctggaaagtcaaggactgagcagggcagacaccaagcctgtgcttggctggggaacagggcagagactggataggaagaggcaccaagaacatgaagtgggcctctgacttctctggcccttttgcctccattcccaaccctacagaaacattattgatcaataatgatacttttgctcagtagtccttaacagcattccaggcagtgcatccagggagaacaaggcccagagaaggggaaggacttgcccaaggacacacagcaagttgacaggacaaaaaccctggtctgatatttgggtcaggcaaggctcccggccacctcccagagggatggatggatattcagagaagtaaggtctgtccttactgaggcaggaagccagtcggacggtgtagccccagtagagaccagctttggtgcgagggtcctgcgatgataccactttgccatggtaggtcttgcagtctggaggggtaacagagtctgtaaagatggggtgagggaatggaagcaggtggctgaaccctggagctcatcaggccaacccaggggttggggaaccttccagatacctgggtgctgctgctggttcagtcgcacagtcacccgaagcccgggctccaggttcttgtcaatcttcacctcctggggagaagccagaagaaatgggtgccattcctctcaagatcagcaggggccacggctcttccagatgccaccaggggagccccggggctggcaagggaccaaggggtccaggtcaacctgccaccctccacccctggcaccggctgaacctgctcacaagagatcatttgtgcaaaacacaggtcactggccaaacatgcacctttggggcgctcatggcaca

SEQ ID NO: 135474 - DNA, 1050 bp, Homo sapiens
caggagaattgcttgaacccaggaggcagaggttgcaatgagccaagatcacaccactgcactccagcctgggagacagagcgagactccgtctcaaaaaaataaataaatggcgaatacagccaagcccagtgctaagggctgttctgcaccatcacattggatccctgcaacactgaccatgaggtcagttccctcaggttcccacattacagatgagatacttcgagaggcatagtcactattccagggtcactgggaagtgatggtggctcccagcccagttcactgtcccagccctcaggccttccctggggattcttgcccctgtcctgggacctctggagtcttggtcctcagtgctcattgtgtgtggccctcccacacacaaacgaagaaacggaggccccacagcagcaactcagtaacagtgcaggagacatgaccaggtccgcagggggccagggaaggaggtccctccagtaccttgcccagggggttgttgggggtgttgaggaccagggctttggtgcgtgatgtgaatttgccggccagctccatggggtccagctgccagttgctgctggaacccagttctccattctggatgggaccctgcaagagcaggtggcatggggtggtaccacttaaccacctgacatgcaggtcttccccagcatctatccccaccttctctcccctgggatcccaacacacacacctcccctctgccctcccagcttagaggaactggcttccttcacttctttcctccttttccaactcccagggtccaactcagcccacgccttggatccctctgcccatccatcctctacctagcatccttaccggcttcagggacacaaacacaggacgaccccctgccatcattgtcatgggctcgtagcagtcaaaaaagggttcgatgatgatgacctgatataagggtcaaatcagctggagtcagcatggccctgacctctcagtcccactcagcccaagtcttgcccactcacctcgtctccttcgtccaccagggcctggaag

SEQ ID NO: 135475 - DNA, 1028 bp, Homo sapiens
cctgggtgagccacacttccactgactcctcttcccctgccctacctcaggaagccttttgagaatgaggtgtggagggagagcacctggtaagaggaagggaactgggggagcccgaagttcccaaggacctcttccacctcttctgttagtagtactcttaacccctgccaaactgtattctgccctttggagcagacaacctggcagacagacaggctgtaagaagcgggaggagatcggctgttgctgatacttcctgtggaggggatgtgggagtgggagtttgttcagagagactgggcagtgctgattgctcagtctcactggtgttgcttccatgaaggtcaagtcttcctctggctcatgaagtgaggcaaggacagatgacctgtgctggaggaggctgttgtggacatgccagggatgagtgactgggtggctggtctctgcttccttgttttcctggtctcagggctttggcatggggtctgatgccctctgcgttctagggaccatagggtacagagcagggggtgcagggccgggcgtggtggctcacgcctgtaatcccagcacgttgggaggctgaagcgggcagatcacgaggtcaggagttcgagaccagcctggccaacatagtgaaaccttgtctctactaaaaatacaaaaaattagccaggcatggggctgcgcacccgtaatcccagctattcgggaggctgaggcaggagaattgcttgaacccagcaggcagaggttgcagtgagccaagatcgcgccattgcactccagcttgggcaagaagagcaaaattccatctcaaaaaaacaaaaaaaaaaacagagcgggggcacaggaaatgttcatgacttccccccagaacttgactagatgtggtggttctccatcccttaggcacacccaccaggaagccgtttcctttgcaaactcttgaatgacctttctggactgtagggaatcctggggatcactgccgtgggtcagaactcagggaagtggccgga

SEQ ID NO: 135476 - DNA, 1053 bp, Homo sapiens
atgatctgcctgccttgtaagtgggtcaccaaggactcctgcaatgattcgttccggggctgggcagcccctggcccggagcccacctaccccaactccaccattctgccgacccctgacacgggccccacaggcatcaagtatgacctggaccggcaccagtacaactacgtggacgctgtgtgctatgagaaccgactgcactggtttgccaagtacttcccctacctggtgcttctgcacacgctcatcttcctggcctgcagcaacttctggttcaaattcccgcgcaccagctcgaagctggagcactttgtgtctatcctgctgaagtgcttcgactcgccctggaccacgagggccctgtcggagacagtggtggaggagagcgaccccaagccggccttcagcaagatgaatgggtccatggacaaaaagtcatcgaccgtcagtgaggacgtggaggccaccgtgcccatgctgcagcggaccaagtcacggatcgagcagggtatcgtggaccgctcagagacgggcgtgctggacaagaaggagggggagcaagccaaggcgctgtttgagaaggtgaagaagttccggacccatgtggaggagggggacattgtgtaccgcctctacatgcggcagaccatcatcaaggtgatcaagttcatcctcatcatctgctacaccgtctactacgtgcacaacatcaagttcgacgtggactgcaccgtggacattgagagcctgacgggctaccgcacctaccgctgtgcccaccccctggccacactcttcaagatcctggcgtccttctacatcagcctagtcatcttctacggcctcatctgcatgtatacactgtggtggatgctacggcgctccctcaagaagtactcgtttgagtcgatccgtgaggagagcagctacagcgacatccccgacgtcaagaacgacttcgccttcatgctgcacctcattgaccaatacgacccgctctactccaagcgcttcgccgtcttcctgtcggaggtgagtgagaacaagctg

SEQ ID NO: 135477 - DNA, 1078 bp, Homo sapiens
ctgcgggcgctgcacatcaagttcaccgacatcaaggagatcccgctgtggatctatagcctgaagacactggaggagctgcacctgacgggcaacctgagcgcggagaacaaccgctacatcgtcatcgacgggctgcgggagctcaaacgcctcaaggtgctgcggctcaagagcaacctaagcaagctgccacaggtggtcacagatgtgggcgtgcacctgcagaagctgtccatcaacaatgagggcaccaagctcatcgtcctcaacagcctcaagaagatggcgaacctgactgagctggagctgatccgctgtgacctggagcgcatcccccactccatcttcagcctccacaacctgcaggagattgacctcaaggacaacaacctcaagaccatcgaggagatcatcagcttccagcacctgcaccgcctcacctgccttaagctgtggtacaaccacatcgcctacatccccatccagatcggcaacctcaccaacctggagcgcctctacctgaaccgcaacaagatcgagaagatccccacccagctcttctactgccgcaagctgcgctacctggacctcagccacaacaacctgaccttcctccctgccgacatcggcctcctgcagaacctccagaacctagccatcacggccaaccgggtgagtggcccggccacagctctgcgtgtgggctggcgggtggcctggccagggcttgtggtggggcactcggcaggctcagtgtcctgggaccgtcgatgcccctgagtgtggagtcctcacctggggtttacagaaccatccaggatagaagctctgttcaagagacagactccttgggccccatcccaggcctgctgaatccgaatctctgggccccgggcctgtctttgctccaaaatgttgcagttctcctgcctggagagactgcatggccaggcaaggtctgtcccccaaggtgaccttgagccgggttcctcttcagcagggatgtgcttgggcaggaggtccaaacccgggggttctctcgcaaagccgggtggtgggagtcaagacttagcct

SEQ ID NO: 135478 - DNA, 1096 bp, Homo sapiens
gagcagctggccaatgcgatatacttcccagggccaggtgctggaagatagtggggatcgaggcaggcaggtctcatccttagagcccacatcaagggggtaacagatggaaggatgagcactgcgagtggggacatgggggccatgagacccaggagatcagggaaggcttcctggaggaagtgagcaagagctgagacctggtgcacaggcagatgttggccagagtttggcccagattgtgctgatgctgggggcctggggatcagaaaagatgctgagatcttggggagagagggaagggaagcccagaggccccgtccaagcccacacccacctcactctcacccctgcttttttccctccagatcgagacgctccctccggagctcttccagtgccggaagctgcgggccctgcacctgggcaacaacgtgctgcagtcactgccctccagggtgggcgagctgaccaacctgacgcagatcgagctgcggggcaaccggctggagtgcctgcctgtggagctgggcgagtgcccactgctcaagcgcagcggcttggtggtggaggaggacctgttcaacacactgccacccgaggtgaaggagcggctgtggagggctgacaaggagcaggcctgagcgaggccggcccagcacagcaagcagcaggaccgctgcccagtcctcaggcccggaggggcaggcctagcttctcccagaactcccggacagccaggacagcctcgtggctgggcaggagcctggggccgcttgtgagtcaggccagagcgagaggacagtatctgtggggctggccccttttctccctctgagactcacgtcccccagggcaagtgcttgtggaggagagcaagtctcaagagcgcagtatttggataatcagggtctcctccctggaggccagctctgccccaggggctgagctgccaccagaggtcctgggaccctcactttagttcttggtatttatttttctccatctcccacctccttcatccagataacttatacattcccaagaaagttcagcccagatggaaggtgttcagggaaaggtgggctgccttttc

SEQ ID NO: 135479 - DNA, 1218 bp, Homo sapiens
tttgggtttttttggtgtcttgttttctttctcctccatgtgtcttggcaggcactcatttctgtggctgtcggccagagggaatgttctggagctgccaaggagggaggagactcgggttggctaatccccggatgaacggtgctccattcgcacctcccctcctcgtgcctgccctgcctctccacgcacagtgttaaggagccaagaggagccacttcgcccagactttgtttccccaccgcctgcggcatgggtgtgtccagtgccaccgctggcctccgctgcttccatcagccctgtcaccacctggtccttcatgaagagcagacacttagaggctggtcgggaatggggaggtcgcccctgggagggcaggcgttggttccaagccggttcccgtccctggcgcctggagtgcacacagcccagtcggcacctggtggctggaagccaccctgctttagatcactcgggtccccaccttagaagggtccccgccttagatcaatcacgtggacactaaggcacgttttagagtctcttgtcttaatgattatgtccatccgtctgtccgtccatttgtgttttctgcgtcgtgtcattggatataatcctcagaaataatgcacactagcctctgacaaccatgaagcaaaaatccgttacatgtgggtctgaacttgtagactcggtcacagtatcaaataaaatctataacagaaagtggcctttggaggtctttgtgtcatgggaggacgcttccctcacttctctgaagcctgccgggccgtgtggaacgttgcttgggcacctacaggagagttaactctgctcatctcctgccccatgagactctgtgcctttggaggcagttactggagcttgtaagctggacgcagcacctgctaggtaacaggctgtgacctgggctggggatcccatagccagcacaatctctgtcatcctactcacctgtggttgggcactcatgagggggtttttttgttgttgttgtttttttgacagggtctcattctgtcacctagagtgcactgctggaatatagtggcgtgatcacggctcactgcagccttgacctctccaggctcaggtgatctcacctcggcctcccaagtagctaggaccacaggggcatgctggctaattttttttttttttttttttttttgagacagagtcttactctgtcaccca

SEQ ID NO: 135480 - DNA, 1067 bp, Homo sapiens
ctggactgagcttcccagaaggtcaagaataagggcatgggtggcatagggcctggggtgggggcaaggctcctgtggagcccattactcagttgtaaacaagcagaagggttaatgcctacaaagtaagtgagaatgtcaaagtaagcctgagtgtgggtgcccagagctgggtgtggagggacacgtgggcctgagatggggccgacagcttccttctgtcccatagctctgcacgcccacgaccccgtcttcaagagcatcacacactccttcaaggtgcaggtgagcagaggtgggggtgagggccaggagggtgggccatgtgtggcaggctggcagcatgacctttgcccccctccagaccttggccagaagtctgggcctccagatgcccgtggtggtgcagagcatgtacatctttaaggtgagctccttgtccttgcctcagtttaccatctgtaaaatgggcagactgctcataccaagcccttccttacaatgggccaaaagttgctggaattattatgttggtgggagaacatggaaaatcggtctcctctggctaaagcacctggaacttagttgatcctcagttaaaatttggtggtaggggccgggcgtggtggctcatgcctgtaatcccagcactttgggaggctgaagcgggcagatcacctgaagtcaggagttcgagatcagcctggccaacatggagaaaccccatctctactaaaaatacaaaaattagccgggcgtgatggcacacacctgtagtcccagctactcgggaggctgaggcaggataattgcttgaacccaggaggtggaggttacagtgagtggagatcacgccaatgtactctagcctgggggatagagcaaggctccgtctcaaaaaaaagaaaaatttggccaggcgcagtggctcacgcttgtaatcccagctctcagggaggcagaggtgggagggtagcttgaacccaggagtttgagacctgcctgggcaatatagcgagaccccattctccacaaaaaggaagaaaaaaaaaaagaaaaaaaaattt

SEQ ID NO: 135481 - DNA, 1051 bp, Homo sapiens
agggccctgggtgaggagatgggaggccgagcgcggagggaaggggtgaagagccggcccccctcctgaagaagactcttcagatccccgcgcgcggggaccgtttggacgtaaccgcctcccgtctcggtgcccgtccatccagccggggttggccctgccactgtcgccacatcccgcctccaattcccgccccgcttccgctcggctttgacaccgcgcttcacagccaccccggtccattcgacccgctccgcacctcacacacggcccgccggcggccgccgccatcttcgcgcgcccgctcgccctaaccccgcccccagacgccatgcccacgtgaccgctcgcccccggacccggagcgtgggcggggatttcgtcacgtgacgttgccgcggggcggtgccaagatggcgaggcccaaagaggtgaggagccggcagcgggggcggctgtaactgtgaggaaggctgcagagtggcgacgtctacgccgtaggttggaggctgtggggggtggccgggcgccagctcccaggccgcagaagtgacctgcggtggagttccctcctcgctgctggagaacggagggagaaggttgctggccgggtgaaagtgcctccctctgcttgacggggctgaggggcccgaagtctagggcgtccgtagtcgccccggcctccgtgaagccccaggtctagagatatgacccgagagtgcccatctccggccccggggcctggggctccgctgagtggatcggtgctggcagaggcggcagtagtgtttgcagtggtgctgagcatccacgcaaccgtatgggaccgatactcgtggtgcgccgtggccctcgcagtgcaggccttctacgtccaatacaagtgggaccggctgctacagcagggaagcgccgtcttccagttccgaatgtccgcaaacagtggcctattgcccgcctccatggtcatgcctttgcttggactagtcatgaaggagcggtgccagactgctgggaacccgttctttgagcgttttggcattgtggtggc

SEQ ID NO: 135482 - DNA, 1043 bp, Homo sapiens
cgttctccagcagcgaggagggaactccaccgcaggtcacttctgcggcctgggagctggcgcccggccaccccccacagcctccaacctacggcgtagacgtcgccactctgcagccttcctcacagttacagccgcccccgctgccggctcctcacctctttgggcctcgccatcttggcaccgccccgcggcaacgtcacgtgacgaaatccccgcccacgctccgggtccgggggcgagcggtcacgtgggcatggcgtctgggggcggggttagggcgagcgggcgcgcgaagatggcggcggccgccggcgggccgtgtgtgaggtgcggagcgggtcgaatggaccggggtggctgtgaagcgcggtgtcaaagccgagcggaagcggggcgggaattggaggcgggatgtggcgacagtggcagggccaaccccggctggatggacgggcaccgagacgggaggcggttacgtccaaacggtccccgcgcgcggggatctgaagagtcttcttcaggaggggggccggctcttcaccccttccctccgcgctcggcctcccatctcctcacccagggccctttgccttcctcctctctcacctccgacgcgtctcttggcgccccacccgcgcttccttctccggccgtgacgctccctcgagccacggggagctttgcggtctcctggggtaccccccacccacgtccctgctgcaggctcccagtgtcctgccccggcgtcgagtgcgccctgctggctccccgacctctcccgcgatctgttcttgttaggattttgtttcgcgttgagcggagccacgcttgcggcttctgtcctctccgcgcctcgtatcgttcttttcttgcactgaatcaagtcagccagcatgtccaaatcctccaagagatttcagggattgaactaggctttagggacaagaagatgaaatattatatacgaaaactacaattctgacaaagtgctttctagcgtcagaccctggtggagcgcttcccaggagttatctcattca

SEQ ID NO: 135483 - DNA, 1037 bp, Homo sapiens
gtgccagcagtgttttccccacttttttttttttttttttttttttttttttttgagacggagtctcgctctgtcgcccaggctggagtgcaatggcacgatctcggctcactgcaagctctgtctcccgggttcatgccattctcctgcctcagcctcccaagtagctggggatacaggcacccgccacaacgcctggctaattttttgtattttcagtagagacagggtttcactgtgttagccaggatggtctcgatcttctgacctcatgatccgcccgcctcgacctcccaaagtgctgggattacaggcatgagccaccgtgcccggccctaacaatattattatataacaagattactttccaaaaatttaacaaatcgttttgtatattgagattttttgcttttagagagcagacaaaatggctatgaggcagtgtacaagtttgtatgatcagaaagagcaaaattacctctgttctctcattttgcaggagcagtagagaactgtggactattctgcttggaaggtcagctctgagagagctggtaagtggtggtgttcttgagtgggttctctgggttctttgtgtagcttttgttaccaaaaaaaacctttttttaaatgtaggaagtaaacacatttatttatttagagacagagtttcgctcttgtttcccaggctggagtgcaatggcgtgatctcggctcaccgcaacctccgcctcccaggttcaagcgattctcctgcctcagcttctcgagtagctgggattacaggcatgcaccaccacgcccgactaattttgtatttttagtagagatggggtttttccattttggtcaggctggtctccaactcccgaccttaggtgatctgccctccttggcctcccaaattgctgtgattataggcgtgagccaccacacctggcctatttatttattttgagatggagtttcactcttgttacccaggctggagtgtaacagcatgatcccagctcactgcaacctccgcctcccgagtt

SEQ ID NO: 135484 - DNA, 1048 bp, Homo sapiens
ggacagagctattacagataatatattaatatatgtatgtatgccacagacctggttttaaattttagcaactgtttatgagctgtgggatttttggtaagttatttaccctaagtgctggcaattccatttgtaaaaggagaatagtaatatttgccttttagggcagtagtaaggatcaaaaataatgtaacttaatgtgtttacaaataacattgttataactgtaatttaaccactttttttttgttttgttttgttaggcataaccagttctgcgttatgaagtttgtagaggtgaatgggtgtgtgtgtgtgtgtgtgtgtgtgtgtgcgtgtgtgtgtttgtgtgtgtgtttataggcatctgaagggcagaaaatagtctgtaggaaaaatattttaaaatatttttattttaaactcagtgggctattgagaatgaagaaatgattcactgttctttttgtagtccaagttcagctgaaaaagtgaaagctaataaagatgtagcttcaccattgaaggaactgggtttaagaatcagcaagtttttggtgagtaaaaattagcactcgctcaatttattacttgcagtgtggatgtgcgtggttatattgctagtgatagtgaaaattcagtttctttttgttttggggattaaattgttttataaatacccaggttgcaactcttctccctaaaagttacaagtcaaagttgcctgatccattcactgcatatcatagggttttcttcaccagacatgtggtggtctttaaggtgactaagtttgtcattttggaagctcacatcatgcctactgctgtattaatgtgcttagtgaataagcatcgttgtttctggcatgtacatttaattgtaataaaaattgtatgtcagtgactggctcttgtcttctattagagtcagaattgttatgttttatgaatctttgagaagcatttttgtttattcaagtcctgtgttcattgtagaagacaaatctttaaattctctgcatcctgtgtgcgatttctgagctgtt

SEQ ID NO: 135485 - DNA, 1054 bp, Homo sapiens
aaacttgtgtatattgttaaacaattaattcctttcatcctgtatattctggtttatgaatgtcttttcctttattttggcctaattcagtatgtttgcatttctgtgattccttatttatataaattgaacttttccatccacatctttaagtgaaattatcactaaatttaaacttgagtttcctatgtgcaaaggtgagtaactgattttgaattttgggttcctcagattgcagattattattatgaagaaagaacctgtattcttcgttgtgtcttacaccttctcacttacttccaagatgaaagacacccctatagggtaagcttgtttagtcctcttgcttctctttatactgtatcatcttaataattttattaatatttatttgaatatttaccttttattctaggtataatttactcttttgattttttaaaggttgaatatgcagactgtgttgataaattggagaaggaactagtttcaaaatacagacagcagttcgaagagctttataaaactgaagcaccaacttgggagacacatggaaatctcatggtatgtggttactgtgctctcctgtaactttttttttttaagatggagtttccctctgtcacccaggctggagtgcagtggcatgatctcggctcactgcaacctccatctcctggttttaagcaattctcctacctcagtggattacaggcacccgtcgtcacgcccagccaatttttgcatttttagtagagacagggtttcaccatgttggccaggctggtctcgaactcctgacctcaggtgatccgcccacctcagcctcccaaagtgctgggattacaagtgtgagcgactacacctggcctataactcttaggagaattgtatacccttgcttatagagctgcaagttaaattatttattcattcatttaaaacatacagattatcttttttttttttttttttttggtgagatggagtttccctgtgttgctcaagctggagtgcaatggcacaatctcagctcactgcaacctccacctcc

SEQ ID NO: 135486 - DNA, 1082 bp, Homo sapiens
tggctgggcacagtggcttacgcctttaatcccagtgctttggcctcccaggaggatcgattgaggctaggaattcaaaaccagcctgtgcaacatagcaagacctgttctcttccaaaaatttaaaaaaagaaaaaatgagctgggcatgtttgtgctcacttttagtcctaactactcgagaggctcaggtgagagggcagctgccataagctataattgtactgctgcactccagcctgggtgatagagtcagaccctgtctcttaaaaaaaaagcaaaaaatctgtctcttaaaaaaaaaaattaaatacggaccaggtgcagtggcttgcgcctgtagtctcagctatttaggaggctgaggtaggaggatcagttgcgtgtagcagtttgagcagccataatctgccactgcactgtatcctgggtgacagattgagaccctttctttaaaaaatgttctttaagtactgtttttaatctcatgttatttctctcccattttgttttcattggttgtacagacagagcgccaagtgtctcgctggtttgttcagtgccttcgggaacagtccatgctgctagaaattattttcctttattatgcatactttgagatggcacccagtgacttacttgtattaaccaagatgtttaaagagcaaggatttggtagtaggcagaccaataggcacctggtggatgagactatggatccttttgtagatcggattgggtaagtcagtgaattgaacatcatggaacttgcagtgtttagagcattgatactatagtggtatgtaagcaggtagggggtaggtgtacttttcacttaatcggtggggaaataggtctactgccacgttccctttcatgcagggagtaaagactgggattgagagaggactctcaaaatgagtattgtaatctgctcttttacttactgtcttcatttaaggggttcattcattcattgaacaaaaattcgttgaacaactattgtaggccaagcactatgcaaatgctaacaagatagtgataaataaggcatatatgcttgctcttctctttcaggtgat

SEQ ID NO: 135487 - DNA, 1041 bp, Homo sapiens
cctcactaaatcaattattttatatcctttttcagtggaaatatgaaagtcttaaattattaaggagggatgatatctgtctaaaaggaaggattaattctaaattttctcatgattgctgggaaatttggagagatgttaatttgtggataatgtgaagatcagtgatttgtccccttccaccacaggagccaacttctggccttgggatcattctggacagtgtgtgtggaatgtttccccaccttctctccccactcctgcaactgctccgagccctggtatcagggaagtccacagccaaaaaggtaagttgcttagtcagataagtaaagagaatgggagattctttatggagactttattaggaatcttttttgctttccacattgcagttctactgccatgacaaaagtttgtctgaaggtgaatgaaagataccaaagatagcacctcaattctaaaaaattaaataatcttttcattaagtacctattgtagatactgtgggactaagactaagtataaagttccttaatatctagttggaagttactagatataagaaataaatagctaagagccaggtggtacagagtaaatgtcatttgagcaataaagaccatactgttcaggagagataactgcccttgtggagtgatggggacttgagttgagtgttaaagcccagtgaagatttggcgaggggcgcagaaggcagttccaagaacagtcacagtggtgggcttgcaagaagtttgagagtctggttgaaagagcagactgtgggacctctccttgcttatcctggagggaaatgtgtgatggttttttctgttttggcaggtgtatagcttcttggataagatgtctttctacaatgaactttataaacacaagcctcatgatgtgatctcccatgaagatggaactctttggcggagacaaacacccaaactcctttatccccttggtgagataaagagatcccccttttatgacagctttttttttttttgatgtcttgctctgtcacccaag

SEQ ID NO: 135488 - DNA, 1311 bp, Homo sapiens
tatcctcagatattagactaatttatctttctctctcagggggtcaaaccaaccttcgcatacctcaaggcactgtgggccaagtaatgttggatgatagggcatacctggtacgctgggaatactcctatagcagctggaccctctttacctgcgagattgaaatgttgcttcatgttgtttcaactgcaggtaaggtcagctttcggaaacatcacctacgaggaggaaaagtggatatgcttggaggatttagaaaatagaatatctacataaaatttagaaccatcaagattgtgatttgtctgatttgtgtatctgggtctcagagactgttcagtgatcttaaaggggttgtttgccgtgaggtcacaggctgtctttcttctcagatgtgattcagcactgccagcgagtcaaacccatcattgatctcgtccataaggtcatcagtacagacctgtcgatagcagactgtctcctgcccatcacatctcgcatctacatgctgctgcagcggtgagtctgtcttggctgaccctcagctgcccagtagagatctcagcacttgtgccctcagtttgcaggaacctggacacatacccactgggttaaagttcgcgcatattccttggttttcctgtttttatatctgtgagggttttcctgtttttatatgtctgctgaggggagagactggggagagagaagtggaaaaatgtttgtgagggaaccagttgtattatttgctttattgagtatagtgtattgttctccaaccaggttaacgacagtgatctccccacctgtggatgtcattgcttcttgtgtcaactgcttaactgttttggctgcccgcaatccagcaaaggtgagatgccagatcttcccaagagccaaaaatgtagcacttggcacatacctgaagatatgtgggcatttaactcttccttttccttctcaggtctggactgatcttcgtcacacaggttttttaccatttgtggcccatcctgtctccagcctgagtcagatgattaggtgagccaagtcctagggtggtgggccatattccctagtgagaaccacatatgtctcagatctagcctaggtttattaattttatttttatgtatttgtttgtttatttttttgagatggagtctcactctgttgcccaggctggagtgcagtggtgcagcctccgcctcccatgttcaagcagttgttgtgtttcagcctcccgagtagctgggattataggctcgagccaccacgcccagctaatttttgtattatttatgtatttat

SEQ ID NO: 135489 - DNA, 1679 bp, Homo sapiens
gtagagatagtgtttcaccgtgttggccaggctggtctcgaactcctgacctcaactgatccgcctgccttggcctcccaaagtgctgggattacaggcatgagccatggtgcccggccgagagcaagagagatttcttatccaacatcaatcacgttagtatgtgagcatttactttccagcccagaaaatccagaggtttctagattcagggacttggtgtcccgttattaagccacaatcactctgtactttttctcatttcatgggttctcgagctcagccagtagaccacttaccagtacacaggctccatcttactacctgagcattctcgccttgctgtctcttgacaaaaatgtttccctgatgttcctttgatttttttactttcaatctaggttttacatcaataaaacatgttcttaatgtttaccctgggtacagaactgtcttgattggattatttccactggagagcttttctattttatattcaagtcatctagactataacaagaatgctctatgattagtttcttgaaaccttgaaatttccctatcattttttttccctctacttctttttccagtgcggaagggatgaatgctggagggtacggaaacctcttgatgaacagtgaacagcctcagggcgagtatggggttactattgcctttctgcgcttgatcaccacccttgtcaaggtacagtctgattttgttcacaaagggcagaaaaagaaaaggtccagtcttgtcagatgactctgaaatagtttccctggcccctggtgctgtaatcttcttgtctgtaggcagaatagtcatcttgaagttacagtgacaacagtttctatgtattgagtacctagtatgtgccagttatgtactctattaggtgcttaattatgtgaatttatttaatgattggaaggtttatgaagtagaatggaagaggccaaaagggtattgcagttactatcaagctattttgacagtaacctgggataatatcatatcccagtatatatacatgtgtgtatattcctgaagcaaaatttcacagtttatttcacaacatttattcttaccacacaagttgtaccctgatattttctattcagtctcctccctatttaagtgaattttgaccatagactgatctcataatctactaatgggttacaactcggtttgaaaaatactgacatagagcataaataatgacatagagcataaattttggagtcagaattaggtttacattcaggttgacagcttactagctgcatgaccttgagcaagtaaagaatatcttaagagtctctaaaacagaatgctatatggtctctacctcatgggattgagaagagggtcatgcatgaaaaaaactatacttcctgcctgcaggaatcaatgaatgcttaaaaagaaatgattgtaggctgggtgcagtgattcatgcctgtaatcccagcactttgggaggccgaggcggatggatcacctgaggctgatcaggagtttgagaccagcctggccaacatggtgaaacctcatctctactaaaaatacaaaaattagctgggcgtggtggtggacgcctgtaatcccagctactcagtgggctgaggcaggagaattgcttgaacctgggaggcggaggttgcagcgag

SEQ ID NO: 135490 - DNA, 1284 bp, Homo sapiens
atctttaggtgatcaagtctgtttcaggaaagtgatcagagtgccttcagcttgcagagagctggtctccagtgtccagtaggttaggttagccaccctagcctaattggacaatgcccttccttccaagatacactgagtggctccctggtaactcagaatacctctgtcttccagtcatactcccagcctgcagtttctctgcatctgcagcctggcatacacagaagcaggacagacagttatcaatatcatgggcattggcgtggacaccattgacatggtgatggctgctcagcctcgaaggtagggctccttctccacgttccctttgtctgtctttattgtgcctgcatgttactaataactccagtttaagttaacttgcagtagcttttagaagacgacattgttcttcctaggacatagcctttacataccctagtggctgctgtatagattggcgtatagcaaagggagttgattactcctcctctctcctagtttggactggggcctctaacagaagctgttgaactctgggattattgttggaatctaattcatgagagcacatatattgcgaatgaagtcatactgtctgaatcatctttggtttccatttggcaccctagtgatggggcagagggccaggggcagggccagctgctgatcaagacagtgaaactggcattctccgtcaccaacaatgttattcggctgaaacctccttctaatgtggtgtcccccctggaacaggctctctcacaacatggtatgtatttctcttccagtcacaacatggtatgtatttctcttccagtcatttttgctcataaatacgtatcttaggcagtgtttttggatgtcaacagtattttctgcttcttgaggaagtttgggaatgattaccagctcctttcctgaaattggaaacaaaaggactagatggtactttatttctgcctcctattgatgatagaataatagttaagaatgcagatttgaagtcagactgccttggttcaaattttgtatccaatcaactgtgtgaccttgggtacgttattaaacaactctgcctctgatttctcatctgtaaaatggggataatggtacaggttgagtatcccttatctgaaatgcttgggaccagaagtgttttgggtttcagatttttttttcatattttggaatagttgcagtatacttaccagtttagcataaatccaaaatgttccagtgagcatttcctttgagctatagttagagattttgacacat

SEQ ID NO: 135491 - DNA, 1225 bp, Homo sapiens
ttcaaaatctaactggaggttttttcttgacactgtaggggttcattagaccagtcattaaaggatacactgaagaaattttccatcgagaaacgctttgcctactggtcagggtatgtcaagtcattggcagttcacgtggccgaaacagaaggcagcagctgcacctccttgttagagtaccagatgctggtgtccgcctggaggatgcttctcatcattgccaccactcatgtaagacccttttggggagagttttcactttggtaccttagcaatgatgtgttgacatgagcctagcagatacagctccttgtgcggaagaattaatcagggtttatccctgagagctaaactgtaataggttctatgctgagagattgggactgtggggtatttgagggtgttgggtccaggagaccattaagaggaatgcagagaagtgatttgaaatcctttcagagttcctaaagcctcctgtacctcccttaggccttggctgggtcttagctgctccctggctgcatctgcctcttgtgcaaaggcataactgtcttctcgtgctgtgtaccttgtagatgctaggtcaataaatacttgttgactagtcagcagggagctgtgacagctgcagcagcaccctctctaaaaagcagtttgtcattggttctagaaactgcatttcctggtcttagaaaaagaacagaggccattgtctctgtactctgtctactgggagttggttttgagagagagagataacatctggaagaaatgcattgttcttggcttttttgtggtttgactccgtcacgctgtatcataaggacttggtattgaagtgttctttcttggggtatccagattaatttttttttttttttcttgagacggagtcttgctccgtcacccaggctggaatgcagtggtgcgatcttggcttactgcaacctccgccttccgggttcaaggaattctcctgtctcagcctcccaggtagctgggattataggtgcctgccaccacgcccagctaatttttgtatttttcgtagagatggggtttcaccttgttggtcaggctggtctcgaactcctgacctcaggtgatccacccacctcggcctcccaaagtgctgggattacaggtgtgagccaccacgcttggcccagattaatcttttgacttcatgaacaacttcagcttgatagatgcctcctttttc

SEQ ID NO: 135492 - DNA, 2038 bp, Homo sapiens
gtgccaggcatgtacctctctcctgcacagtcgaaagatgctgcagcattacttacaggtaagcgtcctatgccatgaggtcctggaatacctcacgctagcttcccaagctccaccttcatttcttgactctccttagaacaaaaatggggatggcctcccctcagctgttgcccagcgagtccagaggccaccgtctgctgcttctgctgccccctcctcctcaaagcagcccgctgctgacacagaggcatcagagcagcaggccttgcacacagtccagtatggccttctcaagatcctcagcaagacgctggcagccctgcgccacttcaccccagatgtctgccagattctgctggatcaggtactgcccatcatctgttcagcaccacctcccctaaaggctctgctctgctgtgtaccgagagctacctggggccttaattgggtcctggatggctcttgtcttttctcgcagtccctggaccttgctgaatacaacttcctgtttgccctgagctttaccactcccacctttgactccgaagtggccccctccttcgggacccttctggccacagtgaatgtggccctcaacatgcttggagaggtaagttggttctgtcagacactgtcctctccccccggctcctccccctgcctgccacttcccagctgaccttgggcatgttgggcatggtacctagcctcccaagcctgctcctctctgtaaactgaacatgacagcacctctgagaattactgtgaggattaaatgaggtaactgattaaatttgcttagtgcaggacatgcaagtaggaagctctcagtaagtgggagctgttcctgttgtcttagttttttacccttgcttctcttcagctggacaagaaaaaggagcccctcacccaggcagtggggctcagcacacaggcagaagggaccaggacgttaaagtaagtgctctttctgggatttgataaggggctggggcagtcatgggcccactgttctcaagcttggccagcctggccctctgcagcagtaccaaaaacctgtgtctcctcccaggtccctcctgatgtttaccatggaaaactgcttctacctgctcatctctcaggcgatgcggtaccttagggacccggctgtgcacccccgggacaaacagcggatgaagcaggagctcagctctgagttggtacggatggatagggatacggagggctggaccaatagggccagagccctgtggggtcctgcctggcaacccccaagggtcagaacagtagccagatgtgctgagcctcaccaagccactttttttcttgtagagcacgctgctgtccagcctctcgcgctacttccgccggggagcccccagctcccctgccactggtgtcctcccctcgccgcagggcaagtccacctctctctccaaagccagccctgagagtcaggagcctctgatccagttggtgcaggcgtttgtccggcatatgcaaagatagggcagtgctgttctgcccacctacccctctccaccagcctacactgcaccctggctggcaggggtgctgctggctgctagggcctatacaatggagggcacctcctgtcacccccctcccggagtagccacgactccagccaccacccactgacgttatttttatactagatgaagaggtcaacagcaggcatggggagccgagtcttctgtgctcaggtcctcacgctgcagacgccccctagaggaactttccttcctttccagcattccccacagcactgccggccaggggagaggcggcagcccagcagagggctctatgcacgggtttcaaacctgttttccacactctgtctttgcagttttggtaattctgtggtctatttatacagatattaaaatcttgtttatagacagctgtgtgatgtttaacttcaaagcccagggatgacaacgtggctctcagaacctagaaaactcccctggccaggcgcctgggagtggggctgcagcctcggggg

SEQ ID NO: 135493 - DNA, 1024 bp, Homo sapiens
ggccacttgccaactgtggtcccttgaggagctgactgtcttgctgatctcatctgtgaaatgtggacactgaggacggcatgagaacccatggcacgggggcacatgctgggtgaaacgcccgacctgcagacagcactgaccgctacccacttcttgtgcttgaactgaactgtcagacgcattctacagtccgctccacaatccaaatttaggaaactttttcttaggaataaaacgttccttgtgcggcttcatgtccaggaacagcactgccctctgagaggcacaggccccgcagaagacagggagggctgcacttcttcccaactagagagctgggggccggggcagccacagggcccctgctcactctgtggaagagtggggcagagggtgagtctacctttccctttaccaccctcagggccaggccctgacaggagcccaggtgactcgcacacaaggacggtttattggctagagagcaaacgcaggcagaagtaaaaacaccagataaaaagtgagtgtggagaggtgaagactgcggccgctggacttggcttgagctgtgaggggtgggaggggaggatagcaccggaagatgctgctccgggcccaacaccagccctggccaggctctcccctcccaggggcagcgcccagtccccaggggctgccagagccctgtgtgccttgccgcattcccctgatgcagcttttggcaactgaaaggcagggctctcgctgagtgcacctggggcttcctgagcccatctgcggcggccccaccctggcctaggtgctgagtgcagctgctgcagacagcccctccctccttagtggagcctggagggtggggtgctcggggatgcaggcaggggcaggggctccagagccacaggtcagaagcagggctgggggaggggtggagccattcagcctcaggcaccctcacagctaggtgactaggggcagggacagaatggggtgaattctccccactctgaacaactgtgtcacc

SEQ ID NO: 135494 - DNA, 1342 bp, Homo sapiens
ccttgctcttcagcaagctcttcctgagccctctcctgtagatcagagtagcctgagcctgaccttcttcctcacgcttcaactctgttttctcagggaagacactgatcaaggtggcagaagctgaaaagcaactgggagccgcggagagggattttatccacacggcctccatcagcttcctcacacccttgcgcaacttcctggagggggactggaagaccatctcggtgagggccctgggactattccgcttcctggtaaccatggcagttccctcctcagagcctttgagtacaggctctcttccagtgctggggctacaaaactcctgaggcctccccagagagggctcctttggactgagtgacctcctatctctgggcctcagtttccctatcttgacttgatcgtccccggcaccaatcttgccatgcatggctcagggtctcccagggcagcccagggtctcactgtccccatgccctgccctgtagaaggagaggcggctcctccaaaaccggcgtctggacttggatgcctgcaaagcgaggctgaagaaggccaaggctgcagaagccaaagccacggtaggtgtccccgctccccgctggcctcctggcccaggctctggctggagccaaggggtggtggcatgaagggacctggtatttggcatgacctctctcccctctccctggctggagatgcctggctgggggctgctgggctgagcctctctgtccctgccctcaagggagccttggtggcccccgagctctggttcccagggagatatctacggtgtgggcggaccagcagtgcccccagctgggtgcaccaccccgccaggcagctggagtctcctgcatgccctgccctgccctcctagatgctcggctctgtccccggctctgcccgggcatggcaccttcttactaactctactacttgctgcttgaacgtcaggccgagggtccctgtgctcaggcgcccccacgatggtgtggaaaacctgggagctggaccgcccgcttgctcagggccgtgtccgaggggtcccatgagattggatagggcctgggccatctggcgcccccttcactcccagctcactgaggcctgttcagcctggctgggtcaatgggacgcagcctgggacagtgtgcccagggcgaggccaggattggaggagctgggcccaagggtgaacaccctcctggcacaagaggttgctcagggctgccaggcctaaaggctgcctcataccttgcagagggaactcccaggcccaggcctactagggagatggctacctgtggctgccagctgattagccgag

SEQ ID NO: 135495 - DNA, 1064 bp, Homo sapiens
ccattctcctgcctcagcctcccgagttactgggtctacacgtgcccgccaccacacccggctaattttttgtatttttagtagagaaggggtttcaccttgctagccaggatggtctcgatctcctgacctcgtgatccgcctgccttggcctcccaaagtgctgggattataggcataagccaccgtgccgggcttttttttttttttttttttttttgtagagaggaggtctcacggttgcccaggctggtcttgaactcctgggctcaatccatctgcccacatcggccttccaaagtgctgggattataggcatgagccactgcacctagccaaggcttttcattaatgatggtgataataatactagctaacatgtatcagccccatactgtgtgctggccaaatagccaatgaactagatcctgttatctgcattctccaggcaggggctctcaggtccagaagggagactttgcctcttcgagccttggtttcctcatttgggaaatggggtgaacgccacccccctcaaaggactgggtgaggtaatagagccacgaggaaatctgagcctctgctctggaaggtctcattttggggagtgtgacgaggaagaggaggcagagccagccagggtgggggagggaggccaggagcagctggccccaggcaggagctgaggccatacccctggcagctgggccctcccagccctgcagggagaaacccaagctctgctacataattgatggctgctgagctcctggtggccgcccagcccgccaccccccaccgcagctggagccaactgcagccagggatgattcatggctgaccgactcctgcgtggccctgccccttgctcagcctcagtggcagcatctgtgaaatgggaaacagccctccttgcattagaggttgatgaggtcatgaggaaacccttaggacagggctggccaacagtgtttgttgttccttatcttactcctgcaggtcttcaccctggctgtgaccttgggcaagccctttctcttagctagagaaggccttggtgtccc

SEQ ID NO: 135496 - DNA, 1020 bp, Homo sapiens
ggccgggacttgagcggaggaccgagtaggcgcaggtgtccgggcccaacaggaccaggaaggtgtcggggttggaatgagtgggtacccgggccggggacggtgcgagagggtgccttgcttgggagcggaacgagaaggtacttgggtcagggaggtgatgcccgggcctggaacgtggcggggattggagcaggcgcgcaggtacccgatccgaggcggggagagcacccgggatggaaggagcaggcgtgcgggccgtgagcggcgccagagggtacctgggtgagtttcaatgatattccggggtgggggcaagagaagaaggggctgcccaagatgcctggggtggagtgagcaatttctgaagacggggatattgctgaggtccaacgcggggatgcccggtgcccggcatggtgggactattgaggggtccggcatggggtgaataggagactgggcagagtggctcaagggagtcggggacgttgttggggtccagacggaatgagtgagtgcacaggccagagtcattagtggggtggtctagcgcaggggaggaggcgcgtaggatgatatgcttaggcacccaggctgagggtgctgtaagtgctgtggtgacggtggaatgaggaggtgtccgcctaagattgtagggcacaagagatggctgcccaagtggggccaggccctacacagcagtagaagtgtccatttggtaggggaccttgccgtgggcttttcattgtggagaggaggtggaggggtctcagcttaggccctggaggacggacagggtgccagggggacggacacagtgtgggttgactggatttggatccatccctggagtgaagcaggcttgggggctggtgatgttacctcgcacctgcaggctctgcctcccagtggggacagcaggggctgctctggactctcccgcaaacagtgggcctcagtcacccctgtagcgtttatttgttcaggctcatctttaacaccatgtgggcttctcac

SEQ ID NO: 135497 - DNA, 1055 bp, Homo sapiens
cagccctgctcccccagcaccagattgtgcagtacctgagggacatgttcgacctggacaatgtgcgctacacgtcactgcccgcgctggcagacgacatcctgcagctgtcccggcgccgcagcgagatattgctggggtacctgggggtgcccgcggccagcagcgcaggcgtgaatggggcgctgccccgagagaatgggcccctgggggagctgcagtagaggcggcacgggctggggggtggcagagagaaggctcctcctcccttccctgggttggtatctgacagctgtggtggctgagggccgttgcccctgactttgccccacccccatcatctgggagtccccaaggcccagaggggacatttccatggagaagaacggttcctgggggaagcagaggccaggaccagtggggcctgtgggagagaaaggctgtgagagagggggttgttgtggagaattgggacaggcagagccaggatgccccaggtgggggaccccaaaacctcccatcgctccagggctgctgacaagggtgctgggagggtggaggtgaaggatggggcctagagccctgtggtgaaggtcacagtgtcctgagctagaagccacctgtggctatatggtctcagcatccagctggcctgtcctgatgccctccccacctcaaccgccttctcagagagtttgcaactccagagaaggagagtggggccaccttagtgggcagcaggcctgggccatccagagatggggcagaggtgggcctcccactcctgtgctctcttctgagcaggaactgggcccttgacagtgtcctttgacattccctcgccctaccaaagatcgtcttttctcctcccacctctgtcaccaccaaagacgggcggaggtggggctgggccctcctgcccccgcccatcccccttccatgagcccagacctccctgggtggtgctaggctctgagctgggggctcagaccagggatcgctcaggcccctgtcacctgtgggcccggggaccacttgggggaggtcagaggatg

SEQ ID NO: 135498 - DNA, 1001 bp, Homo sapiens
ctaggttactcacctgttgggctgggaggttcagtcagaggccatggtctttgggactaggtagcagccaacaggtgcacagaggcccagctgaccatgcgtcttccccagcagatctccttccttgggggcctggcactgaacgagggggtcaactggctgatcaaaaacgtcatccaggagccacggccctgtggaggtagggcctcagctgcgagggcctgaggttcccccaggttggggcgttactgggaggtctgcatccccccgtgatgccctggtctcctctctctcccaggcccccacacagcagtgggcaccaagtacgggatgccctccagccattcccagtttatgtggttcttctccgtctattccttccttttcctgtatttaaggtgagtttccaccccggtcaggatggccctgaacttgctcaggccgagttctgctagggactcactgctagccctttggatgcccctggggtgggaggggctgcagcggaggcagaaggtacccagggagcatttggatggggccagggactgtttgggaggcctgggctgggctgtgggctgaggtcatctggtgggcctgttttcgcagaatgcaccaaacaaacaacgccaggttcctggacttgctgtggaggcacgtgctctccctgggactcctcgctgtggccttcctagtctcctacagcaggtatggaggagggagagcccctgcctgcaccctgcccatgtggggtcctgctggttcctggtccctgtcggaccccaccatggaccctagtcccagaacctgtagtgcaggactggaaaaggggtcccagacctctagttttaaaaggacagggctccagctgcctcttctagcccagtccgcactgagcccaagattctgggaccaactccacgtatcagccatctcttcccagcgttccggaggagcccactgtagacaaattcagaggtcaagggctagatgggaggcag

SEQ ID NO: 135499 - DNA, 1042 bp, Homo sapiens
ccagaccctccgtggggttggcaggggctgccggggcctgctcctcacctgctcttcccacacccccagcatgatccaggacctggatatcaccgtgatggtgttccaccattttggaaaagacttccccaagtcggagaagctaagcccagatgccttcatccagatggctttgcagctggcctactacaggtgcgcctctgtggcccacccatggaggagggaggagacctgggggcaggggagggggtgcccgcctccaaggggcgtgcttagccccatttcccaccaggatctacggacaggcatgtgccacctatgaaagtgcctccctgcgcatgtttcacctgggccgcaccgacaccatccgctcggcttccatggactcactcacctttgtcaaggccatggatgactccagcgtcacggtgagaggtctggggcgagggtgggtgagctgggcctgagcccctccctcctgctcactcagtcaacacacaataattgagcacctacaggattccagccccatggtgggcacggggaatctaacagaagctggagccgtgaatctagctctgagcttcctggggaccaaagaggaaaagggagtcattcatttgttcattcatttattcattggcagtaagcaactgccctatgtcaggccctggctgaggaccaaggagttggtagttgcaatactcgctctttttttttcttgtttttttttagaaagagtctcactctgttgcccaggctggagtgcagtggtgtgatctcgactcactgcaacctccacctcccgggttcaagcaatcctcctgcctcagcctcccaagtagctgggactacaggtgcctgccaccatgcccggctaatttttgtatttttagtagaaacgggatttcaccatgttggccaggctggtctcaaactcctgacctcaagggatccacctgcctcggcctcccaaagtgctgggattacaggcgtgagccaccgctcccagccccaatatttcctcttaaagagctcagaa

SEQ ID NO: 135500 - DNA, 1023 bp, Homo sapiens
aggaaggcggcctgggggacacagaggcccagagtggggaagggacctagtggagggaacaccggagccactgctctcccatcacaccaccccaggggcccggggcctccagaaccgatgcttcagagcagatgacaccccctccagattctaggctgaggttcaggagctcaggccctttgtgggtagacccagcccactgacccctaaccaagccacactccagctgcagggggccagcacccaagtcctactaggcccttggccaccagcacttccccgagccctcccgaccatgctccctctagaggttatgaagaagcacacacaggctggcaagctgggactcgcaggcccctcccttgcgctcccaggctttctggaagcggtgagagaggctggaagactagacctcccgctccccaagcaggtgtccctagcccggggcctccctcagggtgtccacgcagcttctaatctctaatcaatctttccagatttgctgccaaactcattgagggtgtgttggatttcaaggtcatgattgacaagtgagcatccccacccctgcccagccccacacctgcccaggcctgcttaattaccacagccacctctgaccccagccctggcccggcatgccagcttgggccctgggccctgctccagctgctggaatctcctcttggtgggtgaccctgtcccatcccaactaaagaggaccccagagttttattcgctgcttcatctcccctgtgacaaactgaagcccagagaggggaaaggagggagtttctagatgacttctgaacagggcccatctggggcagaaagcgagccccctgcccacagcacagccctgaggtgtcctgctcatctgggagtgggagcagggacactgtgtgagcccccagcagtacctagcaggtccctgtctaccctgccctcctccccattcacttgcccagtggtggcctcactgcccctctaccccatagcgagaccctgcccgtggagtacctg

SEQ ID NO: 135501 - DNA, 1070 bp, Homo sapiens
cgtgtgggccaggctggtctcgaactcctggcctcaagtaattcacccgccttggccacccagagtgctgggattacaggcgtgagccaccgcgcccggcgagaagttcttaatgtaatgatgaaaactttggattttggagtcatacatatctggctctgcctggcaagtcacagctctgtgagcctcagttacttctctcttttttaaaatttctttttttttccctgagaaaaagcctcagttatttcttaaaataactataggctactatactttcttcatagaattgtagtatgtgttttataagatgtgtgcaaagcatgggacatagtaggcgatcagtaaatgctgattgcccttatctttttcaaagtttcaaagttgtacaggttgaacatgtagacgagtttcaaatggccaatgataatgctatatattatagtctttgttggggggcttaggaaggaacatttctaaaattctgaatgttgattttatactgtgaggttgttgggaatccactgtcccttggaacctatgtctctataacctgaggctggagagactgtgggcgtgacctcatttatcaccatcctgcctttgaaggcttgtttctttgatttgggattgtgtgttctggcaacttgtgtgtgtttcatcagtaatttgttatagtgcttcctggtaaggtagccttttcccaaacatggactggcctgaaggctctcttcctgtgaaatatcccggttaaataatgtcaggagtgccatccctttttttatttttattttttgagacagagtctcactctgtcacccaggctggagtgcagtagcatgatcttggctcagtgcaacctccgaggagagctgtccctttgcagagaatggtgatctcacacatataaaagggctgtatgttcccaaagattatttccaagttgattatttggaatgtgggacacattttcccataaaagcaatgtggttgggttactagtctgacctacaaagctttttatttggcatcttagttgaagtgccaatttactaatagcagttttgggt

SEQ ID NO: 135502 - DNA, 1692 bp, Homo sapiens
ttctagatatcagggcttgtctcagggcttactgtggacaccccggcttggataaggagaaaggaagaaagagagaggaaaaagggatgaagaagaaacaaaaccaatcaggagtcacttgttcccagcaactgcctctctaggggcctgcacctcaatgctatttttttttttgagacagggtctcaccctggcccccaggctggagttcagtgatatgatcatggctctctgcagcctccacctcttgggctcaagcagtcctcccacctcagccacctgagtagctgggaccacaggcacgtaccaccacacctggcaaactttttaattttttgtagagatggggtctcactatgttgcccaggctggtctcaagctcctgggttcaagtgatcctcctgcatcagcctcccaaagtgctaggattacagacttgagccacaatacctgaccctcagtgctttcttatccctgtgttgggtgtaactgcagcccagcagggaagaagagtgtctagttgaaagctgggaatggttgtgtggggagacctgtctgtggcaggcatctgcactccaactagacagcctggcccgcctttggtcgctgattgctgggggtgagacacttggtggtactccttgaattcctggtggtagagcatcatggacaagcatgtgcccactcagctttgaagttaggctactgggtcctagctccatgtctaatgatatcttggtcttgggagaccttgggcggatcacttctcttgaaatcttggtttcctcatctgtaagatggcgccagcagtgtctaccttatagggctattgtgtaaaaaaactgctggcagcaatagtgagtacttggttcactctggctggagatcagcgtgttgctgtggtcactgtcttgccagcttttctggagggtaggggtcggtatttggcattacgtttctgcttctcctgctattgggttgggagtcagggtcaggagaagtagaaagctcggagctctttggtaacctggtggagctcggggcaggtggggcgggggggtctgccacccctctccccatccccattctcctctctgtttggtaggcatacgctgactacatcggattcatccttaccctcaacgaaggtgtgaaggggaagaagctgaccttcgagtacagagtctccgaggtaggcccaaggaggagctgctgcagcagcctttccaaaaatagctccagagtcactgggtgcggtggctcacctctgtaatctcagcaccttgggaggccgaggcaggcggctcacgaggtcaggagatcgagaccatcctggccaacatgtgaaaccccatctctagtaaaaatacaaaaaattagccgggtgtggtgacgggcgcctgtagtcccagctactcaggaggctgaggcaggagaatggtgtgaacccaggaggcagagcttgcagtgagctgagatcgcgccactgcactccagcctgggcgacagagcgagactctgtctcaaaaaaaaaaaatagctccagagtcttgtgggctcagtgcccaccacggggccagagcagaaaataagatcgcccaaatacatgtgcacttcacattttcatatctatatttctaatttttgaaatctgtgaatagatggatatttataaaattgagatcaaggtaa

SEQ ID NO: 135503 - DNA, 1228 bp, Homo sapiens
gtaatcccagaactttgggaggccgatgcaggtgcatcacttgaggtcgggagtttgagaccagcctgactaacatggagaaaccccatctctactagaagtacaaaaattagctgggcgtggtggtgtgcgcctttagtcccagctacttgggaggctgaggcaggagaatcgcttgaacctgggaggcaaaggttgcagtgagccgagattgcaccactgcactccagcctgggcaacaagagcgaaactctgtctcaaaaaaaaaaaaaaaaagtttagtgtatttctgggtggcaggattactggtcattttcattttcttctgtttatatttctattttttatgatgagtaggtattgcatactgaacaaaaggcttccataaagtctttttaaaaagatgtcagggctggagttagcttctctatagcagcagcccatgggtaggctgcctacagaaaccaggtgctaaagccaccccgtccctgtcccatcagcctagtgtgcttccctctctggaaagcctatcatgctctcctgaccctccttcatattcagaacagtggggaagaaagagggatgggggagagttcccagtaggggccatgccaaggggtcattgtctggcagcagtggacttccctctgtggctaagcgggagccacttgctctgtagcttggacccctctattttgcctccacaggccattgagaaactagtcgctcttctcaacacgctggacaggtggattgatgagactcctccagtggaccagccctctcggtttgggaataaggcatacaggacctggtatgccaaacttgatgaggtgaggctgccacaggacaggccagggactgggctggcagtgagggtggttctggcaccagttggggaagggcctgcattgtatagcgcttctaggcatatacaaatctcagtttgttaaaatgtcaatttcacttagcaaaattacaaatgagtttatactctgcttggtcatcttctgggaaacacgactgtgcacatacggccctctgcactacaaggctgtttattaagtcactgtattacagcaaactggaaatgttccaagtatccatctgtaggggattatttaaataaattagtccatcaatatcatggagtactgtgcagctataaaaaggaattttttttattttttattttatctttttttttttttagacggagtctcgctgt

SEQ ID NO: 135504 - DNA, 1721 bp, Homo sapiens
tacatgatcttttttttttttttttcctgttgttcaggctggagtgcagtggcatgatctcagctccctgcagccttgacctcctgggctcaagcaatcgtcctgcctcagcctcccaagttgctgggactacagcatgcgccaccatgcttggctaatttttgtgtttttagtagagacggggtttcatcatgttggccaggctgatctcgaaatcctggcctcaggtgatccgcccaccttggcctcctaaagtgttggaattacaggtgtgagccactgctcccagccttaagttatatcttaaagctgacaaatcatagctttacagcttgatggatttttacatgtttttactcatggactcaccactcatgccaagttttttacccatggattcaccactcatgtcaagcaatagaacattctagctggagtgctccccttcccaattgatatcgcccagattattctgatttctattccataaattgatttttttccatgtttctgaacttcgtataactctctggcttcttttgctcaatgtcatgtctgagattcatccatgttttcatgtctagctataggtctttttctttgctgtgtagtattctattgtatgaatataccacaatttattcatttcactgttgatggacatttccattgcatttccaccttttggctactctaaacagtgctgttgtgaacattcttctgcacgtcttttgatggcacatgacaccagctcttgctgacctgagagtgtgaaggaaggtggcctgtgtgggaatcatagcactgaccttccagagtctctgtggggctccagtgagttaccacatgggagggttgaggcttttttccagattcctcctgttttgcccctagactcctgtgccctggaaaaatcagttgatgataagtcgcctgggtagtcttctgctgtggaagaataaatgctgtccctccccttccttctgtggcctgtcagaacaggaaccaagctggcctggcaaggcagtgtgggcccccagtcaggtgctgcccctgggcacctgcccactgggatgctgcttaatatgctgccaccactttgtgtctcttgtgttaccaggaagcagaaaacttggtggccacagtggtccctacccatctggcagctgctgtgcctgaggtggctgtttacctaaaggagtcagtggggaactccacgcgcattgactacggcacaggtatctgctgcttgtggggctctgtacttatctagcttcactgctttctgttttgggcttcaggtggtctctgggccctctgagcaagtgagagcaatcaagaattcgccaagcacctgcaacctattggggccagctggggttagggtggcttcaccggcagggagggcgtaggcatgcagggaggcccggatgctgcagctctgctgtggtccaccagggggagctgatgccccgtgcatggtgcttgcgcagcgctgctttctgttcttgtgaaaatggtctctgagctcctcatcatcaccaaaataattattaattgagcacttactgtgtgtcaaggcagcagcttactgaagctttgagaaatgggaacgcttcttggtggcctttgcagtgtcgtggcacaccctctcccttgaaccccttgtctcttagccacattctctgtgctattgggctgtttggatctgtggtccatgt

SEQ ID NO: 135505 - DNA, 1734 bp, Homo sapiens
atatagaaggttggaaccagaagaacctaggagataacctgctgggacttgtgttagctttcagacaggccaactgaggctggagaggctgaggccctgcccagggttttacaagttgtcaggagttgatggcaccaaaacccaccttcctaatcagtgattttttatttatttatttgtttattttttttgagacagggtcttgctctgtcgcccaggctggagtgcagtggagagatctcggctcactgcaagctctgcctcctgggttcatgccattctcctgcctcagcctccagagtagctgggaccacaggcgcccaccaccacacctggctgattttttggatttttagtagagacggggtttcaccgtgttggccaggatggtctcgatctcctgaccttgtgatccgcctgcctcggcctcccaaagtgctgggattacaggcgtgagccaccgtgcccgggcccttaatcagtgatttttatgcctttcctgagccaaaagatggctgagtgtttgttgggggaaataaagctacattattgaaattgagaccagttaacactcttcagtggttattttggggtctccttgtgctcccagtggccgaaagggtgagactgtctttttactttttgctaccttccctttccctgtcctcctgtgcaggtaccttgaggttatgcggaaactccagaaaacatacaggatggagccagccggcagccagggagtgtggggtctggatgacttccagtttctgcccttcatctggggcagttcgcagctgataggtactagagcgggaggtgcctatccctccacccccaaccaaggctgcgttctgtggccctcccctgcccctcctgcgctccctccttcccttcttcctgcccagggcagacagtgacagcttggaaagcagggcattagaccagctattgagggaggctgtttactgtcgaccttctgctgtgagagcccgtgtggtgggctggaggaggcggaggccaagcgccaccaagataatgggaagtgacatgggctggagcaagggcgcacgcctggtgcataatggactggtgtgaaatgcgccccagctcctggcagcagctgtggggttttatgttgaaaatgagggacccttttgatttggtgaccagtgtcatccactgttattatcgagctgtgtgcaaaggggcccgttagggagcagccgccaagtgctgggtggtgggcctgcttcctgtggggctcagagaggcctgctctggtgactccccaactcttgaagctagttttcaggatgggcgtaggtgatcatctctattttgatgaagaatgaactgcctacagactgatattcataaatgaccattagttgtggcctcgggtgcattgcctccccgaatcttctcagtgacactgcgaagggtctgccagcatgaagccggctctgctgactggcacctgcaccaggcaccatactgagtgctgtaggtgtggtaattgttgtcatggcccctaggaggaggtgctcttcttgtccccagtgtccaggtgaggaaactgaaccttggcaggctgaagtcatgcgtccaacgccatgcagctagagcttagcacattagaatacacaaacccagagttacttattgctccttcaaggtgaggtgttgagggcaccacgggcaggactgaggcccctgggggggtgtgactgctgg

SEQ ID NO: 135506 - DNA, 2085 bp, Homo sapiens
tgcgagatctcctagtgtgtttgttaaaacgcacattcctgggccctccatcccagcttattgcatcagaatcttaggggacaagagccaggaacctgcatctaaacacacgtgccaggcgactgcacaggaaagctggggaccctctgctctctggacctctcttgagggaggtgttaggacttctcatcctctctgccatccccatgccccagtttccaaagggcgccctcgctcagctatctggagagggtttgagagttctatccctcctcagtccctttcccgacaccagcacggatgtctgctgcctcagtgaggttcctagcaggcctgtggatgctggccacgggggctgctctccgtccgggctgtgtattctgagcccccgacgaggtggagaaagctgggttataaccagcagccttggctccaggctcttcctggtcaacattcggctcaggcttctgccaaactccagaggccagaggggaatgacacattttttccaagtcagcaaatggagccgggactgacggctgggcggccaccacttcattcccggagatctgctgccctcagcagtgtggcaggcccaaggtcgggaggacttgggggcagcctggctcactgccttgaaagccagtcacgcgctgctctctgtggagtggaatgtgggggtctgcggagccctgggggacctcaggataagctggaggagcagggtgggaagaagggtgcagatgccacactgagttcttgggtgtggctgaaaggctgagctgtttgggctcccccggcggctggccaggcctctgggtccctgtcggtattctaactaggaggcatgccaggcctggcctccaggattttgggaattgattccatggtaaaattttgtctttagttggttggttgattttgttggtataaacaccccaaaagcttttccaaagtttgggacccagttcctccagtagaggaaatctcaaagtagccactaggtggcaggagaggcacactgaacttggagagggtttggtgacatttatttgaggcagcagaaggaacagggaggggagggcgtgcctagagttgttggctgttccgcaccttctccacaggtccgggttttcactttgggtctaggctcttgggcatggtgttcaacagtagaccctaggaggagtgtgcccaggagccggggtggctgcagcaagggcccatcttgccacgtggccgctggttgcagcacacgttgtgttggttctccagagcgcccaccctcttccacctcggagcagtgagcagcattttgcagtccctagttggtgagtggcctggcctagctcactggggacctggaggcttgcatggagttctgtacgccttgcttgggaaggaggcagtgtttcctctggagaccctggattcaccatggtgctcttttaactgggagattaactaaaacaccgagaacttgggagtggaatcaggcagccctttcagggtctcatgccaagactgccctgatacccgtgggcatcctaggtgagggaccccaccttgcagggcctctacagcctctgtaaatgcagccctggcgcctttaagagcccagggcaggcaggaaaagaatttcagtttcaatctggcttctaaatttggagttttgggaagggagggatcagatttcagctggaagggaaggagctgacaggaaggcgctgtgcagagcctccccacccccgcccatccccccagttactgacagaggagccatttacaaaaggccgattctctggggagtggagaggcaggaacgcagcgtctgtgagtaatttcctgctcaatatggctgctctgactcacacgattcccctggggtcactgcgggctgcagctcgctcgctcattctggttctttctcttctccctttgtggctagaatgagctaattttttctttgtcttccagccccgattcctttttctcccactcgtctgttttcctttgccagagttacaggcaaaggactgtaacctccctgaaggacttagggagaccctggggtactgaaggcct

SEQ ID NO: 135507 - DNA, 1026 bp, Homo sapiens
tctttctgttctcaggctggcccttgtgactagttcatggcctcagacactgtactgtgggcaccatctcttgactcctggccggccttctcttctgggaaggggctgctccaggtcttcattggacccagagcttcctggatcccatcagcagaggcgggacaacggggaagggtgccagaggccagcggggtgggggagcacagatgcttccagttggcttggctccctgcacttggtcctgaaggggttaatgaggcttgaactgaacagaccgggccctcactcccttccgccccctccccctttggtccccttcctctggacctcacatcctgtgtttaggttccagcccacatacctctctaatctgagaggcctgagagcccgttggctggagctgcctaggttccttccggctgcagctggccacccccggctctccactccgactctgccctgggtcactgccctctggtgtcctgatgttcctgaccccacccccgcctgtcccacagtgggggctgctggggaactctcactctgctgtgccccgcctccagggtgtctgagcatgtgagaggtgcacatcgcccaccagccacctcccaaccccaacccttgtgtgccaaagagaggactctggctgccttctctgcttggtacctgaagtactgtcttctctacaagcctcttaattcaagtgactctaaacttctctcgactcaggctctaaggcccaaaggatagggcaagagaccctgtccccttctctcacctgcccttccagagacaaaagaactccaggctgccagaggatgagggaggagcatattcggattgaaaatggtgatggtgtggcaggaacacagggactgtccactctgcacaggctgtcggggtctccgtgggggctgagcacagggtggcaaacacaaagaggacactgaaaatgaccaactcaggatgggggagctctctagtaatctgaaaaagggagattctagccctagttgaggccggcgc

SEQ ID NO: 135508 - DNA, 1086 bp, Homo sapiens
tgggccatggctgtgtgggtgctgccttcagaaggaccttgtcaggacccagggagtcccttccccagcttgaatcacctctggctggaaggtcagggggcagtctgaagccgctgctccgcccaggtacatgggagggccttgctgggagaaaggctgggctggaggctcctcctgccctggagccttaggcttccttggcccagctcctgtggctctgagggggctggctctggggtcctgtgggcagaatgggaagaacccctgcctccaccccttctcgccttgcaacttcttctatgggagctagagggaggttgacctttgaccccttctggaattccagggcccttggggggtgggggggctcttatgaccacttctgggatgacataagcaccatggcagctgccttggcctctggcctggatctgcggctgctccccctcccgcccagggaccacctcccgctccctgctcccgcattctgtgtctcaggcccaggatcctggctgtggccagggctctgctccccaccccaccatgagcttggtttccatccttctttccctcccctcctggcgcctctttggcccactcgtcaccctggtgcttctccctcttaggttccacagctgatttttgaggagagggaacctgggccagtcatagcacccgtttgtctctaagttagttggaggttaagatcacagccacagagtgaggctcttactctctctgaggccataagtcttgttccaccccagccaggaggtgcctaacatactctgttttctgtggccaaaggtgtgggaggaggccctggtcagtcttggcagatccaaccctcgcatgcccagaacggctcctgtgagagctagtgtccaggtgtggcaggcatgggggtgctgttgcgggagctgcagctggaagctggggttggctgcctgtgggccaggccagcttctgtgataggccctgtcacttgctctccagctctgctcctctgctaggagcccgggctgggctgggctcagggagtcgggcctcccccgtgctcagccattcccctgttcagcgctcttt

SEQ ID NO: 135509 - DNA, 1572 bp, Homo sapiens
gaggaactgggggaggaaggcctgggggatcccctggcggggctacttcctgggcccgggatggacacctgggagctgctgcggttgttggggtcctggcaggggtgtggtgtggccctcaccactctgctcacctgctccttcctcacagtgcctggagaagttccctgtgatccagcacttcaagttcgggagcctgctgcccatccatcctgtcacgtcgggctaggaggggccaagccgaagagccacccaggccacagttcctgtgcctgccttccccaccccagcagtggcccctccccatcccctccctctgttcgtcccgtttgatgagaggctgtttactggggtggggtggcgagatgggcttgagggggctcagagcataaggcttcagggcccaagttgggagaagtgaccaaagtgtagccagttttctgagttcccgtgtgctagactggccagaagagagggtctggggcctggtcactcggccactctctcctgtttctggcctcttctcccttcactcccgtccagtctggttttgagagcaggggctgttctgcagcaccgcagggaagggaggagagatacctgctgcttccattgcttttcccttcctggagtcgatgcctttctaagggttggagctgctccttgcaggggcgggtcagtttcccaggccatgccggggtggccatctatggtagggctggaagctgaggctggccgccagctgtgggctggggtggggtgggtggggtcgggtggtggagaggccttagctgtcctggctggtgcccctcccaggctccttttcaccctgccccctgggcctgaggccccctgtgtccaagcctccccctggctcttcagttctctagcccttggctctgctgggtttcctgactgtagccacatctctcccgctccctaagggtaacctagccaatggaagctgccctttgggtaggtgctgggctcctgggagggcccagatgatggggtgaggcatgtctttccagaactttccctggcagggaggggatggcagaaactcagggaggggcttggggcccattgtatctggagagcctggattcctcttggcagtcttaggcccggccacttctgctacctttgcgctgctgtgagcctcaccctgggcccctgggccctgcttctctgctcccctgggtgatgggtgggcccagaaggtggcagtcccacaccttgtcctcccacctccctgaactgtccattgcttttatagggtgaggtaagagacagcctcccaagcccaggctttggcactcagaatgggcccagtgggggctgggcaggcccattgagggccaccgccgaggtttctcctagggctgttcctgggcctggctcttacaggctcgtcccccaggcctgcccttctccactgccccctcctgtgtctgggtccacacacccttcaggaagggggagcactgagaagcacagcacaggggctcagcctgggatccggtgatggtctgggcagaggctgggtcaggagtcccaaaggtcagtgac

SEQ ID NO: 135510 - DNA, 1013 bp, Homo sapiens
actgttgccctggtgccaggcagccagcaccggaggtgggtatggggcctgtgagagggcagttctgagtgctgtggagccaagcagaggagcagtgggctggagagaaaggagggtgaggttggcacagtggggaggaagaaggaggcaggtgggcatggggggcccctggggtacctgagtgccactgcaggcggagggcggagggagggagctgaggagaggaccagagaggcccaggtcagggttgagccgggaggatggcttgctttcattcactcagcaaacactgtcagagccctctctgttccagtctggggacaagtgctggggcgctgcggtgaacaagacaggcagcaccgtccctcctggaggattttccctcttggacttattccagcagaacctgggaaacactctatatgttcagcagttggggattgttagggggctggagggagcagtcatcctatgggctgtcagatgacgcgattatccatttatttgtccagaaagatgcggataatctgttattcgtggggaaggcagctgcaaagactgcaggtgaaggacaatgcttttttgtaaaaaagcagaaatctgcattcttgatccgtccgtctgtctgtccatctacatgaacacaggcccaggtagtgatgagcttatctctgggtggtggggatatgagggtttttggaaaattcttaatgcttttcctgcttccaaagatagttatgaaaatgccaacatggccgggcatggtggctcgcctgtaatcccagcactttgggaggctgaggcaggcggatcacgaggtcaggagattgagaccatcctggccaacatggtgaaaccccgtctctactaaaatacaaaaaatcagccgggtgtggtggcacacgcctgtaatcccagctactcggaaggctgaggcaggagaatcggttgaatccgggagggggaggttgcggtgagccgagattacactacggcactccagtctgggcaac

SEQ ID NO: 135511 - DNA, 1076 bp, Homo sapiens
cgccgccgcttctccgcccgcctccccggcccccgcctcctcccccggcttctaccggggcgcataccctaccccttcggacttcggcttgcactgcagcagccagaccaccgtgctggacctagacactcacgtggtgaccacggtggagaacggctacttgcaccaggactgctgcgcctccgcccactgcccctgctgtggccagggcgctccgggaccgggcctggcgtccgccgccggctgcaagcgcaagtattaccctggccaggaggaggaggaagacgacgaggaggatgcgggcgggctgggggccgagccccccgggggcgccccgttcgccccctgcaagcgcgcccgcttcgaggacttctgcccggactcgtccccggacgcgtccaacatctcaaacttgatctccatctttggctccggcttctcggggctggtgagccgacagccggactcctcggagcagccgccgccgctcaacgggcagctgtgcgccaagcaggcgctcgccagcctcggcgcctggactcgagccattgtcgccttctagggacccccgagggcacagggacccggggccccgcggggctggggccagacaaagactcggcaaaggggcgagaggagggaacgagcgggcgccgggccactcggggctgagctgggggcgagcgggggcaggcggctgatgttttataaattgtaaaataaaaaaaaaagaaatctaaaatcttggactttatttttgcagagagaaaaagcgcctatttaagtatgctttgtgtttctcctactcctttttttctttttattgtagtgattgcagtggtgtttagcgaggagcctaccacgtgagggagggctgctgcccggaggaggtgccgggcagccgggggcgaggcagggcgccctggccgccggggcgcgccgggggcgcagctcaggagggcgccggacctgggaagccgattccaatcagttgtcagacccgggaagcccgacgttccgctctcccgagtccctctgtggggtgaggaatgggtcttgtgaaattctgagcaaaa

SEQ ID NO: 135512 - DNA, 1146 bp, Homo sapiens
gcgctctatctggaccaagaggcctgaagggggctggttgctgctcccaggggtttcaaaggtgcctggggtgggggctgcccagacagctctggaggctcttggaaatggtctggaggtttgcctgaggagggtccatgagtggatccctgaaggatgaacgaggtctgcagagtctcccagagataggtggaccttgtggggctggactcaggggggaggcccatgaccagacgtcctgctgcttcaccgcctcctcaggggatcttctgagtctctgctttttggggcttccttctgagttctcagcacctacttcatcccttggtgggagtggagagacccagtagcccaccctgtggtctctgggtctttctttagtcttaagaatttccaagatttctgcaaaagtttcttagcatctactccatgccaggcgttgagagtgaagacagagttagcgggtgtttacttcatttttccgatgaggaaactcggacactgacagcgtgagacttgcccaagatcacatggccccagggctggtgctgtgtccttcccttggccccctcgaacaatctcaaacgctttgggcccctgtgaccaatagcacctctccaggcctcctcccagagaagccaggattgaaatttcaggggacttcagataaaggatgtcctacctacattttattggtgatacagacctacaggctgtggaacttgctcaggtgataacacgtagaagtaaaaatacactgcccttcacttccctggtgcctgtcttaaaggcacacaaagactttatttatggccgggcgcggtggctcacgcctgtaatcccagcacttcgggaggccgaggcggacagatcacgaggtcaggagatcaagagcttcctggctaacacagtgaaaccctgtctctactaaaaatcacaaaaaattagctgggcgtggtggcgggtgcttgtagtcccagctatttgggaggctgggacaggagaatggtgtgaacccgggaggcggagcttgcagtgagcccagatggcgccactgcactccaacctgggcaacagagtgagactccgtctcaaaaaaaaaaaaaaaaaaagactttatttatttatgtttgaagttcacctttg

SEQ ID NO: 135513 - DNA, 1064 bp, Homo sapiens
ccagggtgggagttcaccagaggttcctccaaatcagcttccgctgtcagtggagccaaggccagttctcagggcccagctcttggtgaatatgatcttggtttgatcgacccccaccgctttactgccaagtgctgtgggaccagggcccataaggaagcaaatgtcagtctcagcctcagcccctcattcagagctgtaccccagaacatgaatctgggggcccagatggggaaacagggcagggatggaggtggatttccacctacaggttgggggcagaaggaccaggcccctcacatgggcagctcctcgtggcacctcctagtcccccacaaggtgagtttggggatctttgaagttcctttcattcactggggccagctgagaagtggtcagcctcttctgggtggccccatcctctgggtctgttgggggcccacactctgtctctcctctttctcaagaactgagaagtgggctaatggggagggctcagcagttgtgcagcttcataaaaacccttggtcttttttgaggtgggctgggaaggggaggcaccacagctgtcgtcaggaaaaccttgctgaaggaggcaatggaacagctgcactatttggtgcccgggggagcggtgtggcttggggggcacatagtaggaattcacaaacgtttatagaatgggtggtttgcatgccaggcttctgctgggatgcataaaggttcagggcagccagtgtgtgcatgtgtgtgagaatgtatgtgcccacgtgtcaggagaaggtaccctcagatctgcaccccacgaaggggaataggcccaaacgagacaaggatgaagggctggccttatttctctgtacacctgagaaaggttggggatctcacctttccccctggagctggggaggttacatctggcacagagtcactgctccctggaggaagttaattaatgcctcagtatttaccaagtgtctgctggggcagcatggagctggggcatggaaccgctggggacctgggctcccatcaaaccccaggtggtgtcagccctccatcag

SEQ ID NO: 135514 - DNA, 1004 bp, Homo sapiens
tgagtcttctctttcttaggctgaggagccagtggcgctgtagctggtggacactggggaacgaggctagggctgcggatctggggtagcctccgctggccccacagaacttgctccctgtcactggcccgggtggaggttaatgacccccgcccttcgctgttgtctgtgttttcctagcatagtcctgggcaataggcctagtgcccagaaagccactgtggccctggcttcaaggaccttaagtgtaatgagaaagactgacagtggtttggctcttcttggagctctcgctcttaccaggcactggaccaagtctccctgaatttccacaccaacctttgaggcaggttcagttataattcccatttcatggatggagcaaccgaggcacagagagcttgggtgagttgcctgttcacaccgaaaggaaggagacgtcacagggctctgggggtggggggcggggcactaggaacttcgggagaggaatgaggctctttcgtttgtcggtcctctgggtgaattctgcacttgtccatggagtgtgcatagggtacagatgtgatatctcacatctggggtccctgctccagcatctggcaaaggctgcgtgttcatttgttcattcattcattcattcattcatttattcaccatgggctgaatgctggctaatgtgtaggggctgtgctaaactgtgaggagcagggcaggcagatgtcactcccctgagccatgctgaggcatccttgattctttggagccagatctgattgactagtggtgtctgcctggagccctgggtgctccaattgattagtgatgtctgccaagggctcagctggagcttttagggcaagcctgctgggaggtgctctggggtgaggatggggtgtccttcagtgctctgcacatctgggtggcctaacagatagggtggagactggggggatgggggctggagaaatgggttctagcttcagattggccttgttatcctt

SEQ ID NO: 135515 - DNA, 1038 bp, Homo sapiens
caatccaaggactcccctctgcttcctggcatcatatacaaggatttgaactgaaaattggggggacatttgttttaagagaaaattccccaagttccagcccagccaggtgtctgtttctgctggtgactttgggctcttctgaagagctgggttttgttggttggctcctgtggtgttgttataacaaacatgaatgagtcctgcaaacaggaggtccaaatggaagaagcacttaattaatatttgactcctgctgggcatgtttaggggtgggtagaggaggctgatttttggttttctggtttattcacttttctgctttcccctctgctaattactgcattacgctctcctctttattgatacaatttgcattttaaaagtgatctgggagatgcggaaagactatttggccacaacgaacttttcacaaatcaaatgatcctccccagcttcttgtacgggcagtttcctggtctgcacagccatggcctcagtgctgcggccccattagtagtttggtacacctggttgagagcgcggctctgccagtgactagtgtggaataacagtcaccagggtttgctgggttctcacctgctgctaagcgctcccatctcatcgccttcatggctctgctgtgggggtgggacttacactcccccattttccagggaaggaaaccgagatttgcacaggctaagccagtgcttctcagacctggctgtgcctcagaatcacagcagggcttgttcatgacacagagtctcaggagggagggccaggtcacactgacccaaacttgagtctaatccgcacttccctcttgtcctccctgtcacctagcacttcctgcctcccaggggcagctgggggttctctgagttccagaaagagggagacatgggaacaggtgaggacgcaggggacagagctgcctcacgtgccatgctggggcccctcgagagtacccacctcattccctgctctccctgaggtgccctgagacccgactgagcctcagccagcctcttg

SEQ ID NO: 135516 - DNA, 2610 bp, Homo sapiens
gatcgcgccactgcactccagcctgcttgacagagcaagattctatctcaaaaaaaaaaaaaaaaaaatttaaattatttttcaaaagaagttaagttaaatccggagcccgcgcgggggaggggcgagctgagcgagggggtggagccagccatgggcccgcccctaaacgcccggaagtgacgttggcggacaaaggcagcgcgcgccgcgagctgtcgcgtctggtcgtggtctggcggagctgcggttggcttgtggcgtctccgccgccgccgccctcccttcctcttccccatcttcttctctcggtcccgggagcccccgcccggagtgagtagcgcgaggcggtgcgaagggtaggcagccgctgggagaggggaggctgcgacccctaactgtttcggcgccctgaggtcccgggtccccggctcgtcacgtgacccggcgcgtgcgcgcgggccggcacaggcctcacgtgcgcgtccccaagaggtctacgggccggacctgggcagggactacggagcagtccatgggtcggggtacaggaggaaagtcaaggcactcaaagcccaggcagggcactcccccaccccggtccccagaccgcagcaaatccctttctctgagcctgtttcccttccgagaaacagggatatggagagcgcccacttggaggatggatgggaggaatcggtaaaatcggtaaaatgcccagttcagagcctggcacagttaagtgcccgctgcacagaagttgctgtcgtatttaaccttgggtgccacccgagcgccagcccgacacaggtgcagctcaaaaaagacagcccgagagcccttgcggccaaggtcagcctgtctgcagggaggctgccatatcgaaaagcccagactttgctgcgcaccaactgtgtgatctctccctctggactttggtttctcctctgtactataagtgattgccacaactggtgtcagaggccctgacagcggggagggacagtgtaaccggtggttgtggtgtgtagaatgattgcccagtgagatgggatgagcctctgggaggaaccagggctggtataaggagcctggattccctccttaattctgttctcggcttcctgtttgtatgtttaaagacacgtcacttcctttagtgtgctggtttttctctatgtaaactgaggactgtgcgggggttggaaggatgcatggagcgttttggtggaggccggaagccctaggatcacaaggatggcatctaaaaaatctcggtgggggttctgtgcttataggcagaggaagctcactccccactctggctgatttgcagagctgtttgagtctgctggcttggccgcccagcataccagtaacagtcccctaggtgtgtccaatacagcttctgtggcattctaaggcagttttcccatttgatcctcatagtgggcagagttgacaagaatctcatttgacagagatttctaagctcaagagagaatatgtgcccggcactgtgcaaagcactttaagcttttcatatgcacttttaatcacagcctttctgtaaagtcggtattactgttccattttataggtgaactgaggaatggtgaggtttaatgtcttgtctgtgcttacacagcaggtgtgcagagccaagattcagatctggttcatctggctccatcagagcctttgttagtttttaaatgtatcccctgttttgtcttcttccctccctttctcacttccttctttttcttagagcactctgccgtttgcatgtggcctgctgctgtccacaaagatccagggaggatggactctgtccactaggctgctagagggtggaggtaacttttaggcaggcttttccgtagagacttacgtgaggaggatgagatgactgcaaaagtctgccggtgacagtttcagcactgttttcttccatgggtcgtgggagaagagatgcagtaccttgggtctgaacaccttggcggggaggaggaggcagcagccaggtgactgtgaaggatgtaggatcacatttactggctgagcagccatttaccaggcatgaggggtttgtcttcctctctgagctagcctagagtgcacacaaagcccgtgtgctcctggccccctcccaggcccttcagccacatacggcatctgtgctctggagcagagtgtagcaggaccacctgctgttggctgactgaccttgctgttccctcagactcttagggacctcctcctgccccactccaatctggacaccacgaggcaaaatgtagccaggaccccaggaatcccgtttattaatgaatcagctgttagggcagatgtcaaagtcaggcttgctatttcccggccaggatgtgcctcccctggcttgttcccagaatttgcgtgtaagtggaattcttgtaaattagattattcaggggaccctgacatttaaaggaatcatgttacaaggcttttggtaaagcacagaattatattgtcggtagcagccttcaggccttcagtatttaccagttctgaatggttggacttttgtctgtaggattttcttagagtggaaaatggctatagctg

SEQ ID NO: 135517 - DNA, 1261 bp, Homo sapiens
gtaatcccagcactttgggaggccaaggtgggagaatctcttgaggtcaggacttcaagaccaacctttgtaacatagtgagaccccatctctacaaaaaataattagccaggcatggtggcacacaactgtagtcctagctgctccggagggtgaggtgggagggtctcttgagctcgggagttggaggctgcattgagctatgatcacaccactgcactccagaaaaaataaaaatgtaaaagaacttgaagccaggacttggggcgggtgctctgagtgcaaaagacagaagatgctgttatccaaggggtagaagcagatttggggaccctggacttctctctgcactcagcaggatgtgtgacttgtgaagcctggtgtgagactggccctctgccctgggggcctttctgccaggtccctggcccgctgactcacgcccccttccttacccaggagagtcgcggttgctgatcgtggtgcttgagtagagccgtggttggtgacagcatgacgagcgaggtgatagaagacgagaagcaattctattccaaggccaagacctactggaaacaaatcccacccacggtggacggcatgcttggggggtatggccacatctccagcatcgacatcaacagctcccggaagtttctgcagaggtttttgagggtaggcaggtctggcgtgctctccaggagaggctgtggctctggtggcactgccgagtccatgtggggtgccaccttttacacatgtaacactgcaggattgttggctatctcttggtacctaccccaaagccttgaggagctgggctgggtgggcacagtggggtaacttctagattgtggacttagcctcagggttaccagacaggagctggctgttaggcagaattgaggtgcctgaattgggcaaacctctcttcaactgttgggttttgccagggacgaaacccttgctctcctgccatgtccacgggtgtttggactgagggtgttggctattctggacgaagactcctagttatgtgccatggtttccaccctctgctccacccccagccttttctgtaccaggctgggacccccagtcctggagccccccaccttcttgtctcatggctggcactggaggctgctgttggccacctgctccatccagcgcctcccctccctccatgttccctctctgcacccttgttcacctgttgccccgcttccattctccccattcctctctgccgttgtttacc

SEQ ID NO: 135518 - DNA, 1241 bp, Homo sapiens
gcaggggcagtggctcactcctgtcatcccagccccttgggatgccaaggtgagaggattgcttgagcccaggagtttgagaccagcctgggcaacagaccgaggccccgtctctacaaaaaatacaaaaaaaaaaaaatgagttgggcatggtggcgcatgcctgtagtcccagctacttgggaggctgaggtgggaagatggaggatggcttgagcccaggagttcgaggctacagtgagccatgatcccaccactgcattccaacctgaacagaatgcagaatgcaacctgaactttcaaagataaaggaatgtgtggcccagcagtgtgtcctcccatgctcatcccctcgactccgtacaagctggcagccagcacagacctccccaccagtgctcagcttgtgcggagtcctggaatcctgacttgagtctaagtcctagggctcgtgaggaagggccgcacgtgcggtgacagggtccctctgataggttatatgcctctgcttttcaggaaggcccgaacaagacaggaacgtcctgtgccctggactgtggagctggcattgggaggatcaccaagcggctgctcctgccgctgttcagagaggtggatatggtcgacataacggaggacttcctggttcaagccaagacctacctgggggaggagggcaagagggtgaggaactacttctgttgtgggctccaggacttcaccccggagccggactcttacgacgtgatctggatccagtgggtgataggtgagggttccaccgcccttccctgctcacctgtatgtctcctgccactcgcgttccccataaggtgtcaggaccagggctttgcactcctgcagcaagtgggccagtgaggattccccaccccgcccaggcccacccccaccccgtacttcccaggactgagggacaggctcggcctaaaaggtagatttcttccttctaggttttgtttcagttgaatacctgctaccatccatttgggtgcagttttttgttgaaaaaattttaatggccaataacttactgcattcaaagtgaggagttttataagggttttatttttaataagatgaatagtttaagcttcgtgtctagccctgcaccctcttagcctaacagcacacctcgagcgctgtgccctgggctgctgacgtggcggcaggccgctagcagcagtcggccacctcctgaggcgggcagcacaggcctgctg

SEQ ID NO: 135519 - DNA, 1051 bp, Homo sapiens
gaggggcggggtggaaattttatataaggaccttgttaaggccaagaaagtcagtttaatcttataatataaatatatcatttagtcacctcagcttatccccagaggtgtttacacaattcccaatgaccagtgcagcttggaagggactgaggctcgcaagtgggtggcacagtcggctcttcagtggctccaaagtgagcccctcacaacaggagacacttcagagaggtctgtccccagccacgcactcatgattgctttttagcagaagtcatggtcgctgaggccctgggtttggcaaaagcacagctgccagcagagcacagttctggtaggtggggccacggctgacctggccccagagctacaggaacaggcaggggccagcttggcttgcaacaccatgaaacaagcctgtggggcccttagtgtcttctcccgcagagcccaccagaaacacttctgtgagtaacagaacctggaaggaaaaggggcaggggtggggccttggtggcaccgcacaggacgtgccccaggcttcctctccagctgcactgccacgtgcggccaacaagagccccgcagccctggggtgctgaggcttggtccttcccagcttctgcaaatgccctggcactgccctccaattcagagggtataaacatcaatccaagccctgttcctctttccaacatgggggggacttggagtgccgctggagggaagggggcagtctctctggaagaaccagagctgcacccttcaccactggagtgatcacagcttcaggctctacctggctggcttttctcatgaaggatcccgtctcatctcccagatcaaaaagaccctcttctaatgctgtcccagcatctaccaacaggctgacctgagctgcccgtgtcccccgttcctgtagcctgagacctatcagatgtcatcttccacggagccactgtgctcgctaaggaggtaccacttcagcctgtcgggcagaggcagggctttgaccttcacatccacaggccacggctgaaggtagagccgg

SEQ ID NO: 135520 - DNA, 1042 bp, Homo sapiens
gcatggctctcgtcttccgtgcagcctgggtgggaacagagcctctcaaagatgatgtgaaagccagaccagcaggacgcaccgtgcagggagcagttgtaggcggctccggactccaggaggaagcgcaggagagggaagtgcagtttaaagctcttcaggcagatgtgggtgagggactcgtgggctgggcactcgctggggtcggccccgtgtgccagcagcagccgtgtgacttggaagcagaagcggttgatcatctgggcctcctctttgtcccctcccacggtctcaccaagcaggaagatgatgcaggtgaacactgtgtccccatctttggtggtggccttgacgtctgcccctagaagagccatagaacaagagatgctgggagaaggccttcaaccctggcaaagcaacagcacacatcgaaggggcgggtgagaggacgaggcctaggagcgcgccagcctcacctccttccagtaagagacgaatgttctcagtattgtggatctgcaccccgtcgctgctggccagagcatggagcagagcagtttttcctagggagggagggagagcaaggaggagcaggaggccaggaagcccaggtcagggcaacccagaggaggtggcagaaatccagacactcagaggatcagaagatgaactttcagagacaactctcagctcaggtgagggctgagggtgacaggcttctggccattccctttccacccagagaagtgggagcggaaaggccaggaaaggtaggatttttctggaccccaagatgctacctgagatgttggctgggcctctcccaatgggaagccattgtttcttggaaactaagtgcacacatgccctatttcttcctatagaaggcccttgagggccagcacagggacaatgactgcactgcctctctgaagcctctgagctcagcaagtcagcagaatccctgtgtgcccagccatgctgtgccaccagccagggccagcatccagtctgcccacctagctgttgtcctggggcaccc

SEQ ID NO: 135521 - DNA, 1013 bp, Homo sapiens
tccccccacaccctgaccccaccctgacccccgaccctcatgacccaagagtgtccctgcaggaggcccagcctgcctgttcctgccacagtcctcaggctggaggggcagggcctggattcctgggttcccagaggcctaagagtctgtctgctcaggggagaaactgaggtagcaggggctggagcaggggccgtgcggtggggccgtgtggcaggacagtggccgggccagcgaagggctttttctgtcccctcccttattctgtttactgtcctaagaagcaccaaggagcatttcgggggccccaacccccagggcgacaagccccagagacctctgtgcttctgatggccgggcttgctttcccctccctacccgcccccaccaggaagccctccctgccggccagagccccctactccggcacagacactgccaggtggttcctggtgcttggtccaagggcggggcctgtgacagccaggtaagggtggggccaggccccagtgaagcccccaggtgggcagcccagagcctgggacgggatgccgcaggacccctctttctctactgttcccccatgcccacatggaaggccctgcctggtccccgcctctcccaggtgaggtaagtcagcagcccagagcagggtgggaaggtgctgagcgccccgggggtctcgccctgcgtctggagggaggctggggcctggactttggcctgggcctctctcagcctcactgcccatctgcacacgaaggggtgggcccagggttcccctaaatttctttctaccccagaagtcaagggtcctactgagagcctagcaggcaaggattctgcccatggcgattcttcccatggaggaagccttccaagaaaggcttcttcacctcggcctgtctcgggggcagatcctcgcctactaaactcgggtcagcctgcccccgcttctcccaagcccggcgaggagatcccagctcgggctcgccttctctaaaccttgctca

SEQ ID NO: 135522 - DNA, 1037 bp, Homo sapiens
ggagactccaggggttgggaagagaaggaggaacaacttgaaggtgaagggaaagaaggaaaggagaaggcaaggaaaggagagagagagggaggagagacagaggaagaggaaggaagggagaggagagaggggtgaggagggaaggaagggggccagggtgtctcgtactccagtcctggccaggggacggcctgcccatttctgacctacccctgctgtggggacagccagggaaggccgtgcttctcccggacacggtgttggaggtctctggtggcgggtttccccggggatcccagaacagctagtgtcagctggggatgtgggcgcctagacaaggcccttggcagcctccaggcagctgggtgtgcagtgggtctccccagcagctccctggggctagccaccctcctggagagcccatgaggcctccaggccttctcctaagaaggggcattggcacactgggagtacccaggcatgcttgggacacactgggtgtgggatcaggtggggtggggtctgggccaggctccaggaggcgctcgtgggctggtccgtcttggaagctgcctagctctgccctgaggacgatggagccctggcagggagagtccctgggctccgcccggggtgtggcccggatctgggtctacaggcagaaggtggagagaggggactgcagggcaggcgccagtttccaactcatccatctgggtcaggcggccccaccactgccacttgctgtggactcccaagtcctgaaggctccaaaggtgggggagatgggatccttctttccccatcatcgaccctttgaaagtgggcagccaaaccttgctgggcttgccgggactgcagaccccaggccagtgggctgagtcttgggttgcggcatcatcctccagtcctggacatacaggagcccggtcccctcaccacggatccagacatgcttggaggtgggttttcctgtggctcttggagttgttttcaggtccaaagaaagatggtctggccgggggcggtggctc

SEQ ID NO: 135523 - DNA, 1044 bp, Homo sapiens
aggtccaagcaggcatcagagagcaggttccctggttgggtgtgatggctcacacctgtaatcccagcactttgggaggctgaggcgggcggatcacctgaggtcaggtgttcgagaccagcctggccaacatggcaaaaccccgtctctattaaaaatacaaaaattagccaggcatggtggtgtgcacctgtactcccagctactcgggaggctgaggcaggagaattgcttgaacccgggaggtggaggttgtagtgagccaggatcatgccactgcactccagcctgggcgacagagcaagactccatttcaaaaaaaaacagaaagcaggttccttgatgataaagcagccctgggggttgtggatgcggcagcaggtggggagatgcccgtgtctggggcacccagaaaagttgtgaatgtcttggatttgcctccatccggtgccccctctctgctcctccctaaacccgccctccctccaccccccaaaaccagaaccagatggaaacccaaagtgaatagtggatctgaggctggggcagatggtgtgggatgggagccccggtgtggggagtgaaccccattccagaaacactaaaggccaatgcatctccttcggcacagggacagcttggagcccgctgcggaagaacctccaggttctggaggcttctgggctccctggggatcacgggcacatgtttgctgctttattcaaaatggggaaccacagcagtgactggaagcgtatgggctgcctgtggcgccgagaattttcctccctccaccttcccacggtacaggctggtccctgaggaggaggcgtgggtcttaggaggaaagcagctctggggagctgttggccaaatgcccgtggcctcctcctgtgcccgaggtaccccagggagaggaggtccagagtggggccaggatgtcacatggatcccacctggctccctggggcaaggggcttctttccctcaacctcagtttcttggtctgtgaggtggggacggtgacagcacctactcagaggc

SEQ ID NO: 135524 - DNA, 1019 bp, Homo sapiens
agtcagaactcggttccaatcccagctcctccactcgttggctctgtaaagcactcagcacctctgagtcccacttttcctgcctggtatccaagggctagagaggaaggtgggggagagtatggcaggagtggggtcccggcaagccatagaggtatggtaagagcatcctggaccagtagccctctgactcccagcccatgacgtggcctcgctgcctcagctgcttgcaagcataagcttggagctgccttcttctggactctggggtatccatctccttgacctggctgtgaatggatttgagtgtgtgatatgcctgaaatgacccccagtgggtcaaagcacccccagcttccatgacactctcaaaagggcctatggccccaaagctaatacctggctgaccgcacccctcttgtctccccagggcccaccggaacgacatggagaccatctaccccttccttttcctgggcttcgtctactcctttctgggtcctaacccttttgtcgcctggatgcacttcctggtcttcctcgtgggccgtgtggcacacaccgtggcctacctggggaagctgcgggcacccatccgctccgtgacctacaccctggcccagctcccctgcgcctccatggctctgcagatcctctgggaagcggcccgccacctgtgaccagcagctgatgcctccttggccaccagaccatgggccaagagccgccgtggctatacctggggacttgatgttccttccagattgtggtgggccctgagtcctggtttcctggcagcctgctgcgcgtgtgggtctctgggcacagtgggcctgtgtgtgtgcccgtgtgtgtgtatgtgtgtgtgtatgtttcttagccccttggattcctgcacgaagtggctgatgggaaccatttcaagacagattgtgaagattgatagaaaatccttcagctaaagtaacagagcatcaaaaacatcactccctctccctccctaacagtgaaaagagaga

SEQ ID NO: 135525 - DNA, 1123 bp, Homo sapiens
agaaacggaaagtaggcgggcggcccttctgcgccctgccaaccctattaagtagttttcagacgtgctgcgtcgcccagaaagcccacatttggcccctggttttcctgcaggtcagcaagggtggctgggattagcaagcgctcagtcaagcgatggttcatctctgaatgaatgaacatttagcttccttatcagaccccgaagcgttaaggacctccacataatcttgaaagtggcatcgtttgactgcctcggccctagggtgtggcagacaccctgctgtgtccctggataatctgtgcttcttgctttggccagctaagaaagtgctgcgttgctgatgcatttttaaggtctgtttctctctttgttctggggctgttcttgcagctctcaagctggatttggaggagaagctgtttggacagcatctagccacggaagtgattttcaaggcgctgactggcttcaggaacaacaaaaatcccaagaaaccactgaccctttccttacacggctgggctggcacaggcaagaattttgtcagtcaaattgtggctgaaaatcttcacccaaaaggtctgaagagtaactttgtccacctgtttgtatcgactctgcacttccctcatgagcagaagataaaactgtaccaggcaagagaacccgctattatctcgtctgcaggccagtcggactggtccgggtgacctgctcactaactctggcctctgcttctctttcctttgtgttgctgtagcccccggctccactgagttaaggcacacttagtccaggtagttacaaagctctcctacaacatttctcttacttggttccaaaacagtccagtggggtaggggatgttatttccattaaaagatggggagccaagggcctggcgccgtggctcacgcctgtaatcccagcattttggggaagccgaggcgggcggatcatttgaggccaggagtttgagaccagcctggccaacatggtgaaaccccatctctacctaaaagtaccaaaattacctgagcacggtggcacgcacctgtaatcccagctacttgggaggctgaggcaggagaatcgcttgaacctgggtggcagaggttgc

SEQ ID NO: 135526 - DNA, 1339 bp, Homo sapiens
tggggttactctatgttggtcaggctggccttgaactcccgacctcaggtgatctacctgcctcggcctcccaaagtgctgggattacaggcatgagccaccacacccagcagacacagaagtcttaatatgtgattttaatctttatttctctggcaaactcagcaatgcaggcggggaccttataactaagacggctcttgacttttggcgggccggaagaaagagggaagacattcagctgaaggacctggaacctgtactgtctgtcggagtcttcaataataaacacagtgagtccaccagggtaaaggagccccttaactgtccagcagtgagccgtctgctctttcattgagtgtttcacaaagccacaggatcccactggatttcctcactttgctaaagtcaggaattttcttagggcatactgtgctagaaaccagtgagtgagtgtccagctgagtcctgcatgggcttgttgcacactgacaagagactctctcaaggggtacggacatgaggaatgtgctgagggtcgggactggagcttggccaggtggcggtggtggcaggaaacccagctgtgtcttgttctgcaggtggcctgtggcacagtggactgatcgacaaaaacctcattgattactttatccccttcctgcctttggagtacagacatgtgaaaatgtgtgtgagggccgagatgagggcccgtggttctgccatagatgaagacattgtcacaagagtggcagaggaaatgacgtttttccccagagacgagaaaatctactcagacaagggctgcaagactgtgcagtcgcggctggatttccactgagctcctatccagatggggtaggagacagctgggaggctccgcacgccagaggccttgcctttcagaagaaccctgaagaccgctttggggttttgcctgtttgcaccttagacttttgggtatagaatcttttttttgagaagaggtctcactccgtcatccaagctggagtgcagtggtgcaatcctcaactcactgcaacctccgctcccggtttgagtgattctcatgcctcagcctcccgagtagctgggattacaggcatgagccactgtgcccagctgggatatagaatctaagagttgattgtggaaaacacgtgaatctattgcgcgcatttgtcatttagcaagatggcagcagtccagctgttctttgcagctggagatgaacttttaaaaatccccttcacacttaatgtactgaccgagacagaagtacctgaaaacagctgtgcatggcaggcccggcaatagcttctgacccacagcaccc

SEQ ID NO: 135527 - DNA, 1024 bp, Homo sapiens
ccgcctgtccatcgctctagctgctaatacagccctggctgtggaatccttcaccgtctcagctggtatcagccccagcctgccttgtgccatatctcagcttggatctctgctagagtccccccaaccatatatcatagagttgaatcacaatgagaccgttggctttgaatttgagtcgttggttcccatggtgagatgcttgttaagactttatacttgggtcaatctctcactttattttgtagaaccatttgaaatcctaggatgtgcttgttctggaaggatgacatgggcccagactgaacaagtcagcttgatgatcttaaatgatggaagtataggacgttgcttattttaaaacaagggaaggacacaaaatggaatgactgcttagtcctttctcagatactcttaaaacaattttttattgttaaatttgtggtaatacatggtcacaaccgtggatcaaacaaggtcagtctaaagtggcaggtcctaggtgtgacctgataccaccaccctttgtggcagcaccgggctggactgccctgatccctgggacgtgagacttagcttccagccagtgtgaatcattgtatctgtctcataatcacagcacagctgcagacacaacaacgtgcagcattttttacataaaaatatggtagaattaatttatgacatggaaatgccttacgtggtatcacacttagtcttgaaaaaaacaccaaggtgacgtttaaaatttttagtacatatcctcaaattggagctaagttatacttcttttataaccttttgggcatctggtcgagagaagacaagattttctctatttacagtgaggcaataaatatgtttgccacctttggactgccgttactgatttgtaacttgaaaaggctacggttgatcatgaccccgcctcccccacctcccttataagatgtggacgagagctttattgacctactgactataaaatagtaaattctagattttatcatgtgaaatgccactt

SEQ ID NO: 135528 - DNA, 1044 bp, Homo sapiens
ggccatgaccacagacgtgccagacttaagtcggagacctgaggagccaggctgcaggttggcctactttgcgctaagctgggggtggaccagtggtaacctccctccgaagtgggttctgcctcctttctagcctagcgggagacaggaaggatggtgaggactcttccgcagccgaccaggagggaccaaactgtttcctttcccggctctgccttggggtgggaggagcagcacaggggttaggggtgcaaactggtggcagtggcagtggcaccaaggggcttttcgggaaggagtcgggccagggctttagaataggcaggaccagcaaagggagggctccctggaccgccgtcccctctgggccaggagcttacagaccgcagtacttgaggtttcgcaaggtgcttggagggcgtctagacggctttgctggctttcttatgggctgtaaatgtggctacattttgccgctgtttcttccccactcctgattggctttgtctttcccagcactgcagaaggatctggacgacaacctctttggacagcatcttgcaaagaaaatcatcttaaatgccgtgtttggtttcataaacaacccaaagcccaagaaacctctcacgctctccctgcacgggtggacaggcaccggcaaaaatttcgtcagcaagatcatcgcagagaatatttacgagggtggtctgaacagtgactatgtccacctgtttgtggccacattgcactttccacatgcttcaaacatcaccttgtacaaggcaaggatggaagtttggaatcccttcctggatgtcatcgggtttggggtctctttgttgtgggatgagatttgggagttctatgttgaaatgagtgagcccggaaaacggttcatgtctcagttccccttggaaaggtgtagaagttaagagtttgagatgcgtggagcagttaataccatcaaagctttgtggtgggttctgaaaatcggtccagtgagtatgtagggtcatgggattttagaggtggacatgatcaaat

SEQ ID NO: 135529 - DNA, 1052 bp, Homo sapiens
tgtccccacccagaggcaggaagctgctcctgctctgcgccccctgcccttctccactccctgccatgcccagcaagctgctctgccctcctgcaaggccctttcctcaggggagtgtgtcgcccgaaatgacagatttgtcatctgactccttggatttacagaggtggagacaggccccatcacaagctcccagggtcccccaagtccccagtgaagaacagcagaaccaagccatggaagcccacaggctctaaactattaaacctgcattaaaaatttcggctggggcgccctcggggcataatctaacctgtggctccggggcccggcagggtgggtagagcccacggttctgctcacgggacccttggtgtggagcatgagcacccacctgtgcttgggaagggaggcctcattgccatcccgctagtcggggaaggtgccagggccaccgtgaggcctctctggtggtggctgaggccttcagcatggctgtggttgagaatgtagctccggagccctcgccctggcctggacgctggccttgccttctaccagctatgacctgagtggttacttcaccttcccaggcctcggctctgtctctgtaaacctctgtcttgtcctgtggttgccgaggctaaatgagatagctgggcagaggggaaggggcgtggtgagcggcagctgccagcagagataagggcatgggccatccaccgcagctcctgcggccagcacagagtctgagaccatctcgtgtgtcctggaaattccctctgctgggtcctcagactgccacagaggagcattgggtggctcaggcgcctcatccattagagacttcacgctgacccccaggcctggggcggccccacttgggatggctctgctgctgtggagggtggagggcatggcaggggctgaacccgagcccgctgtgtctgttgcagagccccccgggcccattgacaacagcaggattgcacaggtcaaaggaagcggccatgtccagctgaagcagggtgagttccccctggggtcagcca

SEQ ID NO: 135530 - DNA, 1047 bp, Homo sapiens
tcactgctgccccagccgggcttcttagaggaggtcagttgtcctatgtatcatcatttactctgggaatcctactgtgaaatcatgtctgtatttttctggagcagttcacatagagtagaatgtggaatttcccgtgaacgtctccttcctcccccgtatctgccgcctgtcacttcgccaccgtgctagaatactgttgtgttgtaagatgactaattttaaaagaacctgccctgaaaagttcttagaaacgcagtgaaagggaggaacttgtcctttacccagtttttcctttgtaggatgggaaagtataaaaaggcacagaaggttgtcatgggctgttccttgggggtttttatcctgctcaccgtggagataagcctgcggcttgtctaaccagcgcagcgcaaaggtctcgatgccttttggtaacatccgtcattgcagaagaaagtttacacgacgtcaaaaagtgacgttcatgctaagtgtttttccagaaatattggtttcatgtttcttattggctctgcctcctgtgcttatatcatccaaaaactttttaaaaaggtccagaattctattttaacctgatgttgagcacctttaaaatgttcgtatgtgtgttgcactaattctaaactttggaggcattttgctgtgtgaggccgatcgccactgtaaaggtcctagagttgcctgtttgtctctggagatggaattaaaccaaataaagagcttccactggaggcttgtattgaccttgtaactatatgttaatctcgtgttaaaataaaatataacttgtggctccgtgtcacgggactgttttgttgcatgaagatatgaccctagttgtggaagcagcctggtgtcattggaagccccctgggctggggagctggcccctgggaggagctggagacctagatagctctcagttccacccccatccacggtggagggggaggctctcagaccgtggtgacgtggaattcgggctgatgtagtgcgaggattgcgagaggctgcttatggccagga

SEQ ID NO: 135531 - DNA, 1046 bp, Homo sapiens
aggccactgtttgcttcctccctgcatttgccaagacatctaacatatcctgatattgctttttcaggtcagaatgaaggaacgatttccgtagttgaaggagaaacattgtatgtcatagaggaagacaaaggcgatggctggacccgcattcggagaaatgaagatgaagagggttatgtccccacttcatatgtcgaagtctgtttggacaaaaatgccaaaggtgctaagacttatatttaataccataaaaaaaaaaaacttaaaaaaaatggagttgtttctccccacaaccatgactgttacaggcagttcctcaagagactggctggcaagcaccataatgcacgttctcctgtagtctcacgtggacttcagggtctgggcacctgaattgccttgtctagtttgggctgtaatcaagtttcacttgctgatgaaattttatgtggaaagctgccaaccgccaacttacagctatgtcattcaaaatctgataaacatttcttcttttggcggtatctgtagattaaaaaaaaagttgcattgtagcttctcatctttctgaatttaaaagccggcacgcatcatgcaggtgccaaagacttccctactcttgtttatatctagtatccaccatacactgagctacattaggtggttacagattgtaacttaataaactgaactgtgttagtttgttaaattgtatactcattcacttgggaggaagtcacaagtgaaataacatctccttcttgactaaagcagtaaataagattcttatattggcaccaaaagtgtgtgtttttacttaaacctggtcagcatccttggtagggcatcacgagtaccctgttccatctacatgatcccagacaaccagctgaaatctggaaaagtttggtgaattgaccacttgatttttacattgcattgctgattttccaagtgtcatcaaattgacaggtttttgttgttgtgtttgtgtttttgttgttgttgttgttttgagacagagtctggctctgttgcccaggctg

SEQ ID NO: 135532 - DNA, 1050 bp, Homo sapiens
gagtctctcattgcttttgtctccaggcctggctggctgaggttgaaggccggctcccagcacgcagcgagcaggcgcgccggcagagcggactgtacgacagccagaacccacccacagtcaacaactgcgcccaggaccgtgagaggtacagtatctgcacagcgcctgcctctggcaagggagcctgttggctttgtatttatttctaaattttggaatctggaatgaccataaggcacttgttcaatgccaaaatgtctgttgcgattgacctgtcactttttccatgatgcagatttataattccacatgggatgggtgatctgagcgtgcgatgatttaccatggcctcagttacagcactcgctgaggggcggggttgcaagtgctctccagtcgcagggactcaatctgagtcctccctggggtcagtcgctttagttgctttgtgttttcctttcttgagcagcccagatggcagttacacagaggagcagagtcaggagagtgagatgaaggtgctggccacggattttgacgacgagtttgatgatgaggagcccctccctgccatagggacgtgcaaagctctctacacatttgaaggtgacatttcatgtctgctggattcccctgccttttataaaccataatatctgagttactcttctttcacttttccttccttccttccttctgatcatttttattcctttgtccttccttccttccttcctaccttcccttccccttccccttccccttccccttccttccttcccttcccttccctcccttcccttccttcccttccttcccttccttccttccttcctttttttcatacagggtctcgctctcttgcccaagttagagtgcagtggtgcaatcatggctcactgcagccttgacctcctgggctcaagtgatcctccaacctcagcctcctgagtagctgggactacaggcaagcaccaccatgtccggctcatttttgtacttttgtactttttgtacttttcagtagagacagggtctcactatgtt

SEQ ID NO: 135533 - DNA, 1031 bp, Homo sapiens
ggtagcagaattcctatagagaatttccagaatggaagctggcccaatagtcccttatccatactctaatcttcccacgtttccattcatatggctttcaaagtggtagaatattggctgataagagtaacctttgccgggtggtgcggtagctcacgcctataatcccagcactttaggaggctgaggcaggcagatcacctaaggtcaggagttcaagaccagcctggccaacgtggcaaaaccccatctctactaaaaatacaaaaattaggtgggtgtggtggcatgcacctgtaatcccagctattctggaggctgaggcagcagaattgcttgaaccctggaggtgaaggttgcagtgagccaagatcgttgcagtgagccgagatcgcaccattgcactccagcctgggtgacaagagtgaaactgtctaaaaaaaaaatggagtaacctttacagcattctactcgttctttctttcagagatgccataacaaaaatgaaagatgtctacctaaagaatcctcagatgggagacccagccagtttggatcacaaattagcagaagtcagccaaaatatagagaaactgcgagtagagacccagaaatttgaggtatgaaacttctgttgtggaaagctttgttggaaacgaagaacaggtgttcctcggtgtagaatggtgtggggccctgacgatcctctcactgggaggtacacagtgggaatggcaggctgtttcaggagttatggtcaaaggaaaaatacactcttcgccgttgaacattctcctactcatcatagcctatcttaatcgtggctgtaaaacctgacaatgtttaatgttgtatctgtatacggtgcggggttggcggggttgttttttaattttagagacaggattttgctttgttgcccaggctggagtacagtggcatgcttgtagctcactgcagccttgatctccttggctcagcctttgaggagctgggattacaggcacatgccaccatacctggctaacttt

SEQ ID NO: 135534 - DNA, 1154 bp, Homo sapiens
gaactctgagaggcttcctaaaggcctaaaagaagtcactaggctgggcgcggcggctcatgcctgtaatcccagcactttgggaggccaaggtgagcagatcacctgaagtcaagagttagagactgtggaaaattagccgggcgtggtggcacatgcctgtagtcccagctacttaggaggctgaggcaggagaatcgcttgaacctgggtggcagaggttgcagtgagctgagatcgcaccactgcactccagcctgggcaacagagtgagactctgtctcaaggaaaaaaaaaaagtaactagacttttagaggcagcagagggaggtgtgcatggggtaaggagaagagattttttttttttaatgttctttttcacccacattctctgaggaatgtgatgtcccatctgtcactttacaggggtggagacttttggcctcagcctgtgtgaagagactggcaggaatactcacgctagggaaaaggcagcagctaggcgtgcagtggttgatggggtttgtattaaggaaacataaatttcattaacacttcagtgttgccactgacattgatggtaacacttggtaggaaaaggaagaagactgtctcaaaatgtgtttttcatggattctccctagagtcagaagtatctcttactctcctttactgtagcgttgctcactgctttttctggggcattctggccagcatccatggaactgggaatggtttatgggacttatgcagtttgcatgcattgatttttgcatctcggctgggtgtagtgggaaagagcttaatctatttcatgaagccacatgcagatgtctgcaccccccatggctgcaggctttgctttcagccttctttcaaggaaagcctggggctttctggtttctcatttatatttgtgtctgcagggtgcaacaccggaggatttcagcaacctcccacctgaacaaagaaggaaaaagctgcagcagaaagtcgatgagttaaataaagaaattcagaaggagatggatcaaaggtatagtgcatcaatatgacttattaagaaattcaaggccaggcgcagtggctcacaacctgtaatcccagcactttgggaggctgcggtgggtggatcacctgaggtcaagagatca

SEQ ID NO: 135535 - DNA, 1064 bp, Homo sapiens
tcactgtcccctttctttgtacttgaggttagtactgtgactgtccaataacacatggactcgcctgggctgtgttccccatgtgttattgacgcttgtggctcccacggctctttaactgtcgcctgaaactgacagctttttaattcttcaggtgtctagcaatgcacttaatgaaatcttcaaaattattattttagccaatgatttcgctttctaattttaagagaaattctaattggctggcttacaacttcagactgaaaaccagtatataatgattaaaaagaaattccacgtactgtgatggcacttcttgtattaatagatcatccatcacaaataaagtcgaatttgtctgagaatttggtatttcctattcaatggggatttctgttcaatcctaatgactcgtttttactatgaagtgttaataatcttcctatacaatattttgaggtgagaactctgtctgtggaatgcttaagaaagaatatataactttgcgtaaagaaagtagccgagtagagagcaaatagtgtatctagttgaaatgttagttctttgaattagcaatgtttagacaataatgtgtgagaaaatatctgtatatgatagtgtgccttgtaggaaagatacttggagttttctgctgtgcaccataagtcttgtctgtgcgtacaatgaattccagttgtgataagtagatctatgctcaagttcacaggcgggctggaatcactgtagactgcccatgtcagacagtcaggaatgtgactgtatgtaccattttccccctgcaaaagtttgtctttctggttctttcctttaaaatctcatgtttctatatagggacaatttatttaaaaggttattttttatttacaaggaagtgtcaactttgaatcaatcttaaattaagaattagttttttaggctgtgtgtggtggctcacacctgtaatcccagcactttggaaggctggggtgggtggatcatttgagctcaggagttcgatatcaacctgggcaacatggtgaaacccccatctctaccaaaaaata

SEQ ID NO: 135536 - DNA, 1040 bp, Homo sapiens
tgatcagagtatataaatcccatgcaaacatatctcagcataactgattttgtttctaaataattaaacaggataaaatgttatttgttgtaagctgttgacatttgtaaggaaattttgtttcactgaatatgtttagagatgccgccagaacattaaccattgtttcatttttatgtaagttgaagaaaaatgaaactagatagcatgttctccatttgcagtctacaaaggggaattttattgcttaaattaaagtttcattttctggcctgtgcaagagacttttatatctaaaatatggatgtacgtttttcatattttagagttcattgtatggaaaaataccatcaaagttgaccgaaagattttgaaaatccttaccagttgtttgtcatatgttaaagtcttatggttaattttatttattttatcttgttctcttgctggttattggcagactcagtctttctgttttcacaaagaactcatgaagaggacgatagggaaacccacgtatgcctttgaggctagggactatgttgtaagttcacctgtgatggccaggtcatacagtcatggcacagccactaaccccattcacagcaccaagactggggacccagaggcacttgttatgcttccacactacgaaatgaaattcttaattgagagaactggacaccaggaaaaaaaaaaaaaaagaaaagcctaattgtataaattcaaccatacggaactttatccgaaaagcttgcatgaataaaggaagcaaactttctaataacagtggtgagctgagcttgtttttttgtttttttttttgtttttctcttttcattctagttctggtaaaatctttaaagggactgtgactgccgtctgagatgtcattgggtatgactttaccgcagaatttcacgcataaaacacagctgcagtgcgtggtcacgggagagtgacgctcttacagacggcagtgtagctcagtcacccatatccatgtttgtaacaaatggatccataagggagttatgccc

SEQ ID NO: 135537 - DNA, 1020 bp, Homo sapiens
agttggtagaattatcttgaattatcttgctttaatgctatctatcatatcaggttaagaattagaaatgtaatttcctaaagatgtgaaaaaagccgttggtggaaggcagaatacagcttcaaaagtggatgatggattgagctgagatgtataattaggacttgagtaatctgcagcttcttggctcaacgatgctggcgtttagaactccactcattgttaatccaagaatttccaagacaagggtgtttttgctagactgaaagtttcatatgaactgtcagttaacccatctctgccgctttaccaagcactcatgtgttatatttatatattatctctgtatttttttggactctcatgatgaatattcatgattgtttaccatttgtttatgtgtctattccagttttctcttaacattacacagtctgttggccaaaaatggtttgtgaatctgtggttcatgatattctctaactatttagaaaaagaccaaagaattcagtaatcaataaatgtaagaaaaggatggttagaaaaagataagctgggcgttgtggctcacacctgtaaccccagcactttgggaggctgaggtgggtggatcacgaggtcaggagtttgagaccagcctgaccaacatggtgaaaccctgtctctactaaaaatacaaaaattagctgggcatggtggtgcacacctgtaatcccagctacttaggaggctgaggcaggagaatcacttgaacccaggaggcagaggttgcagtgagccgagatcatgccactgcattccagcctgggtgacagagtgagactccgtctaaaaaaaaaagattaacacttaaaacagtgaaatgggaatcggaaactggttcttttgatgatttaaaggaaaatctctgttttaccataatcagcagtatgaattttatttcttactcctcaaacgtgtgctcagcaaatctttgttaaaaaaaatttcccaaatgatgtgtttattttcctgaggtta

SEQ ID NO: 135538 - DNA, 1315 bp, Homo sapiens
gaaggcaaaccagacctcaaatttggtggcaaatccaaaggaaagttatggccgttcatcaaaaaaaataaggtactgatggttggcgtgaaatgagttttctaaggtgtggagattttgacttgatcttttagtcttagaaaaactaagatcctaaacctgtagtttcagaatgcaaaagaagaagctagtgtgctaccttatgttgagacagtatttctttttggtggtggtatctttgccatggccctgtgtcttatttcagatgcattatcctcgtaccgtgactcccacactaacagagtactgacctctccaccgtttcgcctcatgcctttccctccttcctctcctagactgctggttaccttggctgggagagaggatgtagtgggacattcctgtaacactttatccgcacatctactggaaatcgttaccatgttaataacttggttttgaattcatgttaacatgtgtacccatgaacatttttcattttcttttcatagtgcgatacataggtgcatgacagcattaacctggggacgtagaatatgatcaaggcagcattactgctttaactttagaatgacttactatttattaatttaaacagactgctgtttccacaaccttagcattgaaggtctttcattttctcccatcaagctatgttagtttaggtaatgtagaaatatttaccctctggcttaagctggtttagagtaactaactagagctatagtttgcatgggaaagtctgcacgagcttcttgtcagatatttcttgctcttctgtcgcattacttactaaacctcccaactctcatcatattcttcatttaaccacctcctacatgttttcttttggaccatggcctaaaatttaattgtttgtgttttacttgcgttggatttcaaatattatttgatgcttatttttgttttgtgtcttcttgtttctgatttttactctgtcacggctccatctcttacatgtagcttatgtcccttttaacatccccccatcagcctccccctccccctcctgcctctgcctcaccctctgctgttcccaacggcccccagtctcccaagcagcaaaaggaacccctctcccatcgcttcaacgagttcatgacctccaaacccaaaatccactgcttcaggagcctaaagcgtggggtaagttctgctccggaatcctgtctctctggcgtgctttggttgcatgtttggttctgcataactaattttgtttgtgaatgaatccattgtgttttcccataacatataaaaaagttaaaaaaaa

SEQ ID NO: 135539 - DNA, 1075 bp, Homo sapiens
ttcctttaacataaaaggcagaccgtctaaaatatactttgatttattatcttctacacagcttactttctaggctggactgtagacatgttggtccttattcagcgtcttccacagttcacgtctagggcccttgttatgttttcaggattactgcatagaaacagggcaaagggcattatgaatctattaggaggtaatatgcttacagaaggaattatgcagctaaagctaaaacatgattagggattctgtggagctacaggaagaggatcacagccacttccaaccaaatggtgctgggtggggtacctctggcaccagctttcatgggtaaaatattctacttgggtaaaatattctaaaatattggcgtgagtggatttattgtcagaaagcttttatctgctctcatgggttgtgtgtgtgtgtatgtgtgtgcgtgtaagtacatgcatacatattatatataatgatggcattctgatgtgatgcctgtttgagatcttaagttattttaaaaactcacttagatagaatcttcaaaataaacggggaaactacctcctgagctcttgctgttctttacagaagagatgaagaaatcccccactggatttttgtgagactttctgaggaagccttgtgaataaaatagagactgttttagaaatttgaggtctaatgggaatttttttttaaacattcatagcgaaatgatacatgatgaaactcagcagctgaagagttaatagggcatttgtgctggacgggctcggggaacagatggaatgcatgtaggtgggaaagctattatttaaacagaggagggctactgtgtgttggaagggggtggatttttgagggtagctgggtacttaacattttggggctagactaatatatttactagtggacacaggaagaagcagacgccaaggcatatggtcaggaagggagttaacaggccaccaacaaagaggaagaatgcggcagctgaaatcaactgagggtagatgaaaagaggataaaatggcaccgacagatccaaaggccttaagaaactcaaaaaacc

SEQ ID NO: 135540 - DNA, 1049 bp, Homo sapiens
cattttttgtatacagacttctcgaagtatttggctttgaatatgattaactttttaattctacatatagatgtccctgttgtgaagcagaataggaaatcctgagttatttatgaattaaagtagaattctgtgatgtaaattataaaaaataaaatttcatttctggttttttgtttttttttgaaacagagtattggtctgtcgctcaggatggagtgcagtggcaccgtctcagctcactgcaacttccacctcctgggttcaagtgattctcgtgcctcagcctcctgagtagctgggactacaggcgtacgccactacacccggctaattttttgtatttttagtagagataggctttcaccacattgcccatggtggtcttgaacttctgggctcaagtgatccgtctgccttggcctcccacagtgctgggattacaggtgtgagccaccatgcccagccacatgtaatttttaatgtgttatatattctataatagaatattttaaagagaaaaagaaagttatagataggaatctgtcaattttaagcaagaatgaaggagtttactttaaatgatgatcagtttgataattatcttaagaaaacaaacgaaatttagtagtttaggttttcttcggttggaatcagtgttgccaactctgtgaagccaacaggatggagttggctctattctaagtgaagccagctgcgtagcagagtgttaaatttttttaccatttggggaaacagtctctagcacaatgaccactttagttattgtacatataaggaattgtactattgaatattttggttaccattgctgtagtactaggttgacatctttatggaacatgttaatatcttcagtgccttccccacgtttctgtttcttctaaaatgtctgactgtagtcatctgaaggaattgttcactataacaatttagagaacatttttttttaaaaaggaagtggttagtataaatgcaggaaataaattttgcaactgcagcttaatctttttaggcttaaaaaagtt

SEQ ID NO: 135541 - DNA, 1013 bp, Homo sapiens
agtattcacatgtatccattcattcccttgcccgttgttcactgactatctactggcaaggtatgcgggtatagatgccagcacataatcacacgatccttgactctgaggaacttgccttttgttttttctttttttcttttcttttttttttttgagacggagttttactcttgttgcccaggctggagtgcaatggcgcgatctctgctcactgcaacctctgcctcctgggttcaagcaattctcctttctcagcctcccaaatagctaagattacaggcgcctgccaccacacccggctaatttttgtattttagtagagacgggatttcaccatgttggtcagactggtctcgatctcctgacctcaggtgatccacccaccttggcctcccaaagtgctgggattacaggcgtgagccaccgtgcccagcctgttttctttctaatgtttggtttactgtattgtgaattttcccacttgcccacccaaacaactcttgaatggcattctggtgacaaagactttaaaatcacagtttgtctgtcactctgctttgaaataacaccatgctatacaaacttggatgagaggctacacctaatctttgtgttctgatagtgtagcaatgggtttagtgtggtattgggatgagaaaggaaaaggttatcaaaatgagtggaatgtgaactaatatttctgaacagagagaacagtgttttctaaatgcatgcattaaactgagttcatccatgtcaggcaatgaataattccctttttctaattctcccttgccttatgactgttggctcttacataatttctaaatgcaaaataggatattgtctaacagaatctgcagttagtggttacaaacagctgcagaaattgttagttaagttcaagttatgttttttaaacgccagtaacaatttcttccttttcttatcggtctagtttcatttaacttgtatggttctttttctgctagagtctcaatttatgagcc

SEQ ID NO: 135542 - DNA, 1026 bp, Homo sapiens
cttacactgggagcatcgttttgctatttttatgaaagtgccacttacctcctttccaaggatatgatgaattacccaattttggcatcacaaacattgaagctgagggagcagcaatgtctaaacattgaaattcttaagttattttgctttggatttgacttgaaacactgtaatttcccaaaacacccagtactttgactgttctgtcagttttttactttgttgcctgtgaaggcttatgtcagcgtcaagctaactggaggcagttttagttcttatcattatttaatgtcatctcccattatgatttctgacagtctctgaatctaacataaatgtttctcccccagttcccgcaaatgattaaattatctaattgtattcaaagcagcgcatcctcctttttttctagcagccagccacacagcactgggaacggtaagcctgtgcttacaaaagccttatttgtacatgtgaactttgtcttgtgcttgatacaattgatatgaactataagcatacgttcattttttaaactacctaggatcctgggtataagcctgattttcttttctttttgagagttaatgcccagatatggattgaaaccacattttgaaaccacatttttattagcactgtgttcactgtttttttttttgttttgtttgtttgtttgtttttactttttgtggtgatcgaggttttgctatgttgcccaggcaggtctcagactcttgggctcaagctatcctcacacctctgcttccctaagtctggcaatgcaggtgtgagccaatgtgcctggccagcactgtgttcaaatcacctccattcatccacatccatgctcagacttcggtacgctttggcattgtgttagatgccagcgtgtgaccagatgtttagtagttcccttataagacagtatatgtcatccttaaggcacccagtttaattaaaagtaagtttacagtataaagtagatataagaaaaagctagcagtttttatctctgggcaa

SEQ ID NO: 135543 - DNA, 1054 bp, Homo sapiens
cgtggaaataataaagattagacagttttgatggaaataaatgcagattttaaaataacttctagaaattatgacatataagaaatcaattcagagaagagtattcttgggccagacacattggctcacgcctgtaatcccagcaatttgggaggcagaggcgggaggattgcttgagctcagaagctcaagaccagcatgggcaacatgacaaaacctagtctctacaaaaaaatgcaaaaattagctgggcatggtggtgcatgcctgtagtcacagcagctagtgaggctgaggtgggaggatcacctgagccgggaaggtcaaagctgcagtgagccaagatggcgccactgcactccagcctgggtgacaaagtgagaccctgactgaagaaaaaaaaaagaaaaagaacaatgctctttgggagctttagataaaattacatcttctcgtaggactcttatggtttcataattattttcctctgattttagagtaaaaggcgatttgaacgcgattgcaaagaggcggacagggcgcagcagtactttgagaaaatggacgctgacatcaatgtcacaaaagcggatgttgaaaaggtgaggtgaaagctcaagtgtgggccgggcacggtggctcacgcctgtaatcccagcactttgggaggctgaggtgagcggatcacctgaggccaggagttcgagaccagcctggccaagatggtgaaaccccatctctacgaaaaacacaaaaattagctgagtgcagtggcaggcacctataatcccaactactagggaggctgaggcaggagaatcgcttgagcccaggaggcgttggctgcagtgagccaagatcacgccactgcactccagcctgggtaacaagagcgaaactatcgccaaaaaaaaaaaaagacaaaagaaagctcaagtgtgtctttcatttcccctgtgagtgttcatcaccgaccacccatccccaagttctcatttctaatgtagccacaaaaggcgctacatggggaatcattttcattttgtgtcaacca

SEQ ID NO: 135544 - DNA, 2514 bp, Homo sapiens
tgagcagaggagtagccagagaaggagggagggaaaatgctgctgcttaggcctgaccctggcccattgcctcatgctgctcagtgttacgggtaaagtcaagcaactgagcatgcctctgagaggtaggcatttagaaaacttcgaacacgttcattaagaaggtatttttactatggataaacttggaaaaataagccttgctaagtaaaaatagaatgtgtgtcccttagtgaacgtttctggtttctggtttgggttttaagtggggtacgacatacccacttgaacaggactaaggcgttttgccattacgccacatggtccatagaaatatccacgccgcttagagttctagctcaattaaaactgggagtcctgattcagacttggaagctgctcctgttcaaacccactactacgctgtgagtttagaggaaacaggatttgtcacaggcatgtttgctggaagctccctctttctttgcccttttcaagtctttttgtttctttgtttgcatctgtggaatctgagttttatttaaaattccagatggttgactgttctcagttgagtgtttattcttatgtttttttctacttttttttttttgaaagggctgttctcacatcagtgccatattttgctcttttaactgttaatggtttaatatctatataaatagcaaaaatgagcagctgttgtacctaattgcagtgtgaatactaaacattctcatagcatttgtgtgagtttgtctgttctgtctgtgatttcttgcagttcagtaaaattgtctcaaaagctttgccattgtcgtttttcttaaagttaatgcttgcttattttagattctctgtgatttttttttttttttaatctcagccacctctgttcactgggaaatttctttaaaaaatttgaagggtgatttgatctgtgtagacttttatttcaactaaaaagttgaaataagtaagtgtagctgtcaccccagaaactattagggtttgggtttttttgtttgtttgtttgttttagcttattattatgttttaaaagaaactaaaagcatcttatgacagcagaaagtaagaagcatttctctgggtctctagagatggcatttcctgtctcttttctgataggagagaaaggagctgtgatgacttcattctatggctccaaaagaagcactttttatctttgtccggagaacaattcctccttctttagtgcttgcaggcacactttttagacacacacttgctcactgtccagaaaagaaatgttcggccattgttggtaaacaacaaatacatctggcaaagctggtttatttgtttaactttgtaactgttaaaatagcttttccggtgaaagcagcgaagatagagctagaaacaaaccccagctattcaggtcatggtaggcacagagcacaaaggagggcttttgttccctcccttaatttcctgaaggatcccccagcacggatagtttttcgtatgttatggccaaataaatgatagagggacaggtactgtgaaaaaggctggggctgggcatggtggctcatgcctgtaatcccagcactttcggagtctgaggcaggcatatcacttgaggtcaggggttcgaggatagcctggccaacatggtgaaaccctgtctctactaaaaacacaaaaattagccgggcgtggtggcgcatgcctgtagtcccagctactcaggaggctgaggcaggagaattgcttgaacccaggaggcggaagttgcagtgagccgagattgtgccactgcactccagcatgggtgacagagacttgtttttttaaaaaaaaaaaaaaaaaaggctggaaggaaggaagatgggcatcacccacaatctcctaagccccatgaaatggtacgatgataattgcagttttcaggtagtggtttaataatgtggggagaggtgtggctgagcagtcttcatgagagataacttaccagtaaattcaaggtgcacaccgtgccttaaacacaaatgcatatttattatatatttacactaaggagtggcaagggaaccactctatggatttttcaatcaaaatcatccctcgtgtttttaaaataagacttttttttttaagactcttgtcttcagagatttattttatatgaaagtcaggtgacatgtcccaggcaatgcctgtcattgtctgctgggcttctgtgcatttcctgtctccacccacagcattgccccaagctggagggagctttcactttgttaaaacattcactttcagaggtgctggagagatagatcgtcaacctcgagtacagctctgaattggtgctggggttttctctttttgttcctgtctttgaatctcaaagtaaaacttttgggagcggctgcatctcttcagcaaactgcgtaactcggtgctccggcttaggaaatgggatctttctcttcgcagagaagtcacccgataaagactttcaggaccaga

SEQ ID NO: 135545 - DNA, 1880 bp, Homo sapiens
accaacatgatgacaccccatctctactaaaaatacaaaaaaaattagccagatgtggtggcgtgcacctgtagtcccagctacttgggaggctgaggcaggagaatcgcttgaacccgggaggcagaagttgcaatgagctgagatcacgctaccgcattccagcctgggcaacagaatgagactccgtctcaaaaaaaaagaaagccactgcatatttacacatggtctgtcctctccaattaaataattctgttcttatttgctctgctttgagacaaaagatgaaaagctgtgcacgttcttaataacagtagcttcatcacacatgttgaaagattgaaggaaatggatttcagctgtggactttttttgtttgttttaaacttgtaacaaaagcactaatgttatctttcattcctgatttcttaattctctttctatataaagctgacatgtctgcatttttatttcaggaatctttcaaagaagtaccaacctaaaaagaactcgaaggaggaagaagaatacaagtatgtttaccattgaaaattgtcttgtaatagacacatgccattgatgactacacacggaaaggagaaatacatgtctataaaaataagttgcatttcccattcattttgtgtcagtttttaaattggaggagagaacaataaaaacataattaacttttcttatatggagtcactggacctatgccagattgtttcaattaaagtaattaggaaaactttagaatgtaattaagcaaaaacaggaagtatggaatctgcattctagagttgatttggtttggcactgtcaggagtccctgtcatgctagtcattcatccaagaaatatgtcaatttcagtcagcaattaaggcatcttaacacagaccactcaaatattacatctctaatgtatatctaaatatcctttacattagtacatatagcatgtatatgaattttggattatatcttgactaagtatcaatgaagccaaatattacattatgcggagcggttcagttttgcaaaatgaaaagtgtttcaattgtaattaattctgagccattttgttgagaacacttgatgtgtaatgaatactcaggatcctatgggaggtggatgccaattaacctgattttaattaatattttcttggtgtaaagcagaatatgaatgaatgtggccttgtgtgaaacagagtggcgtgtgttctgttccataggtatacgtcatgtaaagctttcatttccaacctgaacgaaatgaatgattacgcagggcagcatgaagttatctccgagaacatggcatcacagatcattgtggacttggcacgctatgttcaggaactgaaacaggagaggaaatcagtaagcaaaactttattctttttcttcctaaaagatggaccaaacacagtgggaatatccctagaagattaaaattaaataaaaccatataagactatgggtcttaaactcatacctttgagaatcatataaaagttatggaccccagctgggcacggtggctcatgcctgtaatcccaggactttgggaggccgaggcaggcggatcacaaagtgaggagtttgagaccagcctgaccaacatggcgaaaccccatctctactaaaaatacaaaaattagccaggcgtggtggcatgtggctgtaatcccagctactcaggaggctgaggcaggagaaacgcttgaacctgggaggcggaggttgcagtgagccgagattttgcacctgtgctccaacctgggcgacagagcaagactccgtctcaaaaagaaaaaaaaaaagaaaaaaagttacagaccctgttcctagaaagtgtttctaggtctctacgt

SEQ ID NO: 135546 - DNA, 1045 bp, Homo sapiens
gagccaccgcgcctgaacgaaccgtgttcattttttaaataacggtaatacaaatagggcaaaaaccttgtcccaagagaacagcaatggaaagttgatcttttttttgtagcagttcttgagataaatatcctttgaaatgaagttcactttgagatctctttagcttcttggtttatgctggtatttatagagtgaattatttattagtgcttttaagaagcattttgaatgctatatatgccagtattgtcaaagtgattcccattcatcagaactcgatggtcttttcagtatatcacctacaagggatctaatttaatcctgtttagtatttgactggtaaaagagaactataaagaatactggtttacctggatcaatagattcagagtcacgtaaggcttccttcaactagatataaaacttacatgatttttatggctgctaaggactgaaaggaggctacaaagaaaatgtggatttaacattttggaataatttttatatgaggtgtgaatttagaagtggtattttcaatttgtaagttacaggtaacagaagaaatgattaatatttaaaatcatgcagtagtctgggcacagtggctcatgcctgtaattccagcactttgggaggctgaggtgagaggactgcttgaggctaggagtttgtgaccagcctcagcaacatggcaagactctgtctctacagaaaataataaaaatgagctgggcatggtggtgtgcacctgtagtcctagctacttgggaggctaaggtgggaagatccctggggcccaggagttcgaggcttgcagtgagccatgatcatgccactgcactctagtccgggtgacagaacaagaccctgtctctaaaaaaattaaaataaaaaataaaaatgaattgtaaaataaaccacgcactagaaatatctcacatgcagccactacgtttttccaatactctaatcacccatatgtgctgctctcaatatatttggaaaataacccattgattatgtagtcatctgttttgcgcac

SEQ ID NO: 135547 - DNA, 1062 bp, Homo sapiens
ctggtaactactatattcttcaccattagctgtttttttttgttttgttttgtttttttgagatggagtcttgcactgtcacctgggctggactcattgcaacctccgcctcccgggttcaagcaattctcccatctcagtctcccgagtaactgttattacaggcgaccgccaccacacccggctaattttttgtatttttagtagagatggggtttcaccacgttggccaggctggtctcgagctcctgaccttgtcatccgcctgcctcggcctcccaaagtgctggattacaggcgtgagccaccatgcccagcccaccattagctgttttaaaaaatttcagttttacttgaaaatgttcttaatgaaacagtgaagattattcattttactaaatctcaaacccttgaagatacatctttttaatagtgtgtatagtaagatgagaagctctttagtgcagactaaaatacatgatcctgagttgtaagttgaactagctgcttttttcatgaacaccatttttacttcaaagaatgagcgacagacaaacttttgagtatctggcaaacattttctcaaaaataaatgaagtgagcctgtcacttcagggaaacagctggcaatgtttgttgccaatgataaaattctagctttaaagtgaaaattagaacttggggaaattgtttttccactgtgagtttgacagcttccaaatattaaagactcatcagaaaagatgagattggtactgatataaacaaatgtgattcaaaaaaaatattttacaagaaatgtttcaacagttggaagatctgcatatatctatgatataatattttctttttttcttttttcttttgtttttgacatggagtctcgctccatcacccaggctagagtgctgtggcgtaatctcagctcagccgagatcagcaacctccccttcccaggttcaatcaattctcctgcctcagcctcccgagtagctgggattacaggtgaccaccaccacacccagctaatttttgtatttttagtaaagacggggtttcacc

SEQ ID NO: 135548 - DNA, 1028 bp, Homo sapiens
ttagtaccttttggttttatgttgatgcgaagtagtttaagtgttacagaaacagtggctttaaagttatggtattgcttttctcaaataggcagcacttagtaaaacaaaaagaaaaaaaattgcctaataagctgggcacgctggctcactcctgtaatcccagcactttaggaggccaaggcgggtggatcacttgagaccaggagttcgagaccagcctgaccaacatggtgaaaccctgtctctactaaaaatacaaaaattagccgggcgtggtggcgggcgcctgtaatcccagctacttgggaggctgaggcaacaagaatcacttgaaacctggaggcagaggtaagcagtgagccaaggtcgcgctacagcactccagcctgggctacaaagctagactccatctcaaaagaaacgaaaaagaaaagtcaaaagaccattctggagtcctctgatgaaatgagatctatgtcgttggtatgaaaatgaacatcattcacattgtttcctaggcagagtcactgcttttgatgctatttgtatcatggtagcgttttgacagccaacaggaatttccttcttagtattcacattgagaaatgtgattaaacatcattctgttgcctaaaaggcaaatcagcagctagaacagctttaaaagggaccatggcagccactctcaagttctgtagccttttttgttttgttttgtttttaatctaatgaggtcctgtgaaaatagcccagtgtttgcatagataaaataagcattgtgggccgggcgcggtggctcacgcctgtaatcccagcactttgggaggcactccaacctgggtgatgaagcgagactccgtttcaaaaaaatgaaaataaaaaataataaataagtaaataaaataagcattatgcatttgaccacttgaaaaaaatgaggtttctctctggctagccattactccaaagatcaaaacaaacaacaaaacaagcaagagtggttatcatttatttctttccagtta

SEQ ID NO: 135549 - DNA, 1013 bp, Homo sapiens
acatgaagaggtcactgagtaccaggagtatgcgttgatctcttaaaacctggctgcgcctggtagctcacacctgtaatctcagcacttagggaagctcgtttgaggtcaagagttggaggctgcggtgagctatgatggcgacactacactctagcctgggcgacagagcaagaccccatctcaacaacagcaacaaaaattagccagatgtggtggtgcatacctatagtcccagctaccagggaggctgaggtggcaggatcccttgagcctaggagtcagaagctgtagtgagctataatggctccagcctgggggacagagtgagaccctatttcttaaaaaaaaaaaaaaaaaagacaaagcaaaacaacctttttattgtggagaatttccaatatactaaagcagatagaatagcataatgaactcccatgtgcctgtcaccctcaataaccatcaacacatggctgattctgcctcatcccacatacatcaatttctggttcttattttttattatttttaaaattagaaatgagtcctcttatatttttattgtcttactccatgctacattttccaccattcttctggctttcccagtcttctcacagtccatctcttttgacttttccctatattccttgcctttttatttatttattattattattttttttttttgagacagagttttgctctggcacccaggctggaaagcaatggcgcgatctcagcttacagcaacctccgcctcccggttcaagcgatctcctgcctcaacctcccaagtagctgggattataggcatgcgccaccacgcctggctaatttttgtatttttagtagagatggggttttgccatattgatcaggctagtcttgaactcctaacctcaggtgatccacctgcctcggcctcccaaagtgctgggattacaggcgtgagccaccgctcctggctatttattatttttgtttatttttttaaagacctgtcagcagga

SEQ ID NO: 135550 - DNA, 1079 bp, Homo sapiens
aaatgagttgtgtggatttatattcttatcagaaatatgtaggaatagtgggcacattatcatgtcctagccaatatggggtattttcttttcaaaaaacaaaatcctaaaatgaaaggcaaaaaaggtattcctgtttatttatttatttatttatttatttatttattttttgagacggagtctcgctctgtcgcccaggctggagtacagtggcgcaatctcggctcactgcaagctccgcctcccgggttcacgccattctcctgcctcagcctcccaagtagctgggactacaggcgcccgccaccatgcccggctaattttttgtatttttagtagagacagggtttcacggtgttagctaggatggtctcgatctcccgacctcgtgatccgcccgcctcggcctcccaaagtgctgggattacaggcgtgagccactgcgcccggccctgtttatttatatttactcttattactgagactgtactttttctccatgtgttgattaaccaatttatattcaccattttttattaactgtcaggttcatctgatgattcatgtgagttctttaaagataatttatggccaggtgcagtggctcacgcctataatcccagcactttgggaggccaaagtgggaggatcacttgagtctaggagcttgtaccagcctgagcaacatagcgaggccctgtctctgcaaaaataaaaataaaaaaattagccatgcgtagtggcatgtgcctgtagtcacaactcctcaagagactgaggcaggaggattgcttgaatgtgactggtctaggccacattgagccgtgatgcactgcagcctggatgacagaacaagaccctgtctccgaaataaatacatacatacttactgcttatacaatgtttttctcaaaggaggctgggcatggtggttcatccctgtaatcccagcactttgagaggccaaggcgggcagattacttgaggtcaggagttcaagaccagcctggccaacatggtgaaaccccatctctactaaaaatacaaaaattaggccgggtgtggtggctcacgcc

SEQ ID NO: 135551 - DNA, 1075 bp, Homo sapiens
tttcttgaacccaggagacagaggctgcagtgagccgagattgcgccactgcactccagcctgggtgacagagtgagagcctgtctcaaaaccaaccaccaccaccgaaaaacaacaacaacaacaaaaaaagaagaggtttaattgtctaattgcctcacagttctgcaggctatacaaagcatggcgccggaatctactcctggtgagggcctcaggaagcttccaatcatggcagaaggcaagaaggagcaggcaggtcacatggcgagagcaggagcaagagagagtggggaggtgccacactcttttaaacaaccagatcatgcctgaactcggagcaagaactcactccttaccacaaggagggcaccagccattcatgagggatatgtcctcatgactcagatacctcacactagccctcacatccaacactggggactgcctttccacatgagatttggaggggacagacatctaaactatgtcgttcagtctgtccaacttgactgcagttaaaagccacacagaaagactgcatttgtgcaatggtgtaggttaatgcctgtgcaccatctgcttcttgtctggcttctttgtgctcatatcaccgttctctgggaagaaaatattcttttctttctctttattctcttccttcctgcagggagcctgaagtccagtctttcccaaaaagaatatcttttttttttttttttttttttttagacggagtcttgctctgtctcccaggctggagtgcagtggcgcgatctcggctcactgcaagctccacctcccaggttcacgccattctcctgcctcagcctcccgagtaactgggactataggcacctgccaccacgtggctaatttttttgtattttttagtagagacggggtttcaccatgttagccaggatggtctcaatctcctgacctcatgatccgcccatctcagcctcccaaagtgctgggattataggcatgagccaccgcacccagcccaagaatatcttaagtgaaaacaaaagatagatgcccactctgttccatgaaagaagccattagc

SEQ ID NO: 135552 - DNA, 1044 bp, Homo sapiens
cccacatgggcctcccaaagtgctgggattacaggcatgagccaccgtgcctggccctaaatatttttaatggtatgcaagcaaaatagactgtataagctaagtgtttccatggtggagatcccacagtccaggactgagagtaaacacatgggtctcattcaggggctgttgcttctggagaggaagttagtgacgatgagcactgcctggcgagagcatggagttactgcttagaactgaaggtcttggctcaaagctgcactgggatagattctctgcattgacttccagatacttgtcactggacaaaacctcttcaaagcccatctgcctggcttttagccttttttttctgaaacccccgaggctttaacttcctgtacttggttcttgaggggagcagctgcatatgcgtgaattctttctccctccaagaaaattgaaaacaaaatattaatattcatttagagaatcgtgtaaagtatttattataaggctcataaactgagtaaatgatagtatgcgaatatgctattataatatggattgatttaaattcatagaataattaagcaccctgaaatacctctttctctggagcattggggtggaaattgagactttttaagtccttggtagcttgattgtcttctaatgaacatgctcggagtctggtatattagactctggctgggttcagttgctggtacctatttgttgtgatatcctgtacacccaccagatagaaagagtttcttgtttacttgggaaggagctacataatcatgtttggactagattttcaagcagcaattactaagaaaaatcctatgggcgaggtgtggtggctcacacctgtaatcccagtgctttgggaagccaaggcaggaggatcacttgagtctgtgagtttgagaccagcttgggcaacatagcaagacccccatttctttttttttttcaagatggattctcactctctcccctagcccccaggctggagtgcagtgcctaatctctactcactgcaacctccacctc

SEQ ID NO: 135553 - DNA, 1021 bp, Homo sapiens
cccagaccgtgataacacagttttcaatctgtggttaaatgaggctgacctattgtgtacaagtctcatctgtaatttttgttggagtatagtgtgcatgggggaaggtcagttaagtcctgcccatgttttcccgggagtcttagagtcagttctggtaggctggaaacccacatgatataaaggcatatgaccaaggccgccaggcgcatttcactggcccctgaaagctggaaacgactaagagatctttgcctcatttattgaggcccagagaggggaaacgagagccagtgtcacccaacagacctgggactggaactcgggtctgcttgctagtatgtatcaggcccctcccaacttcaagtgtaggtagaactagtatttgagccgaggtcagtgagtattctttccatcacatctctgccccatcgtagatattctaaccatggactgcaagtcaaggttgccagagtgtgaatgagcacagctctttgtggtgggtggttttacactctgggtaaatctcattggcattcagtagttccaggctattctggccttgacttcccttttgaccttcaagtaggtgggcactggaacaggaaagtaccagggaggaaatgagcccagaaactgatatccctttgtggtacactctcattctcacttggtgccaggcccctctcctgctctattgttccccttcatttcctgtcccctctcccactccttcccagtagtggagaactgctcaaatgtgttgcatatacatttttggacttttttttttttttttttgagacctcgtctcactctgtgccccaggctggagtgcagtggtgcaatctcagctcactgcaacctccgcctcccgggtcaagcaattctcgtgcttcagcctcccgagtagctgggactacaggcgcctgccaccatgcccggctaatttttgtatttttcgtagagacggggtttcactacgttggccaggctggtctagaattcctgacctcaggtg

SEQ ID NO: 135554 - DNA, 1821 bp, Homo sapiens
tactcaggaggttgaggcggtgggggggcatcacttgatcccgggaggtggagttagcggggagccaagtttgtgccactgcactccagcctgggtgacagaacgatactcttgtctcaaaaaaaaaaagttttagctgggtacagtggctcatgcctgtaatatcaacactttgagaggccgaagtgggtggattgcttggccaggggttcaagaccagcctgggaaacttagcaaaaccctttctgtataaaaaatacaaaacaaattagttgggcatggtggcatacacctaaagccatcctcccacctcagcttcctgagagctgcttgatcgcttgagcctgagttcaaggctgcagtgagccgtgatgacaccactgtcctctagcctgggcgacagaataagaccctgtctcaaaaaaaaaaaaaagtttcatgtttgtggtttgcacagattatatttcctgtctccttataaatatagctaatgtctggagctttggctgtcctttgggagaatggaatcttcctttaattgttttctctctgtttttataggaatgatgtatttaaaatccactggctgatggcggcccttcctttcaccaagtctctttccttggtgttccatgcagtatgtattagcattttgaggatcattcatgaaattacgtataatgcctgtgtgagcaggcaaaagaaatttgaagaaaggggatagattggtgggaaacaaagacaaagaatacatttctcataaagcctcctcttgtctgggagggcctggccatgcgggtaaatgattaccacctcccctcatattagacttcagacatcttctaatactgcttacagacctacagtttttctagaacacttattattgtttttatttctttgtttttggtttgttttgtttttttaccatttctagagatgagagtgccacctgctgacttgtttccacgacttttttttttttttttttttttttttttttttttttttttttttgagacggggcctcgctctgttgcccaggctggagtgcagtggcgtgatctctgtttactgcaagctcctcccctcaggttcacgccattctcctgcctgagtctcccgagtagctgggactacaggcgcccgccaccacgcccagctaatttttttgtatttttagtagagacggggtttcaccgtgttagccaggatggtctcgatctcctgacctcgtgatccgcccgcctcagcctcccaaagtgctgggattacaggcatgagccaccacgcccggcctccacgacttttttatgtttccagatattccctcatgttcctctgtgatttgaagttcaattcagtattagcatatttatctgagagaaaattgatgctataaagctggaggcatgagaattgagcctcagctttgtatatttggaacttatgcaaattaaaatgaacttgcccaagggggtaagatcacaacttctcctgtctgtgggcctccaagtgcccgtggagcacacttgcaaggatgacagtctctagacatgtactctttgctgtacttgaaagtggcctccttggaaaaggcaataatatatccagtggcagcgtcaccaaatgacaatgatttggataatttcccaaatgggtccaagttaaaagattctttgtggagccatgtagataatgagtgattctgaaatgcagttgtttgatttcagattgactaccactacatctcctcccagggcttccctatcgaaggctgggctgttgtgtactacataactcacctgtaagtatgcaggt

SEQ ID NO: 135555 - DNA, 1034 bp, Homo sapiens
tattaacaaagtattttaaaaccgtgaactacaccagtgagtttccacaggtagaatatggtagtagacgtgaggggcaaacatttcctaaatccttaccatgtttggggccgagggccaaggccagccttacaaggctgtgagtcttttgcgggaggagccttgtcttactggaagcagaacttggatgtaaagaacttacaatgaacagagaggttttagcagggatgcacagctaccctgctctgcttgaccagacagcgtctgtttgacagagttgtccctgtgaacttttctcacattttggagcacaaagtaaatgtggaaggttgggggtggaaggggacaactcctgaggcacccagatcagccgtcccaactctggcagagtttgcagcagagctcctctcggagttctaacagacctcatccacccttacgttcaataatgaggaacatgtgttgacatcaaatgaatgggacaggccagttgctctgtgtttccaaggagagaataagcactcaagttggaaggatcaaggagggctttgtgacagagatagggctggcctgggtgttgaaggaaaggaatgtgacagaggcagtaaatacacatgaccctgctgtctgctaagcaaaacatgctgagggactgtgccggtctttcggctgtcgagccaccgtggtcacttcttcagccagactgagtcctacagcctgccgaggtctcggagttgtgaatgacggagactgggttgtcacccggctgcgtgtgcctcttccctttagtagagtccctcatccctctagagtctccccccaccagcctgaaccaggctgtcgtggggcatagccttccaggaagcccgtcctgggcttccctgaaagacagacacacagagttccatggaatgtcagtctgagaagataaggacatttaacaaattaagaaagtcatgagtatttagacaatagaactagtctgggagggccttaaatgtcagcctgaaaagttaaaactgcttccttttggc

SEQ ID NO: 135556 - DNA, 1027 bp, Homo sapiens
ctgtcttctgggctgagaagcttgctcaggtggggactgggacagccggggctcctgggggggcctttccatctctgcatggtctgtacagcagggtagtttcagggtagccagacttcttacaagaaggcttagggctccaaaggtcccaagagagctgggtggaagctttatctaccttggaaatcacacagcagtacttccatcttactgtattagagcaattacggcctgtgcagattcaggggggtggcatagagactctccttgatagcggagtggcagagttctggaagagcacgtgggactggaaagaatgctgtggtcgcagatcgtgggtctggaggccaaggtgtacaccccacattggggctgctagcatcataacagtccacccatgctttggggcctcagcaacttctcatgtctgtaggtcctggcaaatgtagcctacatcatcatagagtccaccgaggagggcacgactgaatatggcttgtggaaggactctctatttctggtcgacctgttgtgttgtggtgccatcctcttcccagtggtgtggtgagtagctcacagggagggaggccacatgacagcttggctgtcaagcccaatagctgaactggccattcccaaactgatctcagtcacatgggacgtgtgtttaaaagtacagctttctgagtcccagactgacctgaatcagcctccaggggcagaaccctgtgtctttttccagttactcggggtattctggcagagctaatccgtcaccatgagctggcatttaacagagttctaagacaatagagaggaattgggaaatgagaacttggtagtaacttaaagtagcagcctgaatttgtggtggtggtagggagttggagaaatcccataaacagccagttcttgccaacttaggtggaaaatgaggaagttcattaacataaaactagtgatagttctcagcacacaaacatttttgatgttttcagaatggattgctccattcctggaaatggca

SEQ ID NO: 135557 - DNA, 1033 bp, Homo sapiens
aagtgagagacatgccatttgtagttttccttcctgcattggggtgaatacagctttccgttttggggtgaatacagctttcagttttggggtgaatacagttttcagttttggggtgaatacagctttcagagagtgtttgtttggcttttactttgttgtctctggattccttttgaccaaacctgagggaaatctaaaggaaagcattgaggccgaagctgcccactgtcctttagccgcgtctttgtctctcctgtcacgcgcagtggcttctctcaggtcctcggtcactgagactcacagctgcactgcatcctccgagagggagcttaattgagtctcgcacagacacacctagcgctggctccactctgtctcgcctgctaagatttactggctctgactgcccttgagcccgcatccgcgttcccttctctttctccagtgtcattaccttataggactggcgtcgagatacacaccgtaaatttaattaacagtctctgctgctcaccatcctttttttgggccttgtgtttctgaggaaaagtcagaagatgtattctgaagagccttagctttcatgtgagcttcagaagtatttaaacaatcccggttggctggctgcagagttgatggaggaacggcttcattccgaggtgccgccgtgctctgaaaggagccgcgaccatgcgaggcatttgttagggcagcggttctcaagggggtcctcgggatcaaaactattttcataatcatacggtgtgagtctcttgtgctgttgacatttgcctgatggtgaaaagcaatgatgggtgaaattgccggcaccgtcacgtgattccaggctgtggtaccagaatctgccagtagccactgcattctttactgtcacctactcacagggggtgaaaaaggctcatatcacttaagaatggtcttgaaataataaaactgttgatgtgattaaatctcaacccttgccttttaatattctgtgagacagcatgggaggtgtgcacacagcact

SEQ ID NO: 135558 - DNA, 1046 bp, Homo sapiens
ctgttgtttttgtccttgttacagttccaggatcctcttgggaagtcagctgggaaggaggggataatctgtctccttgctggccttcttagttcctctttcactcagagaggacaggggaccacctagggcaggggcagcacctcctgtgcactgtggggggcgttgctcttctgctgagtcatggagagtattgacttgggcatttgcaggggctgtggtatttcctgcctcagtgggcacttgtcctgttctcatcagtaagaaggacttaccagaatcgagtgtcatggttattttcctcagagtgagttggaggtagaggagcccacaggacaggaggtcagccttacaggacccccaagaccaggtggacatgacaccctccccaacccccgtctcctccttttctctcccctgcagaggtttcagcatcttcatagccgggcctgattccctaagatgggcaggggcaggggcagcctgggcatctatacttaaagctcttccgatgattctgttgctcacccccattaagaaccattgctataaaggaattctcctccacatgaggaggtcgatgcctggagacagaggcagcaggccaagggcaggcacacccagctgagatggggcagggctggaaggcaggcctcctggatcctgcctggggccttgtctctctccccacactcattctttcaccgtatttgctgctcctcatggtgaggtcagaaatagcccgcccagccttggtgagccttcgctcccacaggagcccaacacccagcccgccacagtccggtgagcagcaggctgtcggtgttcctaagtcagggaaatctttggaagaacaatggagggagtcgtgggaccccaggctgcgacctgctgcctggctgctcactgcatcatgctggtttcaccctgctcagagcgggctccacccctgctcggcatcctgactcatcctatgcatatggcagcgctgcttgcaggagagcccaggcgccctggcagcccccaggtccccatttgttccagtt

SEQ ID NO: 135559 - DNA, 1012 bp, Homo sapiens
gatggccacagccttcctaacaagcaggtcatctggccatgtctgtattgtaactggtaaaaggcttcaagtcagattgatgatcaagaaaagtcaaaaccccagcccaagattgggaaagcaggtggtggttccaagcttttaaaaaattattgaagctctccatcctgttctgtgagtgtgtcttctctttctccttcacgtcatagccgtgacccaccgttcatctctgctcttgcgtaaagatgaccgatggagtccaaagccaagtggcttcaccagctgacaagccaccctcctgcagcctgagtttcacagtccactgggttcgttgtcatgcggtgtttgaatggttaagcccttgcagtatttcagatcgggcaaaaaatatcggatgcacatagcagaaccattggtggtatttatagctttgctttgtactcctcactgtttctgcctacgcaaaatatccatgtttcctctgagaaatctgttgtggactgaaagcgctgctggctgtgaaatttaataaagtgtgtatgctttgctagaaaattatttcttggacaataggaacagtcattgatctgtaaatcctggctcttaacagtgagtggccaaggacttgatcagcccatttcttggtccctcagtgctttaaaatttaagtagcactgcattttgtaatgttgaatatgactctagtgacttgtaggaggcacttgtgaggagatgcttgcttcagtgtaaaagatgctcatggcctgagtcagttgagttttctttcaagaaaccacttcagagtgaaatatccagggtttccccgccctggacatgtccagcctgcccaggcagcacacagccctgtaagtccacctcgtgtgggtgagatttcctcctgcgtgatgacctcatcgccatctctgctgtctcattccacagcctccctccctcttctctcctcctctgccctcgcccttcccccttccccatcccctccccctcctcctct

SEQ ID NO: 135560 - DNA, 1038 bp, Homo sapiens
ctccctcctccacctctttctcctcctccttccctcctcctccctcctcttcccttctctgccatctttctccccgtgcctattgatcccacataggctcattctgggtacaccggctaaaggctttggtgcattgcagcgttttctcccagcagctgtgtgaaagatgcattttctaagctaaggagaattttctcaagagtggcatactcatgccaaatattattgctctgggccatataggctggtcttcctccacactaaaatgggtgtcttgttttggtacttaaaacagtctactccaggcatccagtccttacagaccaaggaagagcatagcgatgcctgttggaattgcagatgcattctggccttctcccccgtcctgaaacattttctttgaggaaggctcttagaacattagatagtctgctgaggttgttggcccagctccatacacccagtagaacagtggaacaactcatgcttcatgctgccaagctgctgtacttcaaaggaaacagatctagcacactgctgcacccctgcttccacactccacacttcaccccgctgcttttctctgacccgcccctggccttgtaagactcacgtaagctaagtccaggatgcctgtggcctgcggcttgattcttccctttaggattcagcaagttaatggcttcctcgctatagaagtgagactttgacttgatgcctcttggtatatcaaaaagatattcatccagaaagtaccaaatgttctgaaagacccgctcttcactccagttttccctagggtgtttctggcagggcgtttttaaaaggcatctacctgagttgacgctaatacttgtcaccacctggaacgtagttatcggtcggcaggctgaacatactccagattccccagaggccacttctgtagcccagcgatgcatctgagcctctctgcgtggtttatgcttgaaaaatagataatgcttttagatggttcactgccaggccatgggccccacacatctcaggccctgtgtg

SEQ ID NO: 135561 - DNA, 1041 bp, Homo sapiens
cgcccatgaaaggacttcagcagagagtgatgggtcagagctgctggagtgacaggtcagagctgctcagagctgtttctctgagccgaggctggggtgacaggctccacctgaatggacagaggccagtggattcgcgtaggggggtgtggttcaggtggtaggtccagcatggccttcccggtccacctcatccaacatatcatcatatcttgagaactctcctatccttttcggctttagtttctctccttcacatccatcacaaacgtcacctatgttttctgcatcctgtttgtctcttccatgggagaacaccctcccagagggcagaggcatctccataacccagaaggccgcctgaggtgttacccagcaaatctctgtgaatgagcgaaggacggaggaaagaatgacacccggtgctggggccctggggtaggggagagagcggggaggatgaggcagccctccccggggctagcagggatgaggcaggagtggggtctctttctcccttctttccacagtgttctaacctcggagggtccagaaagctcagaggaaccctgagcagggccgagtgccttccagctcccaaatatctctcctgcctctaagcatactccatccactcctgctttcccctgaagcccctgcccaggctgagccccaggccccaggaagtcttcagatggggatggacttgctggcttggggagctcattctgcagaggaggtgggcccagttggagggatctggtgtagacctgggagcagaatgtcccaaccttgaggaccaactcagagtggacagcagtgaggggcccacagtggggggctaacagttgaccagactgtgctgagcatcctgcctgggaggagggagagccagcacgggaaccagggcctggctggatgacagcagtagtagttaaagccctttagaaacccaggtgctcaggctgggtgcagtggctcatgctggtaatcccagcactttgagaggctgaggtggaaggattacttgagcttaggagt

SEQ ID NO: 135562 - DNA, 1032 bp, Homo sapiens
gtcagttctgctcattgggtctcaatttccccatcccttggatgggagcaagagtctctgctgggcctgcctcgcaggggcctggtgagacccaaatgtgagtgtcatcatcaaagcccctcacagaagtggaggacggtgcccaagagtagcggtttggactgctgctgcctcccacccggagcctgccacttgggggagaaattggtataatgcttgcaaaaacaaacaaacaaaaggcaatgtcttctggttgtggttatttcctttcctgcttgcctccccagccccctttgagtctctttttggggtgccgtcctgtctgaacctgccggtgtgtgtctctggggccagggtcagggcgaggcccaggggtggacaggggccgtgtagcatgccccagcctccccaagctcctgctgtatgtcgtccatgtcacgccaattaaacacgcttcctggacttgtcctcgcctccctgtgtgggcctgttgctttgtctgtttacattcttctccgtttcgttttaggtttcttccctttgtgacaccctttctctggctttgggtgttgtcttcccagtttcctgaagagaaagaatgtgtaggccgggtgcagtggctcatgcctataatcccagcactttgggaggccgagttgggcggatcacctgaggtctggagttcgagaccagcctggccaacatggtgaaaccccgtctctactaaaatacaaaaattagctgggtgtggtggcaggcgcctgtaatcccacctacatgggagcctgaggcaggagaatcacttgaacccgggaggcggcgattggagtgagctgagaccacaccatggcactccagcctgggtgacaagagcgagactccatctcaaaaaaaaaaaaaaaaaaaagagagagaaagaatgtgcaaagtgagaaccttgagtatacttttaaaccagaaaaatctgcaggagtgtttctgcgaggcctagagttgagtggtgtgaggccccgcccactgcctcacccacga

SEQ ID NO: 135563 - DNA, 1040 bp, Homo sapiens
tcgaagagaaagaactaagtgtgattccgtgccttttcgacagaaattgtacttcagagaaaccaaattatccgtcacttttgatgcataaaagttcttcttcttggaagaatgcccactcataaatgtgggaggaatgatgcagttaggaaatcatcattttgcaacccctaatgaaatatcatttcaggcaagagtcctcagtggatgctaaaactgttagatgaaaagttgatgggaactagatgtccgcacagagcgagaacattacccacttgagtcataaaggcaaaaacgcagcccaaccatacagagagctggctgtcgccaccctcacccagtcatcaaacttatcatcagtaatagtaggatgctcagacactatttgcctcccggtgtgatacaacagaagacacactcagcaccaactaggaaatattcctgccaaaaagttcagccttcatcaaatcagacctttggacttatccagtttgagggaaacataggggattaaaaaaaaaaaaaaagtgaatgccaccacaaggaaataatcagaagaatccagaacatgggacagggtacaaatccatgcctcttgaacagcttagtgtcataaaaaaagagctgatggcttcagaccaaagaggacttaatagacataacaaccaaaggaaatgcacagcccttgatgaaatcctgatttgacgaaaactgtgatcaaagacagtttgaagacagggaaatctgaacatgggctatgtatagaatgatactaggaaactcattaattttattagacgatattgtgggttatgttgaagactatgttttttcagaaatccatgctgaattatttatagataaggtgtcatgattcagcaaaaagtataaagagatagataaagcaagtcgagcagaaatgttaacaattgttgaatctagttggtaggtgtgttctttttacttttctgcatcttggaaattcttcatagtaattttttattaaagtaaagtcatttaaaaataacaagtatgcgacc

SEQ ID NO: 135564 - DNA, 1045 bp, Homo sapiens
ggcccctggacacagtcagggaaaggcagctaccatgttgccctctcaaagctcacagaggtggacagtggagatggacaaccaaataagcaatcccaatgtagttgttggagggctaaggcattgagaggctgggcagtgcagatgagaaacatggtagaatcaaggaaggcttcctggaggaaaagtatttcaggatatgcctgaaagataaggagctaggcaggcaaagaggagggagaaagttctgggcagaaggaacagcaaacgtagacgaagacaagagaaagagggttgatatattaaaagaactaagtgaagttcagcagatggacagagaggaagctggggagaggagtgaggcctaggggctggtcaggactgaggataagtgtgataagtggcccggccagcctctcacacctgcgtctctgtggggaactgggaagtccagcccagaaacgccatccagcaaagaccagccccgtgcccttccaggcctgccacagcccaggctccacccacccctggcatctcaggctgcccacagctccagaaccccaggcgcccactcaccatgcacagacacctccacctcggccccggcagtgcccgcctcattggtggcctggcaggcgaagaggcctgagtggtccagctccacatggtcaatgtgcagtgtggtcccctgcgaggccacctgcaccccagccagctcctcggctgggcggccattctgcagccacctaaggtgagtagggaggggggcgtgtcaacctgagaccagggaaggccaggccaggcaggacaagcaggaaacctagaagttcctcccacctgctctcaccagccgtggctccaggcctctttcctactcctggaaacaggaagcctctctcctgtccacttccccccacaatccgcaaagcacacgctctctgcctacccccagccctggcctccaccaccccagactcactggatagtgggtactggggagcctgaggcctggcagggaagttccaggggctgtcccacgatggtg

SEQ ID NO: 135565 - DNA, 1016 bp, Homo sapiens
cctacccccaccacctccccttccctgggtccctgagacccatcctagcattagcatctggggcgcagtccacactcgctgtggggtggggagtgggtgttgcagccagtcctggcttccagcacctcccatttgctgacaatccccacatgtccactctgagtggaatagccaaggcctgtccaccgtctcccctacctgagggtgtggccagagccgtggaggagggtgcgctgggagagcgggaggggcaggccgtccttgagccagctcacgtggatgggcggggagccccgcacagggcacaccatggtcaccagctccccaggcctgctcaccagggtccccgagccgtctgctccctgcttgatggtgggaggaactgagggtgggtagaaaaaagaggggtagtgcggaggtcttgggaggaaggtgggctcctcccagggaaatcccagaagtggagacctggacttctgccgccagcaaccacagtggtcccttgtgaaggatgaggcccgctgcatgggggacacagccactccctgactctcttctcacctcccgaatctccgctataccctgggctggcactattgtcctctagtttgaggatgggccatggaggcccagggaagtgagacccgtggcccaggacacagtgtgggctttgctcacatgtcgccttatctcccgtgcccaggcccacgcatcaccctccagatgccctggggctcctcacccagcacattcaccgtgtgcagcctggcgtcctccccggctgggttgtgggccacgcaggtgtaggcacccgcgtccgaggccctcaggccttttagcaccagggagccgccgtccaggtagaacctgccacagggaaggagggcccagggcagaggcgtaagggaacatgggccctaccgcctctggggagggcatgggccaagtcttaccggaggtgggggcccatgtcctggcccagcgggctgccgtccttcagccaggccacgtccggc

SEQ ID NO: 135566 - DNA, 1366 bp, Homo sapiens
ttaaaaaaaaataaggaggctgggttatggattgaatgctaccacaccacccaaaattcatacgttgaagtcttaacccccaggacctcagaatgtgaccctatttgaagatagggtctttatagagtaagtcaagttagaatgaggtcattagggcaggcctaatccaacatgactgtgtccttataaatagggaagtgtagacacacacagggaagatgaaggcagaggtgggggtgatgtttcgacaagccacagaatgccgaggaccaccaccaagaccctgggagagagacccagaccagatcctccccacagtgttcagaagaaaccagggctgctgacagtgtgatcctggatttgcagcctccagaactatgagacaatcagtgtggcttaagcctccagcttgtggtgttttgttttgttttgttttgttttgtttttttaccagtagccctacagaacaaatacaaaggccatgtacatagctctgtggttgggactggggcctgccaacaggagagggtaagaagtgggacgggccgggcgcggtggctcacgcctgtaatcccagcactttgggaggccgagatgggcggatcacgaggtcaggagatagacaccatcctggctaacgcggtgaaaccccatctgtactaaaaatacaaaaaactagccgggcatggtggcgggtgcctgtagtcccagctacttgggaggctgaggcaggagaatggtgtgaacccggggagcagagcttgcagtgaaccgagattgcaccactgcactccagcctgggcaacaagagtgagagactccgtctcaaaaaaaaaaaaaaaaaaaaaaaagaagtgggacgaagccctgaaatacatgggggtctgcttagacccaaggctaactctgagactgcatctctggctggggggtcagagaaccgctgaactttcagagctgcataggttggtaccctgccccggcctgtgggagataatgagagcaacggccagaaagggtcccacatttggttggcagtgggtttcacgtggatttccaggtggccaagtgtcaagtcccaattccaattagctgagaggcgctgcctgggagggctcattggagaaagattctgccaacgcatgtggtgatagattagtgatgtctgccagggacagcgagggagatgcatcgccacacatagggagtgttcccatgtggtgatagattagtgatgtctgccaggtacagggaaggggacacatccccacatatatggagtgttcccttcagaggcacaggccacagaaataatatcttatgacttgcctttatgcaggtctgaatccatttactgtggtttctc

SEQ ID NO: 135567 - DNA, 1040 bp, Homo sapiens
acatgcagcatgggagtggctggattctagggaatgccaacaagagagaaggcagggccaggcaatggctgcaggctgcaggggaacctgggccacctgtgcacacacctgaccccacccgtctgcagatgtcaatgagtgcctgcagctgcccaaggcctgcgcctaccagtgccacaacctccagggcagctaccgctgcctgtgccccccaggccagaccctccttcgcgacggcaaggcctgcacctcactggagcggaatggacaaaatgtgaccaccgtcagccaccgaggccctctattgccctggctgcggccctgggcctcgatccccggtacctcctaccacgcctgggtctctctccgtccgggtcccatggccctgagcagtgtgggccgggcctggtgccctcctggtttcatcaggcagaacggagtctgcacaggtaaggccaggccctgaccatccacgggacactgccgttatgggctcttgggcccctagggtgggtgtgcaggtgtcacccaccgagttcagaaacccagaccttccaggcaagtggggtgagtggtgtggtggatggtggcttctccaatgcagggtgtctcagagccttggctgtgctattgggcagggggcttccaagatggtgtggactattttttaaaccatttgacttcaggacactttgcccagagggagggcatcctaggcaagtggtcctgggaaccccctttgagaaacactcctcttagcactcagagggaaagcagtcagggagggagattttcaggggtgaaggagaatgttccaggtagacatgagaatgtgacaagggactgctgggtagaggggggtgggggtgggggatggcccctggaccctgcagagagggacaaagaggaggtggcctgccccagggctgatgcctcggcattcccgcctggacggaggggtctgcggggtggtgctgcttgctccttctatgccttggtgagcacggggtaggtaaggtggggctcctccctctcagcaa

SEQ ID NO: 135568 - DNA, 1970 bp, Homo sapiens
gggctccacttccccagtagtgtctaataaagaccctgggtgactctgaccttgtgacgttggtcagactccagtggaaacgttcccaggcagaacaaacatgccctgtacatttgggaaatgcgggatgctggggccaggtgtccacggaggctggaaccaggaggcctgggcccacatctgcccctgctgcttgttgatccgatgaccctgggcaggtgacctcgtctccctaaccctggtttcctgttcagcaaattggacacagtgaagacgcccaagcccagggccacaggaggcatgtgggggaggggggtgcagggcgagcccaagggcagcccaggattcagggagagccctcggggaagaagcatggctgcaaagatcaggagacaggaggccttggcgccttcgggaggcttcattgtgacggagggtggggcaggatgggagaccgcaggcacttcccggctgcagagggcctggctgcagagagccctcgtgcccatctgtccccccgggaagggccgctggttgcagaggtcttaggcctctgcctgtctatcgccttccctccctgggcctcagtttctctacctccacactgggggaagttggtctctgagcccctccaaactgggcattggcagagttgaattcagaggcgctcacatttggagacacgatgtctaaaattccagccagtgaaggttccatggggttgcaggtaggagagggactggggctgggcccctgccccacagcatccttctccacctgcaggtgggcggcggcactgcgtgctggggaagcacagattcttgtgccctctgtgaccttgagcctgccactgacctctctgagccctgctggctgcctccccaataggaatgacaactcctacttcatgaggttgtagtgggggctcaggggcacagggagatcccgctgaggctcccagggccctgcctggtgcttggcaaggagcagttctgatgggggatgtgtcagctgccagaggctcagagccaaggcccctcccacatctcctgcctgcgtgcattcctcacatcctggccttgggccaaactgctcagcctcagccgccttccctcgatgctggaggatcaggtccaagagatgcctctccccgaccagcctaggactgcagtcagcattcccaggccccagtgtggtctgtggggctgtgtgcagagtgtgcgaggtcagggttcccgggggtggcaggcactgaaggtgaacatcctgttcccgaccttcagtggcagcttgcccaggagacaaggctgtccaaggccaaggtcggggctgggctgtctgcaggggctggcggggggcactggctgtctcagggtcactcaggttgttcctcgactcccgccagacgctatgtccagcaaaggctccgtggttctggcctacagtggcggcctggacacctcgtgcatcctcgtgtggctgaaggaacaaggctatgacgtcattgcctatctggtgagggagcgacctgggtgtctgtcttcctgcgtgtcctgcaacctgtcctgtctgccccctgccagcctctgtctgggttgtcagcctgtctgctcaccgtcactcattcaagcctggcctcttctctcgaagcctgtcttgaactggaactaggaaaatagcttctcgttgtactgcctcactttctccatctgcaaattggccatccttgagatgccttccagagccaggtgatggaggcgcggggagggcacagaagtgaacttggcagtgctgctggcttagcctgcttgcagagaggcatgggctgggacctgctgccagccctgggaaggcacacagtcttcccatctccagagtatgctgtcagcctgcagtaattcagcaaagattgtggaatcctgagctggaaggaccctgggggatcacctggttctgggatgggaaatagg

SEQ ID NO: 135569 - DNA, 2685 bp, Homo sapiens
gactccggggatgccggggagtaggtgctacctggcacagccacctctttcctggggttgacaggcaaggcgtacttctgcgcctcagtgtccctttatgacagtacccaggaaacccccaacagcctctggagacaatttccgagaactgggggtatgagtggagaaccaggaaggctgggagcgaggggaatccaaggccttggaggtgctggtccagccttcaggcatttaccccctgagtaaccacccagcaccaccatcccatgagtatccacccagcactgccccgggcgccatcacgggggacgggccaggtggaggctttcgggtctttgggctcagggaaggtgacagtgaaatgttggggggacaacggattggcctgggatgtgagggggaagggcatcctgtttgctggaaccgcctgagcccagccctgaaggcagaggcggaggcagcctcccttcccagcaccccgtccagacagcacctggtgcagaaattgagccgcactctcccctcccatgccctgctgccagccccacccctgcccacccagagagctgcaccgaagctggggtggcccttgcggggctcctctctccccctagttttggaagaggggcctggaaatatgattctgagactctagccggggagcgagagttttgtaaatggcaccatctgtatgggtgccccagggcagatgggagaccccaggccccccagtcccagtgggaccgtgtttacatgcatgtttacacacgtgtgcacaaatatcagcatgcggacactcgtgtgtgagacactacatcctccttctccccggaaagctgccaggagctgccctggtgctggggtcttggggttcagagggggaaggattagactggcctccttggctcttgcctgagacgagggcagagtttgaaccaaggaagcgtttgtttggcctcttcgagggtctctggctcctgaacagatgggtgtccgcatggcagcatctggatgggcagacagcagcccagccgtgcctggctggtgaggcacaagccgtctttgtgttggggaaacatgaagctgtgggggaaaatagctgggccatgcaacgtcggaccatgccttaccatctaaaatgaggctgtcttttagttgctccaggaacggggccggctgggggtcagcaggcaaatgtggccgcccccacctcagtgtcctcatccgtaagatgggactaatagaacctgcctcctggggctgctcaaaggattcagtgagttaattatgcatggagctcagctgggaagcctgagtgtgaaccgttaggatgagcgagtttgctgtgtggccctgggcaagtggctgcacctctctgagcttcactttcctcacccataaaatatggctaaaaatccccctggccctgggggcctctctgagtgacagcacatagtaggtgctcactaaaggggctgcatggagggtgagtgaggccagcccaaggcctgtgccgcacacacagctcccagctctgcagagaggctgaaccctggattctgtgccacctgacgagagtctggaaaatagcatgtaattcccaccgctgcctggctgcgcccatgcagttttcacagtaggcaaaaggtccctctgtcatttccacagcgcttaagtctccctctgggctgccgagcccacggggaagcaggagacgtgcgcggccattttctctctggggacagagctgggctggcggatgcctgcgctgaccccggcctcctcctcctcggcatcagtgtggacggtggtcccggctatgtcgggggtaacgttcacagctcagtggggtgttgaggtgtctccatttgcccacagaggatgcaggcgaggcaacctgcccgagggggtggctgtggtgctggggacctgggcttgggtcccgggcctgccctggctgtgtgtccttggactggttcctttcccttcctgggcctcagtttccctctctgtgcagagaagagctgaggagcaaaaggccctcagtggtcacctagttccacctcctccctgacaccagccattgaagagatgcggaaactgaggctcagagaggtgacagggttcccaaatgtatgggtatgggggagtccaagcaccctggtgccccagccctgaagtgagcttgatttggggcagggcagggtcagcaatgtgggggccttgaggaagagactatagtgcgagctctggggctgcaggagcagggcctggccccccaggtcttgccagtggctgggcctccagctccagggggtcagatgtgtcctgcacccacccacgtgacatgtgtgccctctcctatactctgccatgtccccagacgtgcacatctccctcctgccacatgcccacacatacacgacctacactgcatgacctcacatgtgtacacgctctgcccagctctgtctccgccacgggctgtccttgtcctcacgtcctcccccagactccagaacccccatcctgtggctcctgacagccctctgttctgcattgcaggggaacgatcaggtccggtttgagctcagctgctactcactggccccccagataaaggtaggatgtggctcctccccttagcagggagcactagcatctgcagcacctgatggggaggag

SEQ ID NO: 135570 - DNA, 1013 bp, Homo sapiens
aggcacagaatctcctccgtggcaggggtgcccatcgggtggacagcctgctggggaggctcccttcgctggggccagctccaggggacacactttcttccccgccattcattcttcccggagaggctgtccaggtgctggggcacgggatagaaagtccctgccactcttcagccacatccctggcatcccaggtgtgggcaggcatggctctggcaccccaggtgcgggcagggatggctctggcaccccaggtgcgggtggggatggctctgaaacgtggttgctggtgtctgggatgctcagagccctccgagccccagtcagagcccccagctatgcctggctcctccccaggccacctgtgcctggtccccagcatctcttgagcctttcctggggtgggaatcaccaggatctcagggcctcaaccgccctggcccgtggcatgtcacccaggcaggagggcacctgtgggtattgcccagactgctactaccatccccacccctccagcttgaccttggacctggcctgcgtccatgcatgaatgatggacacgttccttccttcactcgctagctcatccttcatccagtgtctactgagcacccactcagctccaggggtgccgagtgcagggcccagggcagggccgagcagtgggagtttgaggcacactgccgctgcaagctgcccaatttttctagtagccatatatataatatataaatatttttatataatatgtattacatataaatacatatgttttatatatatatatatatatatattttttttttttctttttctggagactcgctctgtcacccaggctggagtgcagtggcacaatctcactgcaacctctgcctcccaagttcaagcaattctccctgactcagctcctgaataactgggactataggcatgcgccaccacacctggggtttcagcattttggccaggctggtcttgaactcctgacctcgtgatctgcccgccttggg

SEQ ID NO: 135571 - DNA, 1008 bp, Homo sapiens
aggggaagagtgtttaaggcagaggcagaggcccccccaaccacgtgcagagccccggggcagtccccagaagacaggtaaaggccccagctctttcttacaacctgcagctccacgggtgactatggtgggcccagaatgtttcaggcaggttggcagcagatgctctggcagagagtaaaaggcagaccaggctcatgggcacaatggggtgtgtgtgttgggggatggggacatgccatgtccctccccagctgaccctgtctttcctttcccctccgcagctacgaggctggaatcctggagaaccccaaggtaatcccccaaaccccatctcctcccagctggccacctttggtggtagcagctccatgccgatgctgtctgatgtatttatagcctaatttgaaatttcacgggggccagccgtggggctggggccgagccctgcctgtgttccccgacccccgcactggcccccctctgcccaccgtctcctcgctgcatttgaagacctccccccgcccttcctcttctaattgcctctgggatgaacaggggaaggaaatatctcagggcagcatagagagagagtgtgattgtgagacaataaagaagtaattaggcagatgagacacttgggggagggcccagcctgtgcccaccagctcccaggctgtgctgctggagttttggttgtggggggtggggggaggcatggctgagagccctaggccccatttgtctggatccgtgttgcacacccgccaccaccggccaccctgatccggtcccaagcttcccgggcgggctggactgggccctcagctctgtttgaagtttcgggtttctctcccgggggtagggggcttctttgtgtctacccctgcccactgtgggaggtgggggaggcagggccaaatctatcatgggaagagaaaaatctctttgtccctgagggaatgtgtcttagttcccgggcccagccccacaccccggggaggctgg

SEQ ID NO: 135572 - DNA, 2507 bp, Homo sapiens
ggatgcagctgggcctgggggaatcaagaagaccagctggaggggagggtgcccggggaggtttggtgaaattggggagcgccagagccccgcccaggatcccccagggcccgggcgtctgtcactctcacgcccgcgtgccgccccctggtcggtgttggctgtaatatcacatggcagccaccatgtctggggagcgggccgggggtggcattgtcctggctcagttcctaggacactggctgggagcatcctcactttatggttgaggaaactgaggcccgggcaccggctgctcagggcgagggaacgggccctggggctggtgccctccagctctgtggctcccctactgcccacggcccctccctgtccaaacctgtcactcaggagagctgccacccttgccccctgggggctgatggcccctgtgtgtggctgctgcctgctggtcacaggtttttctagttcatgctctgctgaccccacaacactcaggccagccaccctaattagccagtcagtcagctccaagggaggcagggaggccgagcctgcagggtggcttccaggcagggcatcctctcaggcccgtgggccccaagcatgctgggcaaccactcccggccattctccaagcagcctatggcctctgcaagcagcctatgggggcagagaggaggcccccccagaatagaggacctcaggattgagaaagcagagcaaggccagagggaaatcaccccctcggaccgtgcaggagggcatccggggcctggagcaggttactgagctacggtgggcaggtcctgcgccctcccaggcctcctgtctcatgagggcattgggtggagaagtcagtactaaagagaatctggattaaggatcctgctacctcacccacacttgggtcccagagacaggaaacccgagtctaaatcccaacttttcttcttattgctgtgcaacctcgagcaagttacccaacctctctgagcctccagtactccttgcccaaagtgggaaaacacagcacctccctcctagggcatctaaagcgcttggcctgtctcagggcaagccctcagtcatgcagctgggggtcccatgctacctcttcatgggaggaagggtccaaggtcctctcagggacccctctcaagaaaggctgggctgggctaagctgggtgtgagtcaggggaaacatcgttcctgctgagaggcccggggcacccagagtcccacccaggcacccagagtcccacccaggcacccagagtccagtcactctggaaagaagtttgccccagccatgcagactccccaagggctttgtgctgagggtggggctcaacgtcaggacgcacccttgcatccctggacctggcagccctgtccccctcgggatgagctcaggggaacagagcctggggaacccgtgcccctccccctctccaaaagaagccaggagacctgcggaagggagggcttgaaggcagatggctgagccattttctgcctccgtgagggctgattgaagggcaatgaggcagctaatgcgaagaaagatagaaatttacttgctttaacttcatacggtccacagtgaaagagttcattcagtcgccggcccgccatagctgatggatgaataaaccatttgcggcatcgatcatgcctctacatcatggtttagttcatgggccatttgcttccaatttctccttctcggggcctgtttcatgctttctttcgccctctccccctagcccccaccccgactctctctctctctttttcttcactctcttccctcccccgcacccccccccccccacagatgacattggaagtgagccctcccgctgggagggataaatagatggcattgatacttggcaacaaactatttgtcattagaactgggcttttaggaaggagagtaaaaagaaggcaggcgctcgagccaccgcggaatgcaaagcaaatgtcattttatttctatttagttattttatttaatcggcgctgtcaggtgcctgcccgacagctgcctctgacttccgctgcggtctgcagaaactcgtcctccagtcttcccatcccctctccttccaaatgcacacactgtcagcctccacttcggtctggggctccctcaggaagtgtggcgggagagaaagtgacaagcaacgcattgaaaacagttgacagtcgggcccagcgcaggtggaggtgggagagagctgggcttgggtgggagtggggccctcgtaccggcaccctggttggaggcttgggggagtcccaggcagctggagatggggctgtggagttgtgtggtcaccccaagatccagtccagttcactttacctttttgctgaggatgagccttgggacccgtctgtgcccagggaatgctgcagttggcagggtgggccagccctgatgcctacctgtggctgtgatgctggctggctctggccacaggcctcaccctgtttct

SEQ ID NO: 135573 - DNA, 2285 bp, Homo sapiens
acaaagtggctgcccacactggagctgggatgagagggagagaggctcgtggagaggcctggcccggctctggcgctcggctcttaccccggctaccacagaaaggaggatagggtggggaagcctcaggccggtggggaggcagagctgcagatccccctctcccccttgctggtgtgaccttgacagccagcttcaccatgctgggccttgggtgcactcatcaaaaaacggaccacaggcatgatgctcacaggtgcccggcatggtatgtggaatggggtgtcggaggctaagtgctttaataatctgcctcttctgggcctttcccaagagcttggccaagccagcgactgtcttccttgctccccttcatctgtcccaacctactggggggccaaagaggaccccaaaggcagccgggcccccaggcctgtttgcaggcacagagcctccctttaggatcatctctgagaagatggtgggagtggccccagcagcacctcctggctccctgcacagggctcccaggagcctggagagccgtgagggtgggaggcgggtggcaggctgcggagggtcctgggcaccaggctctggcagccctgcccgaggaccagggcagctccgcaggctgagctggagaagaaacgtgacctattgtcatgatttggggactgtctggaagaagaaaaaaagaccggaggaaccctcccctggctagtgcccattcactctctagttaatttatttgaagttttaatctaattattaactattttaaaggctaagaggctttctccagcagcagcaccaacaatgtcacctcttctcccgggcaggccccatctaaggccccagcgaaggccgataataggaccggggagggagagaaagggagagaggagaggcggggggtggtgagaggggcttaaggttcattattgggcagacttacatttaatagcaatttacaaccaagttataaaacccctggaaatgggggttaagaatggcgaggctgacagcgccttgagtgaagcccctccaagcggcgcctggctaataaagcctcgaaagccgctattgaggcctgattggcacccgatggctcgctccatggtaatgagccgggcagatgggtgggggattagccgccaactttgaacagcttttctttgtcactgtttcagctctcttgttagccccaatacatttattgctcatttcacaccgctcgagaaagtgccccttgctattcaaagtcaaccccgaacccacccactgcccccacccaaccccttccctcctgccaccccggacccagctcctcggattcagggacgctgccgacacctcgcctgctggagcgggcaccgtgtcacccccatcaatcagatggctgcgtgtgggtctggggtacagggtcggggcgcggggtccgcctgacagacgtggcagggggctgtgtgtgtgtgtgtgtgtgtgtgagcgagtatgtgtgtgcttgagcccagccacacctcggccaggcggcccccgggtgactggtgggacagaaggtgctcccggcgtaagacaatggtggagcgtgaaattcaattagttcagggcctggttccaatttcacagcccctaaatgcaaaaggggcaaagagaatgggagggtgggggagagcgtttttattgcattttctctttcattctggggggctttctcgccccttctctccctgcagcaggcctcaacctgcacagggcttttgaaggagtcatttggagtccatatctgtcacatccatttaaggcgtttcgggaggagggagagggtggggtggcgggtgcagactcctccgctgagccgggcccagaggcccactgccctctcttcccaccctaggggtccctgtgaaggtgaccaacgtcaaggatggcaccacccaccagacctccttggagctcttcatgtacctgaacgaagtcgcgtgagtgtctgcagccctgtccggcctcttgggaaccgccgtctcgggcgagcacgagcctggaccgttgcagctaatggttgtggctgaggctcaggggtgcggagcacaggccatgtcccttccccatagccacagagtttcccggaccagggggacccatttggcaggagaggctccgtggtccttagccttggaagataacaaccccaggaggtctcctgcctccaagggatcattaggccggggctctcaggcccttggctggatgggaggccaggatagaaggaaagggagcag

SEQ ID NO: 135574 - DNA, 1017 bp, Homo sapiens
ggaaggaacaatgtgaactcacacctgggcaatccctgctctctctgggcctcagtttccccacctgtccagtgggcacctggactaggtgacccggctcagatgtcctcttgagtcttagatcctgaaatgctgcctaatgtgtggcctaagctgtgcccaccctgggacagcccagctgggtgggtgactctgagccttgcggtagcgcccgaacctaatggaccagttcttcccacaggggcaagcatggcgtgggccgtattgacatcgtggagaaccgcttcattggaatgaagtcccgaggtgagtctgctcagcctccctcagggcctgcctcgggacccagcaaacccagagatccctgagaccctgtcccctttggacgctactacccccatgctccgtgggcgaccttgggcacgtcctttcaccacaccccgtgagaccgcagtttccctcctgccaagtggggatcgtgggccctttgcccctgactttcagggtgttatgagaagagctgtccaagggctgggagaggcccaggagggcctggggagtctccgaggagcagggaggccagggccaggcctggaggtcaggctgtcttgtgtctggggtgggcaggccgggtgtggaggcagaccgtgcaggcccgatttcgtggtcattaaggccgcatggaggccgccggccaggcagggcgaaaatcctgccaggggtgggcgctgtggctgcacaggcactgggagccggccagggcctaaggacctgtcccagcatcaggcacggctcactggcccttttctccagggatggggctgtgccacagttggggctgtgccgcagttgaggctgagcttcagtgtgacatgcctgccacctcggctggcctctagcctgcctagcctcgtatccgcctgtggctgggcccaggagcagggcagttggtccccaagcaggtgcctctgtcttctcttagtagccaaagcccatgattccctttgtcagccaatc

SEQ ID NO: 135575 - DNA, 1067 bp, Homo sapiens
cccagaggcccacccaggatggggcccgccaggcaccaggagcatagaggatggctagagtcccaccctgactggcctcccatcaccatggcaactgcttctcaccttggccctggtacctaagaggggagcccttgggctccagccaacccctatgccccacctcttccaaatcacttcttctactttcccaaaggaccagagcctttagtccaggtgccctcacctccagcccaggccccagctgagctggcggatcccactcaattctgcaaaattgctcattctgcctaacctggcagcctcagggacagatgagaagaatttgggccacagtagctgtttggttcccacctctttctgcttggtccactctccccccagccacccctggccacccctagatccttgcccgtctccccactccccgctgcacctttcttggcagtaattatggtgtgattgaagctgctccacagagaactgctgacacctctgtctttttcctgtaaacacggggagatgaaaatagacacttggagctgctgtgtgtgtcactccaaagatgtccgttgtctcttccacggcaacacagaggctcagctgtcatttcctccttctctctgcgcagtggtttgtatgccgactgtcaaaagccccaaattcatagtcttttagcatcaggtttctgtcactgttttttttttccagaagaaacacacagaaatcatctgtaccccctacccctgtggagaggagagggaagagctttaaacgcacacacacacacacacacacacacacacacgtgcgcgcgcgcgcgtcggcagcaacctaaaaacaagttttttgatccgtcacaattaacactttcgaagaaaaggagcaggaatattaattgcactggtgtgttttgtggctgcagcctttccccttgcccgtgagccctccggaggctgcctgggagggtggcagccaggaagccggtgctgggggctcaggaagaggagggttctgcctggcctctgcccaccagacattctctgctcccggtggcactggcctca

SEQ ID NO: 135576 - DNA, 1035 bp, Homo sapiens
cctgaccttccagggttgggcctccacggccaggtgacttacagggcagcagacagcactggtgagggactcgggggcctacattcagttcccagctccacctagagcaagtcccttctcctcttgagctcagtttccccatctgcacggtgcggtcagcctaggtgattgcccaagccctctgccaccccagtggcctctggagagacctggccgcaggggccccatgggctgaaggtggcatgtgtgtacacatgtgtacatgtatgtgcacagctgtccccctcccctggctccctggtggaagggaagaagggatatttggggctctgggctctaccgtagtcgctttaattacaggctttcaacctcgggccggtgggcacgcatggggagggaggggttgctgctccgaaaccctgtcattttctagcgtctgagggccccttcaaagggggcatctagacattttctccacaagccgcagagtggactgtcgtggccccagcatgaacataatgacagatgcattttgcagcaagctgggagtgaatgggtccggccggcttgtctcctgtcagacgactcattattattattatttttttttttgtcatttgctgacagtttgggtttcatgcgtttctctcttttttctccttttccccctgcctggaaaaatggctaggtatctacgagaccccagcaggcaccatcctttaccatgctcatttagacatcgaggccttcaccatggaccgggaagtgcgcaaaatcaaacaaggcctgggcttgaaatttgctgagctggtgtataccggtgcgtaagactctatggctgccccctctaaccgcctcacaagggatcccaaagtactatcaggctctcgggcctggccctcccctccgtatcagcaccttcctcccctgccgcccactgccatcctcatgtgagaccccaaaaggtgcaggccaaagggggttgagggaaagtgcagggcatgagggagcaaggggatgctagaacctgccttg

SEQ ID NO: 135577 - DNA, 1026 bp, Homo sapiens
cacagaattgctccagttagaaaggatcgcatgtgtttggctgggcctagcagcacgggggaggggtccctctccagctcagccctaagccccacccacagtgatctgcaggtctggggggtgcagggtctcccccattgcagcttatgccaggctcactggcccccaacccaggctgggtccgctgggaaaagaaatctgagcagaagaaccctgtggggcagaggtagaaaattctgagataaagcccaggccagttgctcccacagagatctctgtcctatctctggctccatctcctgcctgtcttccggcctggaaacttaatgggctaattatcccagctccgtcagaaagatggccaagcccaggacaccagggcatggggggctgggagaacatcagtggccccctccacgagggtctcggggtgtgttggaaaaagccctgggccagagttaggagtgcttcatcagacctgggctcttccaaagtcttgctgtgtggccttggacaggctctttccctctctgggcctctctccctgtgtacagtgagggctggcacagagcatcatgttcaaactgcaaatgcaaaacgctttgcgctctgtgcattccctcactgcatccacacaacctctggttagcaatgttttctcactgtgcaaatgaggaaaccgaggcacagggaggttaatcacttgtccaggtgtggctgggatgcggactcacagggtgggacactggagagcaaggactcaacctctactctccgtgcttggccctcccccgcctctgcaagccccaggaccccatcccagaagcctgtcccctttcccacggaggacctctgcaggtgcccccaggggcctgggcctcccacaatagccgcagcccctgggctgacccagccctttatcagggcaggagatcatgcgccatctggccctgcagctgcccaggtgggctcaccttccaggctccatttcaggaaactctagccttgccctgtccctccccccgc

SEQ ID NO: 135578 - DNA, 1126 bp, Homo sapiens
tgaaccaccacccagctgcctgcactggacacccatatcaccaagccccaggcagcatgtgcctctgagtcctgtctgaggtcttctgcctcccccggagattagagcctccattgggccagggatggggtccctttaccactgtgtccccagttgctggcctgtggcacttcctgaatgcctatggcatgaagcagtgggtcacttccctcctcctgacccttagggaaatgacctaggtggtcacctccttacccacaggccctttgcaaggttagagggcagggctatgaaagcatggtcctcaactcagccactggcaagcgcacattgtgccagtctcgcgggaggcagtcatggtctgcatggcggggtaaaccatggggcacccttcctgtgccccaggtctccctgtgtcctcgcggtgcaggaggcctccctagtggtatcctgttttcctccctgtaggtttctggcacagccctgagtgtgaatttgtccgccactgcatcgccaagtcccaggagcgagtggaagggaaagtgcaggtgtccgtcctcaagggccaggtgtacatcctcggccgggagtccccactgtctctctacaatgaggagctggtgaggtaggtgccccacacctcattctgacccccacttgggcacagagcctatcttttgactggatcctcaagacatctgtgcctgagcacatgtcaggcaccatgcagagcacagagtgatggtcacagaggatatagacaccactatgctcccgtggaacttacaggctagctgggagaaaggcatggatcaaaccattaccagaatgtagaattagacaaggtggcagcgggctgtgaggaatgcaggatagtctggctgggtataataactgggattggctaggaggggtggtgcatgcctgtaatttcagctactcaggaggccgaggtgggaagattgcttgagcccaggagttcaagaccagcctaggcaacatagaaagaccttgtctcaaaaaaatatatatacacacacacatacatatatatatatatatacacatacatatacacacacacacacacacacacacacacatatatatataaaataattggggt

SEQ ID NO: 135579 - DNA, 1016 bp, Homo sapiens
cccgggaacaggctgagtggttaagtaactttccaagggtcacacagctaggaggtggtggagctgagtccggagggcctgtcctgctgtgggttctccatcaccagctcccttctcatggggattggagtctagaagaagatgcaagtcagtctcctcttgctaacaacatgccctgggcacagagccatcattttctcccagagccagtctcttgtccctggaggcacctcatgccccgagagatgttgaagcccgcccatctgcccagggtcctctcccttcccctccgtcacctccacctcccctgcctcctgcgccctctgtttgtattttatgactctataaacccttttaaatggcccagaacaaacagggcttacatagtggcctcttcatttctcctattgccagttaaacgctttgtcttcaacaatgacaaacaatgttttccccctaagataaattaattacattatcctgattggagggcaggaggggccagggcgggagagggaatagaaaaaaaggcaacttcacacacatcttaacaaacagctgccccagccaccccagctctgcctgaattaattgaacccagtgtgtgttgttattgttaatttacatttttctttgttttgaatctggtttacaggctgaaggaatatcatcgtctccagagcaaggtcactgccaaatagacccgtgtacaatgaggagctggggcctcctcaatttgcagatcccccaagtacaggcgctaattgttgtgataatttgtaattgtgacttgttctccccggctggcagcgtagtggggctgccaggccccagctttgttccctggtccccctgaagcctgcaaacgttgtcatcgaagggaagggtggggggcagctgcggtggggagctataaaaatgacaattaaaagagacactagtcttttatttctagtgagtgtgtgtgtgtgtgtgtgtgtgtgtgtgtgtgtgtgtgtgtgtgtagttaattatgg

SEQ ID NO: 135580 - DNA, 2090 bp, Homo sapiens
tgaccccgccccgcagacgcgactcctccagctgcgagcgtcccggctttcccttccgccggaagtagggcgactttccttttccggctacgggtccccaagcggagcgggaggccggaccggggagccgagcggcggcgtcggcggcgtcggcggcggcggcgacggcggcgggggcggtaatggcggagctggtgcaggggcagagcgctcctgtggggatgaaggccgagggcttcgtggatgccctgcaccgggtccggcaggtacgggcgcagccggctggcaggagcacgagatcccgaggcggggcctggcgggcggggaagaggggttcgggcctggggggcgggaggcagcctgaaccgacgtctcagccgggccgggccgttccgtggagttcctacagccgggaggagccggggggataaggcgccactgcgaggcccaggcccggcctgtcgggcgggtctcccaggtgcctgaagtcgctgggaaagggtttgcttagagcgtctggccccatcgtgccccagcggccagcctggacccacagtgtagctagcgcggggttctgaacctcgcgaggggaggggtccgggaagcccacggggaggatctgggtgtagacataaagcagctgtctgacgcccagtagcttgttaaaacttggggaacatcgtctttagactttctgttgagtagaaggaactcgagggcatcttatatgtgagggtgctctttggagaggtgagagagggaggtgttacatgtgtgggggtggtccccaagatgtagaaatttctcatggcaagcttgcctctactggggagaatgatatggcctcattccgacattgaaactttactgtctgacaatgtcgtgcatttaatcaaagttaaattaactgggttttagaaggctccaggcttccccagagagtgaatatgggacctgccaaaaatacttactggcttctggcatggtacttagaacagaacgtgttcttcatttgtatctaaaacttacttacaagtcagccctaacacttcagcttcctcggttaagtgtcttatgtcctcctctcttcttatgtaattgtaagcgcactgatactttaaaagttgggctataactaattactgcttgattcctaacagaaagccacaggagtcattgtattagaagaaggtcttcactcgggcgcttgaagatatggtctttacatctctttccagtattccaggggagggaaccctacctgtttccctgataactgacttttcatgttatatattgatgctcctatagacattatattggatcccagaactttccaaacctgtggttccacctaaaattttatctgatgaattgttactttactgcctagctgccaaccagtacagtagtgagtatccatcttacttagacttcagatccacccatggctgtaatggatgaacatgccacccagctccccttccaccactctgcttgctggcgtgttacagtgctctcctctacagtacagggtcctgaaccttgtttctcactggctactaatatgtaatggctttcgctctgtgctgatgtgtgacagtcaccttgttggccttctatgtccgggaagaattatagtcactgccctaaagggctcagatcctcagtttgcagaaggcctgtagttgaacataaagtgaattttgaaccattgagaagacattccgcttctcttgagccagtggttgaactcatattcttggacaacctgctccagagggagaccctctggtaaatgctgacctaatgtggattgttgaagcagtggtgtttactactagcagtgaaaacttcattggaattgttctcagctctgaaatgcaccattgactggagcagtaataagcccaatggagacagggctgtaagtgtgttccttctgaatgttaacagctggaggtccatactatctccaaggatttgatggcctttaaaaactaaagaaaaaccaggttggtgggtaattttaggtttattgtatatagatttgcattgggcaagaacggaatgttagaaatctgtaatac

SEQ ID NO: 135581 - DNA, 1442 bp, Homo sapiens
tatatacacagcatgttacagagatgtgatttttctccccattaaacagaactaaaagacagtatatttatttaaacgcaaagctttttccccttttatgtctcctcataaactccagagacagtctggaaggccctcttaaatttgtcaaagagcagtaaagtgtctcacgctcagtttttctagcagatcgtaatactctcagttgaccctgctgggatttgaacctgcagtttctattaagtttggtgtgtgaagtccaacaccttatcaactaggctttccctctgacatcttgaagcctccgtgtatatcctttggactctgcagcaaagtgcatcagttgttagtttactctgagcatggtattcttagattgaaaagaagtctctgaagatgtcaaataaaatgtaaacattttctccagcagtgtgaagtctagtgagttaatgtttggcacaagcaggtaatttacatccattctatagggtagtagaaatgtgatctgggcaagtcacagtggctcatgcttgtaatctcagcactttgggaggctgaggtaggaggatggcttgagctcaggggtttgataccagcctgggcaacatagcgagaccttgtctctactaaaaattaaaaaaattagctggatgtggtggcccacccctgcagtctcagctgtttgggaggctgaagcaagaggctagcttgagcatggagatcaaggctgcagtgagctgtgattgctccgctgcattccagcctgagtgacagagtgagacactgtctcaaaaaaaaaaaaagaaaaagaaaaagaaagaaatgtgatctcattcagttccatggatgaagatctaaaaactgctggatattaaaaaacatctgtctacttttcccaagtcattggctggttagcagaagtagtgtttcttcaactagttcagataagacaaaatcctgagtagttcatcctgttccacagccgtcctctgcacttctatactgactgtctgcctaggttacaaggggacctctggatgagtagatccaagtctggtttatgttgttccattctcctaaaaatatttttaaatgttcctagaaggtctaccattgataacttagtagcacctgtcatcacccgtgagcaatcccttgttaggagagtgtgatgccacagtgcattataggttgacagcagccttccacaagctggaccagctagctgtctgccagtcgtcgcctaaatagaaattgttctccgagaaactactaatactttttaggactttaaaaagcattagatctgttttgatctagatagacccactcaatgcctctggattgtataactacagcatataatgttgatacagaatgcagtctaaatggtgcttcatagagttcgttcggcatcacggtagcactacacttaaatgagt

SEQ ID NO: 135582 - DNA, 1051 bp, Homo sapiens
atttgggatgtgtgttgtataccctgggctgatttagaactttaatgctttaagattctgacttcttagaacaagcactaggtttccttttaagagaacactgtacatctaccattaaaagaaaaagcctccattcattggccagtgggttcgccctgcgaggctcatttaacacatggttttgactcccggctcagtcaagtgtgctgaacactcaagagatctaagtggtactccactgagactgtcttgtacatgtccagtgattgaatagctcaagtcatcatttcacaagggactaactcctgcctgtacactcattttagctttcataaacacttgaaggaaactagtgtctgcaggaaatccacgggctgctcctgtagctttacattgttgggacccagtagagtacctggcggagtgagtcttccttaaagggttttggtgatgtcactgagtgtgtgtgcgccaccacatgttaatggaagtgctgaacttcatactgggtattggaaagtagatagtaaataaactatatattccactgtatgtctctaaggcttttctcatttgcagatgagaacatttataatgtgataatttatcatataatataattattttggggtagagacagggtctcactatgttgcccaggctggtctcgaactcctggcctcaagcaatcctcccacctcagtctttcaaagtgctgggatgggtgtgaggcaccgtgcccccatgcctggctgtctttattttaaaatctgatagcccatgtgtattaccaaactttggtttcttctgaagtaccagttatttcataaatagaaatttacttagaccacagttctcaaacttgtggcctgtgagctatagaagacttactatgggcctgcaggcatgctttgtttgacccacccagcaccaacacttaaaaactagagtgatttttggctgggcacggtggcttacacccgtaatcccagcactttgggaggccgaggtgggcggatcacttgaactcaggagttcgagaccagcctgg

SEQ ID NO: 135583 - DNA, 1024 bp, Homo sapiens
agaccaacctggccaacatggtgaaaccctgcctccacttaaaatacaaaaatgagtcaggtgtggtggcacgcacctgtaatcccagctactcgagaggctgaaccacgataattgcttgaacctgggagacagaggttgcagtgagtggagattgcatcattgcactccagcctgggcgacaaagtgagactctgtctcaaaagaaaaaaaaagatttctggtttccctagaaaagatctggccacactgctcccacagcctgcacagcgataatcagcaggagctgagtagctgctgcgtttttgacatgaggcattcacactctccgggttgtcttcattcccgccatcttgctattgttttatactgttctttgggatgcctaattgacagttttttacttatctttttgtaaattgtgagtcagtcgcctctggtttttatttgaaatttctaatggaaagctctggattgagagttaggaggtctgagttgcctgtaagccgatgcatgaccttgggctgggttgggctttcctagcatttgatctataggctgtttaaagatcttccgtggaaaagagatcatgggcagttaagtttggggaatgcaggattaaataaaggtgaattggcttctttactgtaggacttctcagaacctttaacatgcttatgtgcattaactcctacagggtttagggtgtgtttcgtaaatgtcctgaagttagatcacttcgtgccctctttccatggaaccaaatcacattctgtgcatcaaacgtcaggaaatgtggagctagataatttcagcagtcccttcaaacccttagacattcagagcatccatctaactggatctggaaaaagctcaccatgttattttggttcttgtgctttcttatgttatgtctgctgtctattcatactcccttctctctccttttctgtgtagtctttattctgataactttatcttagaatcatcccaattgaaaatgttctgcatttggagttttatt

SEQ ID NO: 135584 - DNA, 1149 bp, Homo sapiens
ataatcccagcactttgagaggccaaggggggcagatcacccgaggttgggcgttcgaggccagcctgaccaacatggagaaaccctgtctctactgaaaatacaaaattagctgggcgtggtggcgcatgcctgtaatcccagctacttgggaagtcgagacaggagaatcgcttgaacccgggaggcaaaggttgcggtgagccaagatcatgccattgcactccagcctgggcaacaagagcgaaactccgtctcaaaaaaaaaaaaaaaaaaaggatactaattttctggtagagacacatttttgaaagtactaaagacaagttattattaagaccaaaagaaaactcacttaacagtgaaaagtatttgtgctcttgcggtgctgccttccattaatcaaggtcaggggagaaatgggataatagccctttaaagaggacacttgtctttctccctcagatagagccatggtttgttactgagtgtttaaatctgattctctctgtagattgctgctaaaattgattcaattcctcacttgaataattccacacctctagtggacccctcagtatatggatacggagtacaaaaacggcccttggatgatggaggtaagttgccagaaatatctttgcctttcaggtggtagtgaacctgccagttaagtttgaatttgtcagccattaccttaacgactctctgaagtgtcactctgttgagaagaaaggttgaagggaagtatttaggatgatttttctcagcagttcttcagcatttgagttcctatttgccttgataatacagaaatcttttcgctgggctctgagataaagacttggcccctgagcatcagcttggaagtaatttgacctatttgagaattttgtttgatttagcctaactcccttcttcagtgcgcatgggaattgaagttcccactttctccacagaaaagctacgatttggtgcatggctctagggaagctgtggctacatcttgaccttaaagaaagagaagaatggtgacctttctgcagtctagctgccagctttttcaccattcccatttatgtcaggctttttctagaagcatcccttttctttaattcgtttatttgttgttttgttggctggtttata

SEQ ID NO: 135585 - DNA, 1044 bp, Homo sapiens
gccaggctgctacacaggaggagcacaggaggtgcacgggaggagccaagcgggagggcaggcaatggccaggttgcaagatctgcacctccctggttactggaggaatgaaactggttggactgactgcagggagaggctccagttgaaacatgagagaagtactggatgaaaaaggtgccacaactgagaccagaaggcagattcctgaactggtggggtgccaaggatgcatatcaaagactgctggaacatgtgggtatcaagattgaagacagtgaaggttaaaatggcctgatccaaagctggagggcggtggagtgactggtgactgctcttcccacggacaggcattcaggcaagctttcaaactgagctctaaattctgctctgggttctaagcagactcatgaacagcgttctgacaagtggctcaaaactgccactctctgaaacacaactaacccaaatccctttctatatcaggaacaaatcctttcccttgttccactgcctagcatattaaaaaaaactttacatatatatatatatacacacacacacacacacacacacatatacttatatatatgtgtatatatgtgtgtatatatgtgtatctatatatgtatatatgtattttttgagatggagtctcactctgttgcccaggctggagtgcagtggtgcgatcttggctcactgcaacctccgtctcccaggttcaagtgattctcctgcctcagcctcccaagcagctgggactacaggcgcgtgccatgacatccagctaattttttgtatttttagtagagacggggtttcaccgtgtcagccaggatggtctcaatctcctgacctcgtgatttgcctgccttggcctcccaaagtgctgggattacaggcgtgagccacagtgcccggccttatttatttttcggaaatacggttttgctatgttgcccaggctggcctcgaatgtctgggctcaagctttcccaccacctcagcctcctgggtagctgggattacaggtgtgagcca

SEQ ID NO: 135586 - DNA, 3876 bp, Homo sapiens
gatttgtattttttcattgtctgctgactgtgtttcctgagctgcattttccaaaagagaaacactacagaatcatttttgctgatggctggtgaaggagagacactcatcaatagctgaaagaggagaaactggaacaaaaagtgtagctaaagtggttttgtgggaatgtgattacagagttggttttaataataagaggctgtttggcaccgttgtctttgtgaaatgggcttgaaaggcagttgctcattcttagtgtccgctgcacatggactgctctggtgggtccgtgacgaggcctgtggaggtaggaggctggatcctctccttcagatgcttatggtcttgggggtgggggggccggcgaggggggcaccagggggcgtctcctcccccgtggccaggaggagcatatgtgcgtgttcctcatgactacagctgctgtggagcagtccttaacaatgcatccaaggagggtaaatcttctcatttgtttttaaaagagaaagaaggatctctttccatctttacattgagtttggatccagagcaggagggaggtaggaagttagagggatttaggctagcaggattttctcccaggcctcacagcatgtggacacacagatcaatttcttatcctgtgttcagctggacactgggttacagactgtgttgatcaagatgtcccctcctgtttcatatcatataacgcattcatttcagccactgagcctaaattactgtttgctttctttctgcctttcttttccaccccacccgaaatggtaagaatggtaaggatgaagttagtttatccgtgctaatgctttgattttttttttctctttctctttgccacagtaggtaaccagttaggggccttggtacatcaaaggtaagcagtgggttacgttttattatttattgatcatttctaattgtttattgatccaccatctgtactagagtgctagaaagtcagaggttgagaatgtgaaaaagcatgggttaggcttctttaagactcgagttttttgctagccatttctaagatagtgtcagctcagggataaactaatacaaggcattaaaaatcagccattattgcagtaacttaaaatacttgtagaagattggagttgctctttctaccaatgtacatttaatttaaaaggagagaatgagattttcccacctggttttgtggtgttgccagtattttattaatccttaaccccttcacctgagaagagacacctcgaagtgtgagggtcagacactcacaagagaatgctttgggtgcccagggagtatgggtgggtggctagtgcgtggtgaggaggccagaagccagggttccatccttccgaagtggtagggacttgccagagagcctcagcccagctaattctctgtttctgtgtcccctcatagccttctgtcaaacgtagaagatttagagagatacagaaagagccctgagttttacaaaggccaatctgtaagatggggtatgtgtggtcatagtgtatcgcccttcaaacagggaaaaatatacaagaaactgccacagtttctcttctggaaggatgaattttgtgctatgtatctgttgctgtaacatatccttaaccttctatcagcaaaacaattctgtcatcttgtattctgcctaggtgtttgggagtttctagaaatcaccggtcatcagttaaacaaaagttttatcctggggtttttttggtggttgttgttattgttgtttctttgtttgctttgttttgtttgttgatgaactgaaaaatttaaatgaggtgatcgttagtatcaaatgctgactttcctataaagccataactagtcaggattttcttttccaaggtgtttatattttgtaccttggacaagtttcagccttgcatttagattagaacgttttcttcctggaaacccagagcagttcgtcttggaatgtttcttcctcacagttggctaaagtgttccttagggccaagggctgcctgggcttcgtgacattttgtattgcagtagtgttgaagcccctctagtcaattcccaggtaatattttctgagagtagacagaatagacagctcatgctacacatggtgtgagcagcagcctcctggccacacgcacaagagccctgtcatccctcataacaaggtcaggaagcacatcctgacagggacctggcttctgctgcaggacgtgttgggacagcagggcttggcattcacatccatggtgttactgattaggaagctgggaatgaattgcctgatttggggagaacacatacatcgcaagaggtggagagaatcccgtcttgttcataagcttgagggtgtaaactccctcaaggagggagggagaagactgtttgttcccatcaaaatgatacagtggcaagtgctatttatgctattgcatttcttttaagtgatgcactttccctaaaaatatgcacttattcaatcctttctgtgatgggtaaaaacccagctgtgtgagagatgtttaaaaatgcttgccttttttttttttttaaactacttgcatttagcatcctcccaaggtaaatgttgagatttaattgctttctggggtgttgggcaaattggacattgtccacaatacactttatggcagatttgaaggtttgttgaaaaaagccagtgcagtagtagtttaaaaaaaaaaaaggcacataatggatgggatagcatttaacagaagtaccttgcagagtaagtgaggtaattattctgttctggtcaacagtgattacgcctccatcggatactggttccatttggggcgtctcaccgttaaaaacatccataaattagaagggaggccagaaaacaataaaaagattgggaaacaagggatgttgaagaaaagatggatatctcttcatctagagaggactccacaatagaagtctaaacatctcccaaaaccctggaggacctttcagtgacctgggattgatggcccattggttagagagcacctaaccaggcagaatgaggcaacactgagaggtgctgtatgaagaaaaggcagctgttagaggaggtgatggtttcatgaaaaccctgaggtttcttcctctgacaaaaggagatgaaaggcttagatctttggaaggagtgattgaccagacggttcattacgtgacactctttgtaggtggtggtggatttgttggccaaattggcctgatgtattttaagcttttatcatgcaacattgccagtatgggcagtttggggacctaaaatggctgcaaaagtctgtattctgtatttttttccaaaatgttctttgtttttaggacggtaataacggaagaattcaaagtgcctgacaaaatggttggatttagtaagtatccatgttgtctactttttccctgattcctgtctcttctttttctctctttttttctgagctgctttgccaggatgttctttttgttttaatctctcttgtgagtatcacctgtagtagaatgctttgcacatgccattccccacagctctgaaatgctgcaggtctcttcaggctgagggagaaaccagagcactggactgtggatgtccctcccttccccacctctccccacctcagctcagatcccctctgcctgtaggctgtttcacaagggctttctgctgccatcatgcccaaagagtggagatgggctcacgggggccaactcgatgtgtagtattgtgagccaagtgtcacagtttgtggaattaattcagtcattcctgcgtggtgaaatatggaataggggcgtgtattctgaccctgttcaatttgtttcagttatcgg

SEQ ID NO: 135587 - DNA, 1068 bp, Homo sapiens
cttaaagtctcttgttctgccatcacattgcaagcagtgaaccataataaatatcgctggcaggtgtgcattacagggcaactggatggtttgctggagtcaaagcatttttcttccaacacaggttaatctagtacacaggcaaaatattaaaaagctgctgtaactgggaagatacacgaagctgattctgtacacaaaggctcaagactacaaaaggcaacatctatttcctgcctttctcttctttcttcctactcttctaaccattcctgcttcctgtctacccaaggagcagaggcagtgggattataactttaggaggaaacaaatttcattgtcttcagtgagcagcacagctagcctgtttagtagctgaattcttctccattagagaaaccaaaaagcagattgtgtgtggcaatttagagaatcaatacgagaaataacaaccaggagaaattctggtgcagaaaaggaaattggcacagcagatgactttggtggtctgggctgtgctgtcacaacattgcagttgccctctcccgctgcccaagaaaccaacacaaatagcaggacacgtgacacgcagggtcccaacttggctgccatggaaagcccaaagcaggtgtctgtgagtgcacagctgcatccagcaccgcctccccctttcccacctcttggaaccaaactgggattcatagccttagcttaaaagtcatagagcagtgttgttggttatgaagaagaagcgtggagtatgggagttcagacagtgagtactaatccttgcttgctttcttcccatctttctcattgctggctctctctcctgcctgcatttatttaacaaatgtatatattgagtctactctgtgagaagggtcatgttggatgggggaacagagagatgtaaagggatgaaagatggtctctgcctccagagcagctggcatcctaataggagacgacacctttgtggagacacaagcatgagcagagggcaggcttgaaaggggcggcaaggctctgtgtcacagcgttggtactgtggtgtgtgttgctttt

SEQ ID NO: 135588 - DNA, 1750 bp, Homo sapiens
ggaggctgaggcagggagaactgcttgaacctcaggggtggaggttgcagtgagccaagatcgtgccactgcaggctgggcaacagagcgagactccatctccaaaaaaaaaaaaaaaaaaaaaagtgtcctggccagacacagtggctcacgcctgtaatcccagccctttgggaggccgaggtgggcggatcacctgaggtctggagttcaagaccagcctggccagcaaggtgaaatctcatctgtactaaaaatacaaaaattcgccgagcatagttgcctgtgcctgttttctcagctacttagaggctgaggtgggagaatcattggaacccgggaggcagaggctgcagtgagctgagattgtgccactgcactccagcctgggcaacagagcgagactcagtctcaaaaaaaaaaaaaaagtgccctttaaaaagacaggtttgtgaaaagttctgatgtggtttggtttctctgtgcctaggtatctgtgcctaggtttgctgtggggattgtaataggaagaaacggggaaatgatcaaaaagatccagaatgatgctggtgtgaggattcagtttaaaccaggtgggtatgatgatttaaaaatccttagtgttaaaaaaaaaaaaaaatccttagtgttaaaaggatgataaaacaccttacaaaacaagggcttggctattggttcatgtgtattcacctttctcatccttgcaacatcctgctaccagatgaccaatctcagtttcttctcccagccttcttttccctccccggatacatgtcggtcacctttgatttccaggccttttttcttttttcttcctggagtatatgcatagtatgtcataaatgcatagtatgtcagcttctgattttgccaagtaaaattttaaaatatatatgtataattttgattttattaaattggagataatttaaaaccacacacaaagacaaaacatcttagaataaaggacaaatttttaaattttataaatttgccttaatgagcaaaattttcgacgtggtctgaaaagaggaaaacatggcaggctcttctctggaagctgttgccatagctctgctctgactcccttggcttttttaaagtcaagctttgttttagttctttaatgatacattttttaaatggctataattgcataagaattgagcattgacctgaaacatgcaaaacaatataatgacacacattttcctatcacccacatcactccaaaagagtccctgcagctggcagtattcctgttgccccttttggcaccgcgggtgagaatattgattgggaatcagattaatccttgtttccttctaacgttgggcttttttctaatcctgtctctcacctggctcctcagatgatgggattagtccagaaagagctgcccaggtcatgggccctccggatcggtgtcagcatgcagcgcatatcatcagcgagctgattcttacagcccaggtgggtccagctctgcagagtgtgagtgtttgggctgcagaagtggaaagtgctacccggggctctcggtgcagcaccatagagctgtcaccctgaggcgtctcaagtcacattatgggaaaccagcagtttctctacatcagcctctttcctgccttcttggtatttttttctgctcattaattattctgcctttatttacctcaccatctagattgcctttacacagtaagtttctggctatttaaaccatgtg

SEQ ID NO: 135589 - DNA, 1077 bp, Homo sapiens
gataacatacacggtgccagccgataagtgtggcctcgtcataggcaaaggtaagaggcagctggggtttcacatcccccctcagctgtttggcttgagggaaggcaggtcacgggacctccagaacctttggtgaggtccctttgctgctgcaggctggggctgcccggtctggaggcagtagccaccttctgccgaaaccctgcttggcatggttctctgaggctgctgacgggcctgttgtgaggagcaaagtgtattatttctggtgagtatgaagagacagcagtaaaactccctgcctgttgagggcagcttagcttggtgaaaagataccttgcgcaagatggggggcatttgtcaatcgactgattggtaattaactcacctccaaggaacttagagggacggttgagacagtatcctcagtgaaaattccttctcgacagtgtgtcacttgtttcccttaccaggtttgagtatttggtcttgatccgcgtaacatgtgaaaatggtttttatcctttctgcatatttaccgtgagtcacggactctctgtggagggaaataaacattgatgtgttagttttttctgggcattttggagaacattaggaagaaaccctcattcatggctactgtagctccttcctgtccttcactgagaaccaggagagagcagccacatttctcagccattggcagcagttcatcttggctagccctgggacccagaaaggctactgagaccagggccgaggctgtggggccttcccagtgtagcagcagggctcggcttccgtggggctctgagccaggcctcgctgccagcgggggactcccgttgtcactgggtttcgtatttgccttcattaggtatttgacagcatgtggagaaaacagtcgtctctccagagtttctcaaatttctttgatcaccaaataccccttagctgcttgaggggcgctcgtattggataggcaggacttggggatgcttcaccagcagagacctccagagctgggcaggtgggagccccccgacactcacctcccaggagctgccctcgtccctg

SEQ ID NO: 135590 - DNA, 1029 bp, Homo sapiens
ctggccaagtctctattctttattgctccccaaaaaacattgcctaggagcctgcttttcatggtgcagagaagataaaatccatggcctccgagtaaagggcagaggtaaaggtcccctaggaggggcttgtaccggcccagaggaaatcagagctgtgggtgctggcccggtgtccccagacaggcgggtctggccagggtggaaaatgcagggatgcttctctgaaactccagcgggaccttaaggaaatcacaagcacaacatttggttttgttagttgttttttaaatttaaaaccaccctaaacttaaccaacgtcttctgcatgcgaccttatctgcatgccatgtctcccggcgtcttttctcccccgtaagggcagcccctgctgccttcaggaaggaccacctgcctttttcattcctggacctctgtagagtccttgcaagacgcccttgtgtctgcctttagcgtcccctccctactggcccgataggctgttgaggcagggcttttctggcagtgggtagagagaagcttggagtgtttggaggattgtggacggtgtcttggtgaggtgccacatggcatttagggcctgtttttttgactgtgggcatggaggaggggccgacactggccccggtctttgcttttgatcacccaggctcgctgctgccctataccagctttggagcagattacctttttctccacttttccaaactgtgctccaagttatccttgtattctggctcctcctagcaacactccatcccccacagagttgagcagagcagatccgcaagttctgtgaatttcagaagaagaatccaactattgttacgctgctggagcttttattacgcaaatttcattaagagactgagactctccgcaggtttttgaaagagaccaactgaatttttgttagcccggctccacccaggtctttgtgacctccaccccatccttgcactgcctgtgtagaccgtcaccccatggaggaggcagggacttgagaag

SEQ ID NO: 135591 - DNA, 1847 bp, Homo sapiens
tggataacatttcagttacctcctggccctggactcagctggttgggcctctcactgccaaattggccgtctgggtctggtcctggggaaacaggtgtcagggctggtggtgatggaggagaagcgtggctcccactgtccgctcttccctgccccaagtccctagtggagagagaagcccaagacctcttcagcagaggttttgtctggcccagctcccgtgacgcgagacctgggggaggtcactggcacacagacctgagaacctgccatcacagactaattcctcttcccttccgcccacaggagcagtaggacagcgtcctcgtggccaactctcccctcaaaatcattgtcaaagaaaacctatttgtaacagaggtttttacatttgcaaaccttttgatgaagaactgttgttttgttctgtgaaacactatatttagattaacggaatttttctaaaaatcaggaaaattagttactaaaaattgctgatcatttttgtttcattatttttgttatttcaaatgtataagctctgggattctttttggagcaatacctacaaagtcaggcaccagaatgtgcctcagagctgtgacatttcaacatgatggttttggtttggtttggttttgtgtcctttttatttgcagttttttctgttgcaacagaaagtggcttggaagtcttaggtggtatgtaacaaattctttttaaaaattttaaagcagtatttaagtattcttaaatgtgtaaattcatttaatgttttacttctaatttcttgtatcttggctgtctggttttattgcatttttaaaaaaactgaactattatgtattgtaatgaatgatgtgaattctgaactgagacagataattgtattgctgtccaacaggggttgggaggggcattttgtagggtttgtataatttctagagttcgaaaggggtaatataaaaatgtgctcgtgtgtttagcctacgtttttctcatgcctccattaccagttgcaattgtgtatctaagacctccaagcttgtttttaaaacaaaacaaaaaacctttctctattatctcagaaatataaatactgttatttttaatattaagaaattcaatataacttttaacacacactgtggaacattaaaccgtataaaaatgtagttataactatttttaattccaaggtgttgtttgcttttttcttttaaatattttcttaatattttgtcagattaactagatgaataaataaatctagtattaaccgcattatgaattaaataattttgatttaatgaaagggataatatgatttccagtgtttactgtagtgtatcttgtacagataacatgtatttttaaaggaaaaaaaacggaattgaagctattttttcttgcatttctaattgacctgagggacattccgtttgaaatgtactgaagttacagtttctggttttttctccttatttttcttataatgcttgaaatgtctaactattaaaaaagacaattggaaaatgttatgcatggggtttttaagaaaacaaagtgttctttttatttgactgacaattcattttacactctatataataaaatctccacaaggcatcttgtgggcaaagtctttctggcctgtttgctttccattcgccggttcatccctctgcccctgcccgcggccgcccgagagggaaagaggattcctgcgggcctcgcccgtcatcttgcaccgcgtccacccgccttcgttggtgcacagtctagatgtctagctagttcgttaagctaattttatgttaatggctctgtatgatttgacagcttga

SEQ ID NO: 135592 - DNA, 3165 bp, Homo sapiens
aggaaatcttaagattcattctttcattaatgctttcaacatatattttgtgcagttgggttattatggcagagtgaaaaatctctgtcctggtggagttctaacagggagagatagataataagcgcaatgaataagttattcagaatgttaggcaataatgcaatagggaaaaaagtggagcagggtcaatggtatgtggggggaatggtggcaacagggtgggctgtgttttcaatggcacagtcaaggtaggcctgctgcagaaagtgacacctgagcagacctgagtgagaggagtgatgtccaagtagctgtctggagaaggagcactgaaggcagagggagcagccagcacagaagccacgctttgcagggggagcctgttagctttgaggaacacgttgttcttgaagggagagaagtcatttcgagttaccctcgtatcctttctttgtatcttcgccttgcatcaggggccatggaacgtatatgggagaagagaagctcattgcatctgttgctggctctgtggagagagtaaacaagttgatctgtgtgaaagctttgaaaaccaggtgagaacaaaaggtgtgtattccctttcttgcagcatcaggttgtacaaccaggcttttcctgccccctccttatcccccaccccacccctgcctgccctgtcatgctgtaagtctgaggttttgaccatgactgtaggtggggtggtgcagatcagtgcaggcttcagaggtttccccatgttatgtcaccactccaagccttggttacctcctctgcaaagtgagtataatagcatggcctacttcataggattttctctttttttttttttttttttttccgagatggagtcttactctgttgccgaggctggagtgcagtggcgtgatctcggctcactacaaccttcgcctcccgggttcaaacaattctccttcttcagcctcccgagtagctgggattacaggcgccctccaccacgcctggctaatttttttcgatttttagtagagacagggtttcaccatgttggccaggctggtctcgaactgctgacctctgatgatttccccccacttggcctcccaaagtgctgggattacaggcgtgagccactgtgcctggcctaggattttctttagaattcagtgagatggtgcctgtaaagtatttagcacagagcctgatacctagaagcattcaatgaaggttagccccagaaagcaagccagtggggttggaacagagtgagtgagggggagagaaggggcagatgtaagcagagagctgaggtgggcgggcgtgggcctgccttgtagccagagtaagcattttggcttctactttgtgtaatctgggaagcactggaaggggtggagcagaggagggacttgatctggacttaagctcactctggctgctgatgggagattgaagggggatagggcaagcttagggaggtggattagggaccatactcatgatctgaagtgatggtggcttcaactaaggtgggagcagtggaaggtggaggagtgattggaatctacacagattttattttccgagtgtttttttaaaatcatgaaaagctgttgggttttgtattctttgggctttactgtgcataggaccccgtcaactgtgaatagaaataagtttacttcttcctttccaatttggatgccttttatttcctgcatatgttttaagggtagagccaacaggttttgctactggacttgtcctggagcgtgagagagagagaggaatcaaggaactctccgaggtttttggcctgagcaactgaggggatggagtcaccgttgactgagatggggacaactcatcccctatctcggtttgctatggaggactggagggggctgcgggaaagcttagttttgtgcttgatacatttgaaaatgcctgttagtcatctagatggcagagttgggtagctagcagttgagtaggatttggaattcaggagagtggcacagtcacagcacagagtggtgttttaaaggtattagattgagtggccgaaaagtgaagaggtctaaggacttagcctcagcactgagtacgtctcattagaatcgcgggtaaggaactagcaaaggggcttgagaggagcaggcagtgagtaagtggaggagacgtgagcagacttgtgtggttggagtcctggctcagatttcctttctcttcctttggctggtgcagaactcatccatgtgccacaggaaaatagtccgtgtttttcattgtcgtgtaatcgaacaaaatagggtttttgggctaaatgaactacttggaatggtgatatgtctaaggatagttaatggagactttatacgtggaggaatgtttgaagttagcagtttctgaaagtaagtccagacaatatagttacatgaatttgctgaatgtggcgcctgttccaggctttcaccctgttgaaccgacatctcaaatggtgtgtggtcttgtcagaaagtctgctcacagatggatgaaccccttgtgttttgtctttcagatacattggtgaagtaggagacatcgtagtgggacgaatcacagaggtaacgtcgatatcagattggtgtttacaaagtcgaggcaggctggcgatttcattcatgggacagtcattccacttgtagttacatgaaaaaggcattcattgcatttggccgttgtgtggcttctgatgtaaatatgtggcttgttcgatttcagattactggttcatgtttttttttttttgagatggagtctcgctctgtcgcccaggctggagtgcagtggcatgatcttggctcactgcaacctccacctcccaggttcaagcgattctcctgcctcagcctcccaagtagctgggattacaggcacccgccaccacgcccagctaatttttgtatttttagtagagatggggtttcattatattggtcaggctggtctcaaactcctgacctcaagtgatccaccagcttcggcctcccaaagtgctgggattacaggcgtgagccaccacatctggccttactggttatttatgatatgacacatgaacatggagcatgtgtccaggtgtggaacttggcttataggttcaacagaagaggtgga

SEQ ID NO: 135593 - DNA, 1956 bp, Homo sapiens
cagtgaatggtttggtgtttgttggtggaggtggcaaagttgcagggtaatagccgaagagccagtgaagaagccattctttttctgtttttttgtttgtttgttttgttttgttttgttttgagacggagtcttgctctgtcgcccaggctggagtgcagtggtgccatctcggctcactgcaagctccacctcctgggttcaagtgattctcctgcctcagcctcctgagtagctgggattacaggtgtgccccaccatgctctgctaatttatctatttttagtagagatggggtttcaccatgttggtcaggctggtcttgaattcctgaccttgtgatccacccgcctcggcctcccaaagtgctgggattacagacatgagacactgcaccctgccccattccttttaatctcccttggaattagctgtttggttgatttggagttccagggtgatactgtctgagtcataaatgatttatttgtgaatttctgtggctggtcacgtattttggtcctgtttgtatttcccttcccctctctgtgtctccttatagcctgtctctcttgctgatcgagaggtgatatcccggcttcggaactgcatcatctcgctggtaactcagaggatgatgctgtatgataccagcatcctgtactgctatgaagcatcccttccacatcaggtactctccccagggcctctcccttcttcactgatctgtgagctgctctgttgtttgttcagagacaatatgcacatctccccaatactttcccaacatccgtcagtatgaactggcctgaaacagccttaatgagtgtctggtagatctttccctaagaaacttgcaatattctcaatgcctagtgtcagtctaaggattttggggcaggaggtgtcaggtgggactagtttatgagagcaacctctggactacatcttacctctcccaaatttcagccagcttttggatgaatgtcagaataatatctttgttcttgtcgactatatcccagagcatcttgctgatttattaggctgcttctagcagatcatatcttgtaacgcttagtctctgagacatgaaaggaatacagaaagtttatgttaacggcttgatttatgtttggattggcttggtggtctgtttatggttggtttcttttctgaacaaatgccttttccctttttcagatcaaagacatcttaaagccagaaataatggaggagattgtgatggaaacacgccagaggcttttggaacaggagggataaggaggtgctccagaagcacgggactgtggaccttgcaggagtgaagactgtgatgtgtggtccccatatgtggctcagcaaagactcgagagatcatccctttgtctgcattgacggccctgtgacggcctccagcccacaggcctgctttctcctgtcctaacaccaagcctgggtggcagatgaacagtgcttccttgggttgccagctgagtcccggtattagggaatagtttcagctctttcaaagtgcacagtgttacagtcgaatgggctcccatcctggaataatatggagaatcctttgtcttccactcactgtcattcacaaggcacagtgccccatgaaattgccccaatagaaaacatggcatccctgacctccaaatggtctgttttggcctccattcctatatcctttaaatgactgagaatgcagctggtaaagttggaagaataaagttaaccaagcaggccaggcacggtggctcacgcctataatcccagcacttagggaggccaaggcgggcagatcacctgaggtcaatagttcgagaccagcctggccaacaaggtgaaaccccatctctactaaaaatacaaaaaattagccaggtgtggtggtgtgcacctgtagtcccagctatttgggaggctgaggtgggagaatca

SEQ ID NO: 135594 - DNA, 1026 bp, Homo sapiens
agggcaaactcgctgaaatctgggtgacccgtgtccttttccggagagcaaagcagagaagcgagagcggccactagttcggcaggaaatttgttggaagatgaagaagctaagatagggggttggtgacttccacaggaaaagttctggaggagtagccaaagaccatcagcgtttcctttatgtgtgagaattgaaatgactagcattattgacccttttcagcatcccctgtgaatatttctgtttaggtttttcttcttgaaaagaaattgttattcagcccgtttaaaacaaatcaagaaacttttgggtaacattgcaattacatgaaattgataaccgcgaaaataattggaactcctgcttgcaagtgtcaacctaaaaaaagtgcttccttttgttatggaagatgtctttctgtgattgacttcaattgctgacttgtggagatgcagcgaatgtgaaatcccacgtatatgccatttccctctacgctcgctgaccgttctggaagatcttgaaccctcttctggaaaggggtacctattattactttatggggcagcagcctggaaaagtacttggggaccaaagaaggccaagcttgcctgccctgcattttatcaaaggagcagggaagaaggaatcatcgaggcatgggggtccacactgcaatgtttttgtggaacatggtgagtgcttttcaaaatttctgctcatggttttcctcatgcattcatcttaggccttcaaggaactttgaacaacagtacttgcgacagttccttccaattccacttaataaatttgttactgtagttatctcttagtggaactttctttgtataagaaaaagttacttcgtgacttcggctttattcaaaatctatttgagttgcttatttcttgcctgattcctctgctaattcactgttgaccttggacaagccactttactgttccagggctttagtttcctgaggggctggacttcagtggtttcttagggtccctggttctatg

SEQ ID NO: 135595 - DNA, 1033 bp, Homo sapiens
caagttcctccacccttttctttttggccagagttgatcattttcagaattcatcattttgtcaagatgatttttttgttgttaaatatgaataatttgctttcctctggacttctaaggcttcctgaaattacatgcaaacatttgtgcagtctcatgtttggttattggtttttgggtttgctatttttgggcgaggaggtccatatccttcatcagcttctcaaggggttttttcagaggtacaaggggaggctttggtttggttatgacagtgctacagccagcaacccgggggccacctgggtgctgctcccccacttcaaaacgtgtagctagcaggatggaaatcctgtctacatggaaatccttgtggtgttggataggccatgattcatttccctaagcctcaaatgcttctattgtttgtagtttttctcccagaatcttcatgatccatttttgtacattcttatggccttacgataaattcctagaagtggaatttctacatcaaaagaatagaaacttttaaaggtttttgatacatattgccagttgcccttctggaaggtctactgggtacgtcagtgtacctgagtgttaacagtgacggatcagtattcatttctcttataaggaaggaaatgaaagtcatttggtaacgtagaggcacaattagacctgacagcctttgtgtttctcttctgttctttaggccccccagttccctttgctgctttcttctttatgccacagatttaatgcttgaacacatattgaaattttggaaagttactgtgaatctaatggggcataataggcaggttttcttaatcctggcaatgaccaaactaatcacttgtctgtggtggcttggtggaaaaacggtttgtcagcagaatttggtaaagaagcagtcacaaggacagggtgttggtctcatatttgagtgcttccctgaggaaagaaaagataaagggaagaattgggtgaattcatcagactgtatttggcagatggagatgaagtg

SEQ ID NO: 135596 - DNA, 1008 bp, Homo sapiens
tggccaggctggtctcaaactcctgacctcaggtgatctacccaccttggcctcccaaggtgctgggattacaggtgtgagccaccgtccccggcccctagtcttttattgtattgtattgtattattttttagtcaggtttattgaggtataatttacatatcataatattccccttctttattatacagttctatggactttgacaaatacatacacttgtgaaattgccaccccttttgagatacagaacagttctatcaccccctagaattcccttgtgcggcccttttgtagtcatcctttctctcttctcccagctgctggcaaccctgatctgtttttttgtccctgtagttttgccttttccagaatgtcatatcaatggaatagtacagtctgaagcctttgaatctggcttctttcattcaatataatgggtgaggagtcaaccacgttgttgcatgttatccacatttcctccttttgtgtctctgagtagtattctcttgcatagatgtaccacagtttgtttatccattcaccagctgaaggacagtgctccagggtcctagagcacagaactctggctttgttgtctttatttctaccagttgtctctctctctgtctctctctctctcttttttttttaaaccctagaagattattaagatttataagactgggtatggtggctcatgccagtaatcccaatgctttgagaggccaaggcgggaggatcacttgaagccgggagttcaagaccagcttgggcaatgtagcaagaccccatctctacaaaaaattgaaaaattagccgggtgtggtggtgcacacctgtagtcccagctactcaagaggctgaggcaggaggatcacctgagcccaggagtttgaggtgatagtgagctatgactgcaccactgcactccagcctgggccacagcataagcacttgtctccaaaaatgtttaaaagattgacaatacagtcttcttcagagtct

SEQ ID NO: 135597 - DNA, 1870 bp, Homo sapiens
atttagccttttgaaacaggatacacagtagggtgattggtttgggagggcactggtacagtaattctccacctctcacttgcccgtgtgggtgccccatccccaccctcaggcacacacgcactcttagctgcttttggactcctcccgcaatgtcacaatagttttctttgaacattcttgaccctcagtcatgttgacatgcgtttggattttcagtggagaagaattgccagagaagaatcttcctctgattttaaccattgaccatatttatatatgcagtttcagcttgacttttaaattgataatcttttaatagaattccagataacatcttactgtaacaaacaccaaggggattatccaaattcctatttgaaaatatgtcttttatattaccagatttgccagctgcattattatctattagtgtgtactaaaagtatattattttggcttattttgagattagataattcccagtggaattctccccttaaccatctaaatctgtattttttttttccccatttagtttcctaaacagtgaggcttctgggcaggaaatgagagaagaggaggaggtaatatagaataatgcagtggctttcaagcattgtgacccatatgaggaatacatattcagttatgacttagcattcacatatgcacacatacatgtacgtatatacatcacattcacacatatgcatatatgtacatatacagctgaagaaggtctggattagtacttttccttattgtggagcacagtgagtgatattttctttttctttttcttttttttttgagacagtcttactctgttgcccaggctggagtgcagtggtgtgatctcggcttactgcaacctccaccttccaggttcaagcagttctcctgtctcagcctcccaagtagctgggactacaggcatgcgccaccatgcctggccaatttttttgtatttttagtagagacggggttttgctatgttggtcaggctggtctcaaactcctgacctcaagtgatccgcctgccttggcctcccaaagtgctgggattacaggcgtgagccactgtacctggccgatattttctattttatttcattttgaaaaagataggctgtgactcattagtagtggatctcatgactaagaatggatcctgacccaagtttgaagagactggtaggggtaaatttagagcctggggctccaaagtttgtctacccagttttaaatcctggctttccccttaacttgggtgggatcacaccattaaccgtgttacccctctgaagctttggctcccacacctgtgagatgtgaatgttgataacacacacccacctcataggattaatgagaacatgccaagatataatgcgctgaaggtcttagcatgcctgcgcagagccccagcatctgttagctgctgctgctgccgctgtggtggtgactgtccttgctaagatgctgcagctggattggcttcgtgggaagttgtggaattctgttccctgaggatgttgggaaggacagattgtacttaccaagagcatttattgttgtttttattttcttaaacatttccaatgaaaatcatcaaacctataaagttgaaagaacaatgcacctagattcatcaactcttaacacttgctatctctcttacatagaaacatttcccttttaccagtccacttggaaattggctatatactcacgatagccaagaacaagaacactctcttacaccatcacatcattgccacacttaaggaaatccacactgatccaggaacattatttgatatacagtccatattcagaatcctccaggtatcagtaatattttaat

SEQ ID NO: 135598 - DNA, 1045 bp, Homo sapiens
tgtttgtttgttttttgttttttttgtgacagagtctcgctctgtcgcccaggctggagtgcagtggcgcagtctccactcactgcaacctctgcctcctgggttcaagcgattctcctgcctcagcctcccgagtagctgggatgacaggcgggcatcaccacgcccagctaatttttgtatttttagtagagacggggtttcaccatgttggccaggctggtctcgaactcctgagctcaggtgatctgcccacctcggcctcccaaagtgctgggattgcagggattagccacagcacccagcttgtgcatgtgtgtttttaagaaaacgtccacaaggtaaggaaattcaagcaaccaagaaaagacgcttgataaacagtaagtcccatcttgctagtttcttctgtatttctccagggccactttaattgattctaaaatgtacattatttctcatttttaaaaaaaatctctaaaatcagggtacatcttaaaagcaatataatgccatggtttaattggcacatgatttagtgatacataaaataaaggcacctcttgcagtggcatcttcgatttgaagaagtataatattctacgaatatacaaatttctgtgtttttttgtccccccaacccctgcccttttaaagacatatagtaatatagtggggttataggtttatatactgctacttagctgtgcagagaaattacagcatttaaaaaaatcaccaatctgtcttcctcataagtcatcatctagaaatggggagaagcaaagagtggtattttggccagttaataaggtcttatattcttttggcttaaacagtatcttttgggtaaattctggattttttcatatatcctgccatcccccattaaaaaccagcatctggtcttgggggattgtgagatttttgtggaggtgagggaggccctggcctatgcttgctgcctttgctcatctagtctggtctggtctggtccctgggcctttcgcaggtatcccctgaagtgtggttggtggtcttgaat

SEQ ID NO: 135599 - DNA, 1241 bp, Homo sapiens
tctcaacattggaatgaagacagcttagggttctgctttcatgaagcttgcatgctcttaggtggagacagacagtaattaagcagataaacaggaaattatgagctagtagtgggtccattgctgagaagtaagacaggtggtaggatgacccgtgccgtgtgatgactttagattgggtggttggggaagacttcacggaccttaaaactggccttggaacgggaagcgagaactgggcacggaagatgagggagtgggagatttcaggcagagggagcagcagcaggtacagaggccctgaggccttttattgtgtctttttgcttgagcgagtaacttagagcacacgtagagaaagacagcagaagtgatcttctaaacactctgtcctgtgtggagagctccttatgtgagattttgctgtgtagtgaattaaggctcagccaaactggctcacgtgagctctttgagcttgcctgtctctgtgggctgaaggctgttccctgtttccttcagctctacgtctcctccgagagccgcttcaacaccctggccgagttggttcatcatcattcaacggtggccgacgggctcatcaccacgctccattatccagccccaaagcgcaacaagcccactgtctatggtgtgtcccccaactacgacaagtgggagatggaacgcacggacatcaccatgaagcacaagctgggcgggggccagtacggggaggtgtacgagggcgtgtggaagaaatacagcctgacggtggccgtgaagaccttgaaggtaggctgggactgccgggggtgcccagggtacgtggggcaaggcgtctgctggcattaggcgatgcatctgcctggaagtctacctcctgcctgctgtccgagggcttcattggcgccacggaattgacttttccgtcttatatcattcctgtgtctttgtaggagtggaatcattctcatagtccgagtgtgtttccacatatggtgagagctgacaagcatggaggggttttggtgtaaaaagattagtcatttggagaggttttctcattttatggcaaggttcttttaaagccgtggatttccatgctgttcgtgcggcatggagatcacttcctaccgagagttaaggaggaaaaaaagatctctgagttttgaaagaagatttaaccaaaatgcatttgactcttctgtggatttttgttggctgatttggaaggcaggtgc

SEQ ID NO: 135600 - DNA, 1046 bp, Homo sapiens
attacatatgtgttatctgtactatgcacacacaggatgttttcatatatcttataaggtatttatatggccatttcttacactgttttcccacacatgtctttccacgtccatatattcagatctctccctctccctacctcttatttatgtatagctgcccagtactccatttcactcattcatccggtcctcttttgatgtgcatttggttgttttacacatttgtttggtttttgcccttataaacaaagcagaaacaaatattcatgtacacgaatctctgggcactttggctggtatttctaaaagttgaactgttggttccaagaactgtgtgggttttaaattttgatacattttaccaaactgttaaaaaaggttgtgccattgtatgctccagtcagacgcatatgggagtgactgttcctggtccccagtactaggctttgtcagtctgtttagtcctcatgttagtctcattttcatgagaatttctttacttcagactttgataaccgtgaagaaagaacaagatagaaggtgagctgtttggcttagtaattttctacacctactagagcgggactgggaaaaatatatttgtaaatgcagttcttgctgtcactgtctctctggggttttacaatccatattcctgccagcatctaacgtcttttcaaattcttaatgtctataacaggacatgatgacattcatcgttttgacttgttgcagcaaaagatggttagcaggattggaatgttgctttcattctagacttttccttgagaactgctagccccgtattgctagccagatctcatggatgatctgacttgggtttcatctgtccaggttggcagtggaatccctctgaccggccctcctttgctgaaatccaccaagcctttgaaacaatgttccaggaatccagtatctcagacggtaaagtacccatcccggggtacctgcagtggggtgaaagggcagccatgtgggactgcagcctgggtcattcggttcacttcctggtgaaagttcac

SEQ ID NO: 135601 - DNA, 1038 bp, Homo sapiens
gcagaccagctgaacaaaagcattgaggggtgtattagtctgttttcatgctgctaataaaggtatacccaagactgggtaatttataaaggaaagaggtttcactgactcacagttccacatggctggggaggcctcacaatcatggctgaaggtgaatgaggagcaaggtcacatcttacttggcggcaggcaagagagcttgtgcaggggaagtccgctttataaaaccatcagatctcgtgagacttattcactaccacgagaatgtgggagaaacctccccatgattcattgatctccacctgaccccaccgttgacacgtggggcttattacaattcaaggtgagatttgggtggggactcagccaacccatattggaggtggggggtaggccaagcatctgggttcacagaggatcctggggatggcaatggtggactccattctaatggactgcagactgggtacatgtgaagggactggacaaagccctacttcttgaagatttatggtgggatgtttactgacagcagaatctataaacctgagttttatcacgtactctcattagtaaaaaaaaaacaaaaaaaaacagaacatgcagcccatatatatggtatataaagtacgtatgtccactactgtaggagtagagtgcgtatgttatgtaccaaaacgcacatttaaaaggcttgcatgctaaataagtccaaatttgcaatacttcccgccccgctgggccatctcactcacctacttggaggttatggcgtatagactctccagaatcttccacccttcctcctcttatcggttttcctgatttcaggtggctgagcagtagggaggagaggcctctgggaacgctgtgcttattaagaacccagtgatcagcagtcatgttcatttacgcccgtcagtttcatctgaggggtattttgatagtgatctcttggtgagccgagggtgtcaattaactgctcagtgctgaaactgagtggtgcataattcattgcaatttcactctcctggc

SEQ ID NO: 135602 - DNA, 1048 bp, Homo sapiens
cagcctctgcagggaaggctggaggaaagccctcgcagagcccgagccaggaggcggccggggaggcagtcctgggcgcaaagacaaaagccacgagtctggttgatgctgtgaacagtgacgctgccaagcccagccagccgggagagggcctcaaaaagcccgtgctcccggccactccaaagccacagtccgccaagccgtcggggacccccatcagcccagcccccgttccctccacgttgccatcagcatcctcggccctggcaggggaccagccgtcttccaccgccttcatccctctcatatcaacccgagtgtctcttcggaaaacccgccagcctccagagcggatcgccagcggcgccatcaccaagggcgtggtcctggacagcaccgaggcgctgtgcctcgccatctctaggaactccgagcagatggccagccacagcgcagtgctggaggccggcaaaaacctctacacgttctgcgtgagctatgtggattccatccagcaaatgaggaacaagtttgccttccgagaggccatcaacaaactggagaataatctccgggagcttcagatctgcccggcgacagcaggcagtggtccagcggccactcaggacttcagcaagctcctcagttcggtgaaggaaatcagtgacatagtgcagaggtagcagcagtcaggggtcaggtgtcaggcccgtcggagctgcctgcagcacatgcgggctcgcccatacccgtgacagtggctgacaagggactagtgagtcagcaccttggcccaggagctctgcgccaggcagagctgagggccctgtggagtccagctctactacctacgtttgcaccgcctgccctcccgcaccttcctcctccccgctccgtctctgtcctcgaattttatctgtggagttcctgctccgtggactgcagtcggcatgccaggacccgccagccccgctcccacctagtgccccagactgagctctccaggccaggtgggaacggctgatgtggactgtctttttcatttttt

SEQ ID NO: 135603 - DNA, 1108 bp, Homo sapiens
gggtggggtgcactcgccatttcctcacgtgcaggacagctcttgatttgggtggaaaacagggtgctaaagccaaccagcctttgggtcctgggcaggtgggagctgaaaaggatcgaggcatggggcatgtcctttccatctgtccacatccccagagcccagctcttgctctcttgtgacgtgcactgtgaatcctggcaagaaagcttgagtctcaagggtggcaggtcactgtcactgccgacatccctcccccagcagaatggaggcaggggacaagggaggcagtggctagtggggtgaacagctggtgccaaatagccccagactgggcccaggcaggtctgcaagggcccagagtgaaccgtcctttcacacatctgggtgccctgaaagggcccttcccctcccccactcctctaagacaaagtagattcttacaaggccctttcctttggaacaagacagccttcacttttctgagttcttgaagcatttcaaagccctgcctctgtgtagccgccctgagagagaatagagctgccactgggcacctgcgcacaggtgggaggaaagggcctggccagtcctggtcctggctgcactcttgaactgggcgaatgtcttatttaattaccgtgagtgacatagcctcatgttctgtgggggtcatcagggagggttaggaaaaccacaaacggagcccctgaaagcctcacgtatttcacagagcacgcctgccatcttctccccgaggctgccccaggccggagcccagatacgggggctgtgactctgggcagggacccggggtctcctggaccttgacagagcagctaactccgagagcagtgggcaggtggccgcccctgaggcttcacgccgggagaagccaccttcccaccccttcataccgcctcgtgccagcagcctcgcacaggccctagctttacgctcatcacctaaacttgtactttatttttctgatagaaatggtttcctctggatcgttttatgcggttcttacagcacatcacctctttgcccccgacggctgtgacgcagccggagggaggcactagtcaccgacagcggccttgaagac

SEQ ID NO: 135604 - DNA, 1213 bp, Homo sapiens
acccggccaagcccaccactttttttaatgagagagtttttgttactgtcctcctctgacaggtaaggaagctgagaggctcagagatgtcaagcagctcggccaaggtcacacaacatgtaccagctggtgcctaccacggcagtctaatcagtagacagtgcagacagccccaacaggaccaggagagaactgtgcccagggccggatttctccctccacagtggaagagaagcagccaagtattacagccagcccagctccttgggccgcagagatcatctcaggaggcctttctaaacggagtgccctggggaagcaaactctaaacgtcctcgtacgagaagacattaggtgagaccaggctgaccacagtgtccctgtcagcactgccctcgtccctgggggtcacctaatgtcttgctcccctgcccccacactccagttgatatcactgctgtaatcagggaaatctctgagctctttttctgggagggcatttccgaggggccaaggagctgcggattggaggagcaccagcagcacagggcatgcccctgctccctacccagaagctggaaagtaccatgtcaggtttggggtcttcagtgaaatctgtcaagcagcgtctttggcactggggcaaagttaggatgaggtggcttccctcttgattactacagcagctgtctatggctgactgtccccaggagcctgttttgtttggggttttttcttaaatatttttattagtatttcaaacatacaggaaaagacaaatgttttccattcatcttgatagctaaatacctttagatctacacaccaagatgaagaccgccttgtgtcttggataaatgtaacgagcagatgctggcagctcgcaggtgctctgggctggagtagttagaactgccgggccaggtggagtgagccagcactgctcaggggagcttcatctctctgattccaaaataaatgttttctggagtctcaacttcaccctcctggagaggggtaatcttatctgtggaggagagagcaagggctgagggggcgctggggtggcatgagaggcccaaagaccttgacagacacggtgggcttggccgcggggcaccgggttaaagaggaggcttagccaagcccagcgggagttgatttgacagcagtgcccttagcagcttgattgttcggattttcagggctactg

SEQ ID NO: 135605 - DNA, 1171 bp, Homo sapiens
tcgtctttctaaaagctgaaaaatgttcaattcccaaacacatttggagcctaggagtttggattagggatgatgggactgtatcccatgtttcagctgagaaaattgaggctcagagaggttgttttgcccaaaggcacagagctgctaagtgagcatctgagcgtggacatccatggacatcagaggtcagagcataaactctttgatgtgagttccgccacccatcaactgagtcagctccacctcagcctggtgacagtgtcctggggagggctgggaagtgacattggagtggggtgcggggaggaccgtgagcccgctctgcagagcacacaggtactggctgccacctcagaaactcccttcttctggggccacgtcaccttctctcagcctatctggatcactaggtggggcttctgaatgggacgagggggaggggacaggaagccagtggggaggggggaggctgggggagctgtctggatggagctggcaggaccccaaggccacaggggaaggaatctgggacagggtggggagttgttggggagacacagtgctccatgacaaagggtatcacatgtgtcctgggaacccaggggccaaggaaagagctcagcccaggcacaaacaaggtgggaggaagttgggagaaatggccaagtttttggatttgaggtagttcctgtttactgtgcatctactgtgtgccaggccctgtgctgagctgtgcaccctcgtggaactctgcctagaaccttagaagcagagtggttctgatccttctaaaagcaaggaacctgagagcctccacactgtgaatgtagagagcgaacacacacacacatacacacacacacacacacacacacacacactccctgctgtgtcttatcccggtgagcattcttcctgttttgtcgccgaaaaccaggcatataggagagagtccacaagtgtgagtgacagggtcacctcctctgtcctgtgctctggggccagctcagcattctcttttgcctgctctgggaggcagaataggatagaaatcacgaaaggaggctttggacttaggcccagcagagccactcactgggcaagcggagtcccctctctcagcctcagtttccttacctgtaccgtacggataagagtcgccacttcc

SEQ ID NO: 135606 - DNA, 1012 bp, Homo sapiens
aaaatagttagaattgctcctcctgaaacgggtggtatccagcagtctacactgtgcccagcacttagcctgcattcagtacatatttgttgcgtgcatgaatgaatgaatgatctgcctggtacagacaactgcttggcatcattgccataagagctatttacctccaaaaggacttgctgcactcacttcttctccctgccactgccacccatcccatagcttgccaaggccttgctgagggagcggaaacaggcgcaccgccgtgccagcaggctcaccagccagacgcaagccacgctccaacaggcgtcccagcaggtgctggcgtctgaagcacgcagacaggagctggaggaagctgagcgggtacgtttgccagggcccctaccctatcgcctcctgcccctggcagcccgggtggggacgccattcaagctgtttcttcctcctccccctgaaaggtgggtgctgggctgagcgagatggagcagcagatccgggaatcgcgtatctcactggagaaggacatcgagaccttgtcagagctgcttgccaggctgggtaaggaggccctaaggctgggccctgaacccctgggtccctggggcacctctaggatcttcctgtgagctccagtcctggggaagatttcctccttgtcctcattgccatgcttcccgcatccccatctttgtggtcaatcacaagcatttataaccatgcccaggcccccttgccatgtgggacagggttggcatctagaagtgagttcactttgagtaactgtttgtgcctccagggccctctattctttggggcagggcagggggcacacagaaaactcaccattggcaagaacacccacaggcaccgggtgagcaggtgagcaggtcagtcctcaggagctgagggttcaggagaagaagaaagactgtcacggcagaaagtgtcatcaggtgctggtctgggatcagactaagattcaagtctggctctgtcccttctttgg

SEQ ID NO: 135607 - DNA, 1037 bp, Homo sapiens
aggagtcatatcaccactttgcgcctccattttctcctctgtaaaatgggactagcagccccttccttggagctgctgtcttgggcttctgcaaggatcccactggagaacagatttaaattctgttgaggaccctgctgacatgaggctgggatgatctttccctggatgagggaaggatcctaatcttgtttttctttctttttttcttttctccatctccaaaccagagtcatgatgtttgaaggaaaagccaacgagagcagccccaagccagttggcccccctccagagagagacattgctagcctgccctgaggaccccgcctggactccccagccttcccaccccatacctccctcccgatcttgctgcccttcttgacacactgtgatctctctctctctcatttgtttggtcattgagggtttgtttgtgttttcatcaatgtctttgtaaagcacaaattatctgccttaaaggggctctgggtcggggaatcctgagccttgggtcccctccctctcttcttccctccttccccgctccctgtgcagaagggctgacatcaaaccaaaaactagagggggcagggccagggcagggaggcttccagcctgtgttcccctcacttggaggaaccagcactctccatcctttcagaaagtctccaagccaagttcaggctcactgacctggctctgacgaggaccccaggccactctgagaagaccttggagtagggacaaggctgcagggcctctttcgggtttccttggacagtgccatggctccagtgctctggtgtcacccaggacacagccactcggggccccgctgccccagctgatccccactcattccacacctcttctcatcctcagtgatgtgaaggtgggaaggaaaggagcttggcattgggagcccttcaagaaggtaccagaaggaaccctccagtcctgctctctggccacacctgtgcaggcagctgagaggcagcgtgcagccctactgtcccttactggggcagcagagg

SEQ ID NO: 135608 - DNA, 1021 bp, Homo sapiens
tctaaagcagccccccgaaaacatctgtcaagttccaaacttatctgaatcggaagctaccaatagccaacctacatctaaggggaactgtaagatttcagaagaacaagaagcataggtcgcttaggcgtgggccacccaagaagagagacttaacactaggtaagcccgcgctggctgcgaaggcgggagcggcaccaggaccatccagggcgcaggcgcagggacctcacggccacgccactactcagcccgagctggccaatggggagcggcggccggaagaacgcgcggcttcgctaggttccgcggcttcctctgaccaagcttgacgtcaccaaagcgcgccggaaatgcgaggtcaactgcgcgccgctggcgctgaggggaggaagtttgctgtcgagcggcctgggttccgtgggcaaggccgtgggaggcagcgttggctgcttcgacacactgagggcggcgcgatgggagacgagatggatgccatgattcccgagcgggagatgaaggtcagagactaaccggggcctccctcccttctttagtcctggcgttgccttggagcccagctgaaaggcgaagcgcggtgctggctgtcccgcctcctgcttgaacagtttaccgcgttcacagctctcaccagcgcgtctgccgcgccgctggcgtgatagccccaccgaatgcagtttcccagtcccatcctggtctcgtgcacggctgttgagttaccctagctacttcctggggcggtcacaatagtggcaataactgctgtttattgagtgttgactgtgtgccaggcactgtggtagtcatcgcggcagccctacgaagtagtcgttaacgtagaggagtaagttgaggctcggaaagtaatttccctaaagtcacatttgacgcggggctgaaagccagcatcatttaagacctttgctctcccagtacttctgtaaggtgatacgggcttgcctaacgtagagtcagggaaggtcatccatcctgcagaacc

SEQ ID NO: 135609 - DNA, 1029 bp, Homo sapiens
tgcagagaagactattatggcccctttacatggatgacagacaaattcatgaagtgttccatatcagaaaaaaatgagggccgagtgtggtggctcatgcctgtgagcttgcactttgggaggctgaggtggatggatcacttgaggtccggagttcgagactagcctggccaacataatgaaaccctgtgtctactaaaaatacaaaaattagatggccatggtggcgggtgcctgtaatcccagctacttgggagtctgaagcaggagaatcgcttgaacctgggaggcagaggttgcagtgagccaagatcgctgcactgcactccagcctggacgacagagcgagactccatctcaaaaaagaaaaaaagacaattgagacagaccttggtctcagtaatacatatttttgttgtactgaaattgggtctactgaatataacatgttttaatttctttctttattgaattgatctcgttttgattcttcacaacaggattttcagtttagagcgctaaagaaggtgagaatctttgactcccctgaggaattgcccaaggaacgctcgagtctgcttgctgtgtccaacaaatatggtctggtcttcgctggtggagccagtggcttgcagatttttcctactaaaaatcttcttattcaaaataaacccggagatgatcccaacaaaataggtaagttccctggtttatgttgcaaagtagagagaggagtatggtggcatgctcttgtgtttccttcccaagaagtcattctaatactaaaatgaacactgctgtcagtttgaaggttgactcccaagaagattaatggaagcctttctaggttttctccttggtcctttgtatttctccttacatgagttgttcctctcagctcaacagggaagaacttaaccattatgccatgcttttatttttgctcagttgaacttgggctctggctctctgggtgaagggttttattggcatgggttttcagttggcacaacagtatgatccaaacta

SEQ ID NO: 135610 - DNA, 1037 bp, Homo sapiens
tctttcagactttgcaggaaaaaaaagtcattccttgtcctccgttttatgagtcagatcatcctgtcagaggtaacaactgcttttcttattgggctgacctctaatgacatgttatgtatattacagaaattcaaaatcatgtaatgtacctgctcagtgaggtattggtgtttgctttatgaataatgtcactatttcaaacagctaattaagtcagtgtaaattatggccctctgggtgacatctgtgtttcacgataaatgacatgaaatggatcccgactttttattacaattcttcataatttgccctgattataatccagcagaaaaattaccatttggggatgagtttgggcttcttgggtcattgtacctgtgcattatatttagtcaatgaaatcagggcctttgattttttttttatccatagtggctattccaaacataagctgctttttcttgtatctggttgctgtcatttttatgagctactgattaagatgtgtctttcagttctggatgtgctgtggattggtacctacgtcttcgccatagtgtatgctgctgcagatgggaccctggaaacgtctccagatgtggtgatggctctactaccggtatgcctgtggaagaaatttcattgtttgagaattagagaagtcttctaataaagctggaggctttgatttcaaggggtttttttgtgtttgtgttttttttttttttttttgagacaagatctcactctgtcgcccaggctagagtgcagtgatgcgatctcacctcactgaagcctggacctcctggactcaagtgatcctcccaccttagccttctgagtagctggtactacaggtgcacaccactatgcctggctaattttttttttttggtagagatggagtttcaccatgttgcccaggctggtcttgaactcctgagctcaagtgatctgcccacctaggcttctcaaagtgctgggattacaggtgtgcgtcaccgcacctggcctgatttcaggttcttttactt

SEQ ID NO: 135611 - DNA, 1049 bp, Homo sapiens
aagcagttctcccgcctcatctctcagagcactaggattacaggtttgagccaccacacctggctggtcttacattttaatgggatagtcaatactaaatgtgagatcaaggactgataagagtgatggagaaaataaagccgtgttagggatagatgatgactggtatgtgtttgagattgtgtgtcaagggaggccaatttgatacttgaaaaagatgtcttgtttttaactcttttggatttctaataaggttgagtttttgaaatatgtttatctagatgccttattttaagattagaggttttttctattctaggggataatattaacactagtatttattaactgctacttatgtttcatgtactgggctggaagttttgtatgtatcatttcattttacactttacagtagcctctgaagtaggcttagtaggtctagtatacacatgagaacactaagtatcaggaaggttgaaaaatctgcatgtctcgtgggcagaaagtggcagaacagagtttaaatgcagttcggttgatggccaatgtttgtactccttgtactaagtgctgcctttataccatgtccgtatatctggactttgagtaaatattctcatataactttaaatgatttattatttgagattcttttgctgtgggatctgagaaaaattgcacatgagaattttttttcttgctttgttcattgtagaaaaaagaagaaaagcacccagagatatttgtgaactttatggagccctgttatggcagctgcacggagagacagcatcattactacctcagttacattgaggaatggtgagcagagagtctggacagggcattcctgctctcactggaagatcacacctgagtcaccttgtcccatgttgaaatcttttctgattgattgattgatggattggcagggtctcactccattacccaggctggagtgcagtggcacgattgtagctcacagaagcctggaactcccaggctcaagtgatccttccacctcagcctcccagatgggactacaa

SEQ ID NO: 135612 - DNA, 1394 bp, Homo sapiens
cccctgtgattcatgcttcccagtctggtcaacactgaaagttaggcaaaatgttagtgattttaaaaaccaagagtcatttgttggaaggaacagagcctatccaagcacacttaagcaaaaagggagtttactagaaagacttagtagtttctcaaggaatctggggacaggaaagctgaccagcctgaggaactggtaccaagaactgggaagaagaactaaggttatctctgtctctatagacgagtgagcgcagggcatctgagcacagaccagccttacatgcttctctgtgaaagactgcagtagagatcagctggagttcctggccccaatccaaaatgtctaggagcaggtattgactggcttagtgctgctgttggatttgtccctcatggtcagcaatctccctagttgtcatggaaggtacctcagaaaatgttcatgatagtggttatttatttacaaggcagaggcttgatacaccaggaacagatagagagggggttgatttggaaaattaacttcccatttgctggggtacttctggcttttaggccatcttctcagatttcagagcctcctagtcaacacctgagtctaaaccaagtgagtcatctctgttctcctatttgaacaatgttaggaggaaccaatgcaaagctctaaccaacatggctttttcttttttcttcttcttcttctttttttttttttttttttttttagattaattgggaatcttggctactggaggattctagtcgagctgaattgcctgtgacagacaagagtgatgactccttgcccatgggagttgtcgtagactatacaaaccaagtggaaatcaccatcagtaagtgtagcctggtagttagtgcagaaatagtcttctttctagttagggttaatattgaaacaccagttacatgttactgacagagtctactctgctgggcacttgtagcttctggcagcacatttctccctgaagagtgataacaggctgcgttgtgacaacactaaactgatttgaatggatgttcgttgatgagaccaaggccaaacactgtatgtatgtgtgggtgcatgtttgcacacttgcacatgtctgggtgtactttagaatctggttgaaatatagaacatcaggattttatggcttggtttctttgtccaatccaattccctggtgacctcccaaagaagcaatacccgaatctggtactgcacacaagtacttggtttgaaggcaaggattagaaaatagagacctcaggcccatggtttccaaatagggcctagatatgtgttttgaatagatcttccctgcagtagcttggctatactgtagtcattgaaatgtaaaagtgccacaaaagaaacagtct

SEQ ID NO: 135613 - DNA, 1032 bp, Homo sapiens
gggtaccatgaactacctatacccagctgcctggtgtgtctgtaataagcagagcagcctgtgagattaggagcctctgggatgggacgaggtttgtttctgagcctttgctactagcccattcaatgctggagcacaatcagaggccagttttactgttagcctttcctagagaaactcccctcttccttcacagttggtccagaggttatagttgtgttcagatgtgtagaagagagcccctgcggggagaaagtccgtcccatcagctaagtctagctaaagcctacttcatgggttcagaagacattaatggttccacctgtttctacactgcagttctaaggatgctgtattgatcagaagtagtagtagcatgatggttttccaataatcagttctgttttcagtggaaaaaatgcttttgatttatttagggtctggtatatatttttcatgtcagtttacctaatatgcatgaaagtgttttaacatctatgtatgtctttacagaagttagttgtagctggttccatatctattgtataaagaagtattaacagaataggtttgcttgcattattatactttcatcaatgtgacagtttacttggatttttgttttcagaaagtggtattttcatacttgtatctaagtattacgttgcattagacaaagtgtcttccatgaagataaactgccatcttagctaatttggaacaaccaagtcctattaatataaatagaaaatattgacacaaagaattcttttcttatttagttggttatttaatttaaagattaatatttttaccttatggaaagtttggaaaatagaaaaaaaaattattcatttttgagacaggggtctcactctgttgtgcaggctggagtgtagtggcaggatcttggctcactgcagcctctgtctcccaagtccaagcgatcctcccacctcagcctcccaagtagctgggactacaggcacaagccatcacacctggctgatttttgtattttttttgtagcaa

SEQ ID NO: 135614 - DNA, 1750 bp, Homo sapiens
gttagattctgagacctaacatatctatcaatttgcctcctttgttttgagatacctgtatttatgtgactttctatgtgtatttatctggaattacttttagtgaaataaggtggaggtctgaattaaaactttttcctggttgttaatgaaatgttgcagtgactgaactgttttgtgtgccatagtagcactgagaagtccatgaagtccaattattctaatgtctttccttagttttccttcagtttcatttatctcatgagacctgaaaactccaacatgaactgtgtacccatgtgttctttttgcttcttaaactagtaacatttctggctttattctaccacaaattctttttcacttgctttctattatgtgaacctccactgttacagtgttaacattttccttcctttttttgtcactgcaggaagtactcccactaccccaacctcctctcaagccccacagaaactggatgcttctgcagctgcagcccctgcctctctgccaccttcatcacctgctgctcccattgccactttttctttgcttcctgctggtggagcccccactgtgttctcctttggttcttcatctttgaagtcatctgctacggtcactggggagcccccttcatattccagtggctccgacagctccaaagcagccccaggccctggcccatcaaccttctcttttgttcccccttctaaagcctccctagcccccacccctgcagcgtctcctgtggctccatcagctgcttcattctcctttggatcatctggttttaagcctaccctggaaagcacaccagtgccaagtgtgtctgctccaaatatagcaatgaagccctccttcccaccctcaacctctgctgtcaaagtcaaccttagtgaaaagtaagtcacttctaaagtttgattcttctgtgagttgggtagaaatattggatgttatttactaaaagtagagtcactctgagaggagttaactgagtagaatttttttacccagagtgatacttgcaaatggcaaaaattcaaccaacataaaatactggcatttcatcagtgaatagagtccagaagggtctcttagctagcattttatttttttgactatgggatttatattcaggtatttgttttgcttttttacgttacaaatgtaggaaatattccttattttaaaaaaagaagcaatccagagtatgcatcctggaagggaaatgaatcccttgtagtcttttttcctccctgtgtctacccttaactctctctgaactgctgtctacacagccacaaagtcatcttgtgacactgtaaattgttaggtgattcttctgcttgacagtccctatgaagccccgtggctgctcactgctaattcttaggttggtatccagtttcctccagatctgggtcgggcagctcactcatttcttatttatttacttctttatcttgttcttttcttcccactagaatgtaagcttttggagggaagcaatcccttatatcttgtaacccctcccaagataaccatgagttcccaagataaccatcgagtataagtactaccagctttttccctacttgcctgtactatctgttgttgctatggtggtgctgctgccaccacagttactgttaatactgaattggcacacatccacttcatgctaagggttgcatagtgttccattttgttgactgcaccacagtttatctgaccagtcatc

SEQ ID NO: 135615 - DNA, 1005 bp, Homo sapiens
agtgtttgtcaaataaatgtttgctgttaatgaatgctgatgcagtctaagacctctctagtgttaatcgttgtaagtatcaaatagtctaaagggcatttcaaattatagtatctttaaagcagaactcttgatttctgtctcccctagaggctagtccttttccaatgggtaagtagcactaacaaaccagatgtttgcacaagccccaagccccgaagcatcctagatccctctctttaacagtacctgtccccagtccaggctggcgggaggtcttgtcagctccaccctctgctgtgtcacatgtcataagcccacagctctgtccccctgctagcatcctgtgtcaagctgttgcacctctcaccttgttaacctctcgactactctctctgctatccctgctctacatagcagcaagagggatcttttaaatcataaaggagatttaaactcttgtaaaacaccagtagtagctttccaacacgtttagaatagaacccaaactccttggtgtgaccttatatgacctaccccggcctgccttcctgactctacccctgccctctacaacgcctcccctgacttcacagagcccacatttactttttttctttgctaaggtttctcctgccttgagacctctgcacttgcctttcttggtgcctggcaggtgcttcctgaagatctcatagcttgctttctgcttgcagcctccgttcagatggcagcccgcagtgagggctttcttggccatctcatctgaagtagtgcccttttttattctctttatgtttccctgtttgttctccaactgaaattatcagatgtgtttatattttattattcaacatgtcccagtaggaggtaagttccataagagttgggccctcatctacttgttcacctctacctgcactgtctagaacatgccttacacaaagtagagaccctataaataaggattcgttacaatgagtgaagaaataatgactgtgttac

SEQ ID NO: 135616 - DNA, 1057 bp, Homo sapiens
gcaagtggtagtgccagaattctgcttcagactctctgattccagagttcgggtcttaaatagtgtgtttggaaagaggcaagttctttagagtgttagcagtaattatcttcacatagtagtgttagagctactgtctttgtattttctgcattttcaatcattagaatgtattttttcaatggggatgaaaaataaatataaaaaaagaacattagtgtcgttctaaacagttaaattctttttttacctgagttaaatatgttcagatgttcattctgttcagtgagcgtttgagaaacaccaccttccttgatccaaacagaaagatttggacgtaacaactttttgtaccaacacattattgtactttttctagtcgcttcatggagatataagtagcctgaaaacaactttacttgagggctttgctggtgttgaggaagccagagaacaaaatgaaagaaatcgtgactctggttatctgcatttgctttataaaagaccactggatcccaagagtgaagctcagcttcaggtaggagatctatgtaaatctgtttaaaagatttaaaaacaagctcatgtaacaattgctacctctttttgcatatagatttggatgatggctctttttgaagttgttgattttctgcttataatttaccacatttcccgtaaacttccttaactgtggcaaacagtacacttcatgtaattatgtaatttttttcacttaaaacatagattttttttaaaatactttttttcttgagacagggtcttctcactctgttgcccaggctagtgtgcaatggtgtgatcccagctcactgcagccttacttcctgggcttacgtgatcctcctgcctcagcctcctgagtagccaggaccacaggcatgtgccaccacacttggctaatttttaatattttatttggagagataaggtgttactatgctgcccagcccagctggtcttgaactcctggggtcaagcagtcctcctgccttggcctcccaaagtgctggaattacacgcgtgactggccaaa

SEQ ID NO: 135617 - DNA, 2908 bp, Homo sapiens
ttgtccaacccacggcctgcaggcttcatgtggcccaggacagctttgaatgcaatccaacacaaattcgtaaactttcttaaaacattctgagatttttttgattttttttttaagcttatcagccagcattagtatattttatgtgtggcccaagacaattcttcctccagtgtggcccagggaagcaaaagattagacacccctgctgtacagcatggttttgtactgactactatagacaattgtaacacaaatcactaggcaataggaattcagctctactgtaatcttataggatcatcgttgtatatgcagtccatcattgaccaaaatgtcgttatgtggcacatgactgtattgacataccatagcaaagaaaatttggtttataactgatgtgggattattccttatgtttttatatgtatgatttttcctatcccctctgcaaattaatgcagtcagaaaaaaatttcaaagctacttaaagatttctactgaaaagcggaagcaaatagacctgtcgccctctacagtcagacctacttcccagaggcagctactgttgtctctgtcttgttttagttcttttgggcaggttaccttcctgatgctaaatcttatgctgtccccctatttcttgacaatagtctgaagaattaactgactcccatagacttccagtgaaccttttttttttaattgaatataatttacattcagaaaaacagataaattctaagtagaaagctgactggctttttcctggttcctgactcacacctcactcctgcccttttcttcccagggcctctctcaggtttcacctaatgtatgctgtcctttgctacaggactggcctgcctgtttccagctgttttctccacattccattttatcttcattaggctttcatctcctttttattttctagtaatttcttaatggttcttgtccagtgctggttctccattttatcattttcactgttaccattgtagtcttgtttgtttttttactgggagattcctttacttgaaccattcatgtttaattcttttctcattgttgtcaacaggcacctgcttgtgccagagcgagagacactgtttaacaccctagccaacaatcgggaaatcatcaaccaacagaggaagaggctgaatcacctggtggatagtcttcagcagctccgcctttacaaacagacttccctgtggagcctgtcctcggctgttccttcccagagcagcattcacaggtgtggagaggacttgcactcaataaatatgggtgaatgaatgcatgaacatttagggagtcttagagtggttcagatatgggtttgcaagtgactctgtgtctctcacctgtgtaatcctggtcagggtcccaccctctctgatcctttgtttctttgcctaaaaaatgaggatgacaatacctgcttcgtgggattgttggagagttaaattaagtctgtaaaatattacactgatgaaatgggtgctgaatatatcatagcaagtgatacaccatagtaacagtgtcatggtttgattgaaaatcagctgataggattaagttgactgacttgtttctgaagcccagatttgccattctgcttgaatggggggactttcagaccctggcagattgacagtttgccttgagtttaccaaaatggttttgtgtttatgcttttaggccaaatgtataaattttaattactttttctactgaggcaccatcatgttgtgtttgaggtggagatggtatataatatgattgtgatctcacttcttttagattaattccatcagttggtcagatggcatgtttatatattggggatattctcatgtcttgcatttatatttaagaggatagtgtacccccgacagcctccgatctttcagctcctagttggtctgtatctaacactgttctgtttcagttttgacagtgacctggaaagcctgtgcaatgctttgttgaaaaccaccatagaatctcacaccaaatccttgcccaaagtaccaggtaattgcatccttcccagtcttttaactccctttattctcttccaagtactgatatcttaaaaactgagtcttaatcatttatgggtttatggatttcttgcagccaaactgtcccccatgaaacaggcacaactgagaaacttcttggccaagaggaagaccccaccagtgagatccactgctccaggtaaagagaaccagtaactgggcctgtacatagtgatagggtgtggtggggtgtgtgtgtgtgcgcgcgcacatgcacgtgtgcatgtgtgagctagggtgctgtgtatgtgtgtgtaagtgtgtgtgtgttggttcttaataggggatagagaaaatgtctccagaatctgttgttaatctgaatagtggaataagaaccagcttatatatacttgatgaagcagcaaagtagtcgttttggcttttacactgttttctgcagtcctcaagttttatggcactgattcacaagggtttgagataggctgagctggatcctagcctctgctttagccagagaaggtttacttttctgatttgtgttgggttttgagtaagtttgcatctgggaaaaaggcattttaaaaaataaataaataatagaaaaaaataaaagacgaggtctccccatgttgcccaggctgttctcaaactcctgggttcaagttatcctcctgcctcagcctcccagagtgctgggattacaggtatgagccactgtgccttgccgaaaaaggcttcttttatgaaaaaagaagaaaaaaataagattaagcaatgttgattaaaaatacttacttaaaaatacttgcttaaagaagccataaatttttttcccattacattaccta

SEQ ID NO: 135618 - DNA, 1899 bp, Homo sapiens
gtcatgtgttttttggctgcataaatgtcttcttttgagaagtgtctgttcatgtccttcacccacttttggatggggttgtttgttttttccttgtaaatttgtttgagttcattgtagattctggatattagccctttgtcagatgagtaggttgtgaaaattttctcccattttgtaggttgcctgttcactctgatggtagtttcttttgctgtctcacaggaagattttctgtgatgatggaaatgttctgtatctttgttgtccaacagggtagctactagccacatgtggctgtagaggacatgaaatgtggatagtgcaatcgaggaattgatttttcattaatttgcttttgattactttaaatttaaataaccacatatggctactggctaccaaattggctaagacagccgtagcacatagcattggtttttagtggcatttgtttatgttatacttacattatgacaataaaatcttgcagagccatgtgcacatgggacacaaaagtcaataaatatttgcagagccattttaaataacttggggagggaagaaaaagggctagattattttgtttggtttttgttttttccaatatacaggaagtattcacttgcattctgaaatttatgatagaaagttaacatgacataaagccttactcttcgtagtctaaacagaaggccgggattcagttcaattcaattctattttctcttttgggtttttcttgttgttatttgagaaggagtctcactctgttgcccaggctgcagtgcaatggtgcaatctgggctcactgcaacctccacctgccgggttcaagcgattctcctgcctcagcctcctgagtagctgggagtacaggtgtgcaccaccacgactggctaatttttgtattttttagtagagatggggtttcaccatatttgccaggctggtcttgaactcctgtcctggtgatctgcccgcctcagcctcccaaagtgctgggattacaggcttgagccactgcacccagccttttttttttttttttttttttttgagacagagtttcactctgttaccctattttttgtagagacagggtctcactatgttgcctaagctggtcttgaactcctggcttcaagcagtcctcctgcctcaatctcccaaagtgctgggattataggcctgacccactgcacccagtctcttgtattttttttttttaaacctaattgtctgaatcagaagaatcattagatttatctggaaatgttcgagacactcaggaccgaggacattctttctaatccattttgcgttggacctgttcttagaagcttatcattggaaggtgacagtaatggtgtgattgttcaccccaccatggaaacttgcctgttacatttctagtatattattattatactagtgagggctccaggcttctactttgacaccagcattaattctgtctcttactttttcacattcttttaacagccccaagatgttctcgttcacacacctcagtttctcaaatccccatctgagcaaagacccaaaaccatttttgttcacatttgacaatacctgctcccacttaaaataagtaataattaaatcattttacaagttgagtattttttttttttatcaacagtgaaaattacttagcttttgggcttgctttgagttgtctaaattgtgttttgtttggggcttttgtagccagcctgtctcgatcagcctttctgtctcagagatattatgaagacttggatgaagtcagctcaacgtcatctgtctcccagtctctggagagtgaagatgcacggacgtcctgtaaagatgacgaggcagtggttcaggcccctcggcacgcccccgtggttc

SEQ ID NO: 135619 - DNA, 1031 bp, Homo sapiens
tggctcactgtactgacaggtgttgtgcccccacactttcagtacagtgtcagggctttgcatcaaagtgacttccagcagagaaaaataccagtgttaggtactagaatgaagagaatttgtgagaggggatcagggaattggtctatgttggtataaaagttgtatctcaatcagtatcaggaaatgatgatgtatcttagtagaggtgggtaggcaaatttcatgcgataactgaaagatatagatgccagcctgttagtttactggtacttttctatgttaacgctaattttagcattttccctgcagtcgaacataaagaatttaccaatttaaccttttgtattttcctgttctctcacccactcacacttaatttttcttttcctcttagtggctacatctgctagcaaaattattcctcaaggggccgatagcacaatgcttgccacgaaaaccgtgaaacatggtgcacctagtccttcccaccccatctcagccccgcaggcagctgccgcagcagcactcaggcggcagatggccagtcaggcaccaggtaaaagctgtagccccatacctgtacagaggctgattatgagctgtctgagtcacaggccaggacagcaggtggcaagaaacagtgggcgctctttggtgcccttcagaagagaagattgatgtgacagccctctcccctttgtggagagagttctaagaaagcagagactaggtctgaaaatctttgcttttaaggggagggattagaactgccacatttagttaaggtggaaatcagtggggtttgtttttttttttaaacaaaattgctaatcctacttttgaataatgtctgcttagagccctaaaattataacctttgaaattcgatcatcgaataacactagcgtcatctcttagtatcttacagattgcagctaccccaagaggtaggtatttgaatggctattttggctgggcatagtgactcatgcctgtaatcccagcactttgggaggctgaggtgggag

SEQ ID NO: 135620 - DNA, 1063 bp, Homo sapiens
aggccatgagtttctttagagaagaaactatagatacattttgtattcgcagcccctaacacagagcctggcacataataagcccatgttaaagaaagacagtgaatgagtggcagaaatcctgagtctagatgctgttaatcctctagctcaagctgcccttttccaggacagaccagcagtgtggcaggtgtctcagctctgtgtagaaaagctggccagagaattcttttcccctactctagtacattcgattcagttacaggaagccttgttccatcacctgtgttaatggagtaggccaggtgttcctttgaacacaatgctgcaagaactacctagagtagatttccttcacatgataaggctctaatctgcttgggctcatgtcttggtttttcatttatatgtggctagaactttttatcctttgctggaattaatatggtgttctctcttctctgtttaaattagctgtaaacactttgactgaatcaacgttgaagaatgtccctcaagtggtaaatgtgcaggaattgaagaataaccctgcaaccccttctacagccatggggtatgttctgactgcagtgtgtttcagcccctggctgcttctgtagtagcggtggactgcctgcagggagcagcagtgccactgtcacagtctggttttcctgcaccgccttaggttataaggggggtggcggctaagcctgcctacacaatgcattttcaggagactgtcctttttaactggccggtgacagttgcctcacaaacttttaaagtttgtcttgatgctgtatgctcagtttctgtttgccatgtgtaagtctctgtgtggtacacattaggtgtgcaggttgattttttttttttttttaatgccctaggggttccagagttgatgctttgggtctcatgcagacttgattctggaaactgtaatctcaagggtgacactctcctccctcacttcccttctccaggcatttctgttcttcccatttcttttgcttttgtataaaagacagcacctctgtttggagactttagcttctct

SEQ ID NO: 135621 - DNA, 1025 bp, Homo sapiens
gttttgttgttgttgttgttgttgttttttgttttttgttttttcttagacaaggtctcactcttgcccagactggagtgcagagtgcagtacgatcatggcacactgtagccttaaccttctgggcccaagccatgctcccatatctgcctcccaagtagctgctgggactacaggcacatgacaccacacccagctaattttttaattttttgtagagatggagtttttgccatgtcaccccaggctggtctcaaatttctgggctcaagtgatcctctcacctcatcctcacaaagtgctgtgattataggcaggagccactgtgcccagcctagctcatttgtctttagtcctcatctgtgttcggaattcagggtgctgactccctcccgctgccctgggcaggttcgcagaacatgcctgtgccctgctttgccctgcatattttgtgactgtgatccctttagaccaaccaccatcccctgtggcaaagggaagagttgagggacatttcctcacttggaacatggggatcttgaggactagtatcagatttcagggagttagtgtctggtacccatgattagtctagcagcaagaagggcagccatagaccttgtggttctccacagcgtgcccaccctctgccattgcacagagcagatctgcccacggttctgttttccctctctcaagtggccctgcctcactggtccgctggcctctttttttccatgttgttctgtttatcaacactgcttgtttgaggaatttttagttatctcagggccatactaacagccaaaaaacaagccttctctattactattttgtagtgacctcggagccttggtatgctgtttagaccaagatggtatttgtggttgttgcaagcttttcaagggaaagaactatgcattagagtttgggaattgtagccagattcccagcatagggaaggcaaggcagaatgttacataagatgggaaaactcagcatatggtacaggaagtattgtctag

SEQ ID NO: 135622 - DNA, 1036 bp, Homo sapiens
tttccagactcttagtgatctgtgcctctgtcgctcatttctgaagcaggaactttagtgttgctggcaatgtcagtgtcatttgtagactcactcagtaaagagatgtctctttggggctctgttatagcaccattttcttcttagaacaaatatcaagatgaatttctgatatttttcaactccatattgctaaaaagtggaataaagtcacctaagatatggatacttctgaatttggcttttctatctcttgatcatttctagctattgatttccattgttttggttcatgctcatgcaaaaacgtttgaacatatttgtttgagagtatactgtttttttctgtgtgctgtcttggatcttgataagagatttattggatctggtttgttaattggtttactggctgattgcactgaacagcatttctttgcaggggtgtcacgtggtgtgtaggtactgtgaatcctaattttgtgtatttggggatttaggatactcaggagatacatagaattatcacaaataaatagaataataattacactcagtcttattcatgcataatttactatcatgtcacaattgaattctggctgtaaaaaattttctaaaatttggataaattgctgcttttatttttatttctgatttctgtttgtctttgagaaagcatgaaagagtttcctttcctttgtaatccttgtgagctccaacctcttctctaagcaagtctgctgtgtctgtccaggtactgctcagggcccagcagtctcactcacacattcttttcctctggtacagattcagcggaggtgacgggggaacactgtatctgtattgcctgcttggtaaactatctcaggggaacagagatgtgtttctccagagagatgcatatttatagctgcttctggcttcagtagaagcatgaaacgggttttgtttcattgaacataagttcactttttcttctctctcaatctaataaagtctgtttaggaaggtccccttgttattccagcagagaatc

SEQ ID NO: 135623 - DNA, 1046 bp, Homo sapiens
acaaccagcgagtggcagagtgcatagctccagagcccatgtccttgaccaccagaccgtactgcctctgtcaaatagctgacttagtagagcactaataagtagccattaattgtacataaaaatgattttctgtggactgacactttatttgctcataaaaatgaaggaagaacttccattttgaatcaagtcctggtctatcaggaggtccacaggccattgctgtgctgaggatgttattaaggaaagcacacagctagggtaaattaagggaagaggcttttttatttctctttgggataatatgttaatttcacatattctagatattttgtatttgttgtgatttaatggtcataaaaaaagtattttttccttttcacctcagacgactcagagctgatgtttgtgtggagaagcactcattccacctccttagagaaagctgctgtgagaacaaggcaccctgactctgtagagggaggagagaaactttggcttagaaacacaatcagtggaaatgtaatgggtcatcttttgctaaatccaacccattttctgatttctttttcttgctaggggcaacaccctccactaaagagtcaagccagccggacgcattctcatctggtgggggaagcaaaccttcttatgaggccattcctgaaagctcacctccctcaggaatcacatccgcatcaaacaccaccccaggagaacctgccgcatctagcagcagacctgtggcaccttctggaactgctctttccaccacctctagtaagctggaaaccccaccgtccaagctgggagagcttctgtttccaagttctttggctggagagactctgggaagtttttcaggactgcgggttggccaagcagatgattctacaaaaccaaccaataaggcttcatccacaagcctaactagtacccagccaaccaagacgtcaggcgtgccctcagggtttaattttactgcccccccggtgttagggaagcacacggagccccctgtgacatcctctgcaaccaccacc

SEQ ID NO: 135624 - DNA, 2490 bp, Homo sapiens
cctatgtccgctggcagaagcacagaagaggccacttcatcagctttgcctgagaagccaggtgacagtgaggtctcagcatcagcagcctcacttctagaggagcaacagtcagcccagcttccccaggctcctccgcaaacttctgactctgttaaaaaagaacctgttcttgcccagcctgcagtcagcaactctggcactgcagcatctagtactagtcttgtagcactttctgcagaggctaccccagccaccacgggggtccctgatgccaggacggaggcagtaccacctgcttcctccttttctgtgcctgggcagactgctgtcacagcagctgctatctcaagtgcaggccctgtggccgtcgaaacatcaagtacccccatagcctccagcaccacgtccattgttgctcccggcccatctgcagaggcagcagcatttggtaccgtcacttctggctcatccgtctttgctcagcctcctgctgccagttctagctcagctttcaaccagctcaccaacaacacagccactgccccctctgccacgcccgtgtttgggcaagtggcagccagcaccgcaccaagtctgtttgggcagcagactggtagcacagccagcacagcagctgccacaccacaggtcagcagctcagggtttagcagcccagcttttggtaccacagccccaggggtctttggacagacaaccttcgggcaggcctcagtctttgggcagtcggcgagcagtgctgcaagtgtcttttccttcagtcagcctgggttcagttccgtgcctgccttcggtcagcctgcttcctccactcccacatccaccagtggaagtgtctttggtgccgcctcaagtaccagtagctccagttccttctcatttggacagtcttctcccaacacaggaggggggctgtttggccaaagcaacgctcctgcttttgggcagagtcctggctttggacagggaggctctgtctttggtggtacctcagctgccaccacaacagcagcaacctctgggttcagcttttgccaagcttcaggtaagaatttgtggaagctttttacttgtttccctctctgctatttgaaacattagcaacagacccctattacttttgtaattaaaggggagactcaaaacccaaaaataatctgtaggttaaagaagacagcttggagcacatgtggtctcaggaacttgtttggcctaattggctggatctgttacagcttaatgcagctccagttttgcttcttagcaaattgtccactctgcaagccaccagagtgtgtttcatggggaaaaatcaagcatctttagttgaggtcctgccaagtaatttaatgaacaataaataggaaatttcaaatttggaaggcactgtagagatcattatacccaaagctgtcaagcctcaaggagactgctctaatgtcaggatagtgccagtggaaccagcaggagagtccaagtgtcatcatagtccaccgccctgccagtgttttctgtctcctctgacaccatctttcttactgtaatggcagtcactgacatttgatttgggttcttttctattttcagtgttatgactttttgtaaaaactacagtttactgtttttgacagtgaaacctaattcttctctattgcattttccattttagcagctacttttacttctaaaagttatcaataagcaaggcaatttgaaaatctgtcctgagatttgctttctgaaagttatcttatgaaaggtaattcttcagcaatagactctaggagaaaagcaaggatcaatgatttcatggtgggcaagattactagtaactgctaattcattattcgatgataacttgaaaatggttcataatttattagaaaggaaacattttcctttcttcaacaaatgtttgttacactcctcctaaattcagctataaggacacggtgttgaaaagacagatatggttttgagacctacccaatgccctgtgaagaggccagagggctgctgaatgatgggaaatgtgctgacttggtccagaaaatgggcaaggagaaggccctatgagtcttagaggagaacgtgtaacacagtccgtatcactaccacaccatttgctctgcagtcagaacctgagaagacctcatgcacaggcatggtcatactatttcaacaaattcagaacccaggaaggaatcttctttcatttagtatctgtgcggaaaggtatctgagctgtctacttcagccctagttgaggaattgagtcttgtctaagctcacctacccaatcagtgacagaaatgagaatagaggctgggcatggcgactgacgcctgtaatcccagcaattcgggaggccgaggcaggggaatcacttgaggtcaggagtttgagaccagcctggccaacatggtaaaaccccatctctactaaaaacacaaacattgccgggcgcgg

SEQ ID NO: 135625 - DNA, 1897 bp, Homo sapiens
tttcaggctctgttctaaagtgtgttacatttcttggctcacgtaattcactctccgctgtgttgagatgggtagtttattaccaccattttacaggagaggatccatagcaccgctctgctcttgcaagtttctatgcacagtggcccctttccaaagtccatcttattctgcattctcagccacggagagatgacacttaactaaggtgaatggcccctcaaatgtagcccagttgttctttaagaaccagcttccagagaagttaagtgtctgggacctgacacagcctcgagtcagcatttgcccctgtgctagcagcatcctctgagcatgagatttgcaaacttggacagaattcagctttggtcatcatttcaacaatgaagctaatttaagcttacttctgcagcactgggaaagtcattatgaaataaaagtgcacaaatggagagaaagacagtgaaaatcacttatcatccattgctaatgagttcagccaaacgctggaggaatcagaataagtggtgtccgtaatagcttgtaaatgttttcgaactttttatttggtggatctcttgtggggttggttttcctgaccctggcattgtgtcaaacagacactgcgggcagtgtagcagataaacattaaaagttcccacctaccataaatcatgttttcagagaactgtgaacatggaatagcttgagaacttctcatagataggaagtccctgtccagagtctagcttcttttgtggtggttagagcatttgtaccagaactaatcttgctttttccatttgtgccagctgtgagcacctcctgcccacggatgcagcctgccatttcacgatgacctctcatcctatcttgcttcctgacccttttgttttttagcaatcatcctcttccagtggtagcgtgtttgggtctggaaacactggaagagggggaggtttcttcagtggccttggaggaaaacccagtcaggatgcagccaacaaaaacccattcagctcggccagtgggggctttggatccacagctacctcaagtaagttgagaagacttttcccagtcccttggtcccctaatgccattgtcattcttagggtgttatcaaagcttcagtgacaaatataaaaagaaaaaaaaatctagaaggctcatttaaaatatcttccccaaagcagtgtgatctgttttgcttttttatttttggttttttaatgagatgtcctatataatcatgaaaagatatcagagctgcagggagaggatctgtgtattgagctgctcccctcttctctcccaaggcccaaatcgctctgtttcttagtattggagtgacttgaagtgaatgcaagcagacaagcataaatgagcagcagcagagcaagccgaggatgctgggaggagagcatgcagactttcatttggatagtactctccaaattttccttaaaattcagctcctgtagggagatgtcacccaaaagttgaagcctttaatatttctcacctcttacatttttgttttattttcatctgaagctgtatctgccagtactttctttagctaattttttttttttttttttttttgagacagagtttcactcttgttgcccaggctggtgtgcaatggcgtgatctcagctcactacaacctccgcctcccaggttcaaatgattctcctgccttagcctcccaggtagctgggattacaggcacgtgctatcacgcctggctgatttttatatttttagtagagacagggtttcaccatgttgaccaggctggtctcaaacttctccgcccgcctcggcctcccaaagtgctgggattacaggtatgagccaccatgcccagccttctttagctaattttaaa

SEQ ID NO: 135626 - DNA, 2050 bp, Homo sapiens
caggtgcccgccaccaagcccggctaattttttatattttttttagtagagacggggtttcaccatgttagccaggaggtctcgatctcctgacctcatgatccgcctgccttggcctcccaaagtgctgggattacaggcgtgaaccaccacgcccaggctttttttttttttttccttttttttgaaacggagtgttgctctgtcacccaggctggagtgcagtggtgcaatctcggctcactgcaacctcccaggttcaagcaattctcccagctcagcttcccgagtagctgggattacaggcacctgccaccaagcctggctagtttttgtatttttagtagagacggggttttaccatgttggccaggctggtctcgaacccctgacctcaggtgatccgcccacctcagcctcccaaagtgctgggattacaggcgtgagccaccgtgctcggccttaaaagttatttgttgacctgtgtattcatggttggaaatgaaagaaatctgtttgtgtagatctttatcctgctgctcaggcggaagctgagattagaagttgggagcctgtcctgtttgtctcagcttctctcatttaatgtgccctacatgaagtttctctcatctgttgtgctgtgtgagatctccatgaatcatgagctagtgttctgcagtcatgacagatgtttccttaatattaaggcctgtgcagttagcaaaactttctatcctgatttgcccttctaaactcctaaatcaaaaactagtcagttttttagttcagcctgggcaacacagcaagtccccatctcaaaaaccaaacaaacaaaaacctagttattttgatgtcactgtccactccactaatacataaggaaagattattgtcaagagacacataccttttaccttgtgaaattatgtaatcagaagtttttgttctttaggtttcagtctgccaggagggatttagaatcctggatcttagaaatcaagtctagtagttttcaaaaactgtttttgccaatgaactcttaagtagcatcctgataaggaaaacaaaagtaggttcatgctgaagcaggggtcaggaactccaaaacacacagctggctggcaccacaggaccgtgaggctccatagcacatactttgaaaacatcgtccttttatggctcttcattttccattgaggaaacaagcccagaattctgaggtcacagagccagaaagtcacagatatagaactcagctagactatatgtcacatgccagacacagaatctggcacagaatagacacttaataacatgctccactgcagttagaaatttgggtttatcccagagctaaggtatcatctgcgaggttgtgttactggccaattttgttaaaagttaaatgtgtcatatccctataaacattcgtttactcatctctaatgccatggctcttgactgtcaaggagttgccttctgtcagtggctggctgcagctggtttgcacggacacatgagagccagccaagcacatcttcccagttgttcatttggtgacatcgtttggggtaacctgaaatgagccattgtggagtatttatatcatggaaatcagaaaaccctacaaaccaggactccccagcctgtcaaacattactggctgattcttctaattctggtttaaagtaaacacataactattcttgataccagataacctgttagtcttcatcttctaaatgttggctgttaactataaaccaacaatttacatgtgtgcctaagggaagtttaagtgattttgaaggagtagaggaaacacttaacattgtattattttaaaaactatatgattttatttcaatagtttttggggtactaggtgtatgattcaatagtgaaagggacaggaattgttttaactctgagggccaccaagtacagaataaaaggaaggaacagtggagaaggaagagctgggagtcgtctggggaaaggcattgtcctcaccacagtactcaggatcgtttctgcagaatcatcagtg

SEQ ID NO: 135627 - DNA, 1082 bp, Homo sapiens
taagtgctagaagccattttgcctgggttggatttgttctaactttaatttccctagtttgacaaaatttgaagttggtcttgtgtgaagagaccaatcaaagtaagccctgttttccagaagaaagcagcctgtggggcagagcccatggcctccattgctgggcagtcttgacacttgcaggagcacccagtgagcttctacaaaggagccttttcagtgggacctctcactgctcctttattttgtgcctataaaatcatgccaggaaatcctgagcctgggtgccagaatgattaaaaacttcccagcaaggtgcgtgaaaatcagagaaagtacctgttgctgtcactgtcgctccgctcccttggcttctaggcggcttgtcactcccatctttccaaacacccaactgagactttttctgtgttctgagaagcaggtaaggacatttgtctccctctgacctccctcacatcttcatctcttcagatacctctaacctatttggaaacagtggggccaagacatttggtggatttgccagctcgtcgtttggagagcagaaacccactggcactttcagctctggaggaggaagtgtggcatcccaaggctttgggttttcctctccaaacaaaacaggtactcctatgtctatttgttatggttatctttatatatgtatttgtttatgcatagatatctggaaggagacatctctagggtggttatcttaagagagtaggattggagtaaagaagttaactgtttcctccgcattatttttatatttactgagcatctgctacattcctaacatgattccaggtcttccaaaacatgtttaaaagcatagaatgcaagtaatgcaacatttttttttctttttttttttgtgagagggagtctcaatctgtcgccaggctggagtgcaatggtgcgatctcagctcacagcaacctccaactccctggttcaagcgattctcctgcctcagcctcccaagtagctgggattacaggcatgtgccaccatgcccagctaatttttgtatttttaggagagatgaggtttcacca

SEQ ID NO: 135628 - DNA, 1046 bp, Homo sapiens
ggaagatgagaggtgggcgtttgagtcgcacagaccttgttccagtcccagctctagcacccatcagctggctgaagttgggacaagtggcatattctctaagtctcagtttcctcccctgtgatgtaaggatcccaggcttattgggaagatttaagaaaactgctgtgaagcacctggcatatagtgggccctcaataaatcagaaagtttatcatcattgattattagaaaatttgtttcttctggagaagaaatttatgaaaatacggcaactgataaaatcaaacccctcctgccatcaggagagagttgcctctttaagccagagtgactgttttcttcctgtttaatttggctgtgacccaggtgtgttgtttgggggctttttctctctgtgtatatttaaccgccacccctcccctgtccagtttattttctgtatcatcatgacttcccatttttcactcaccttccaccaagaagtctaagcaatattgatacaaggtactagatagcgccctgcatgtctaggaagaaagtgtaactagatctgtgatcagtcttaaataattcaactgtaagggttttttagcacttttttttttccagtctgttatatttataacccaacagtctccattatcatggcttggaatttcactcagtgttttaacatgcggaatgttaacccaaacacgagccttagcaaaaaagtatcttctcagttgtgcagcctaccactgttaatggcaaataggcacatgagtgaatcacaaaataacagttaactgagggattcagctgacaacttttcatacccaggatttgatctttcctgattcagatggcagaagcttgtgttgtgattacataaacaataagaagtctggatttcatccctctaacaacagattgactttctgaaaggggagaaaaggcttgtcgctaggccaccattactcccgctagcacgcagttcataggccaacactcaccttaagaagtactccctttagagggtgctcccagttagagcacatttc

SEQ ID NO: 135629 - DNA, 1167 bp, Homo sapiens
attattttattagatttatgcagcagcctgcctccaaagaagaaatttggtgtgttttttcattgggaagtaattccagactgcaggaaaaaagcatttaaaaaaaaaaaaacaaacctccactgagcgagagaaagggagactctgatgagagacgtaggagccatcaggctgtaaataaataaaaagcacctggctgggcgccagcatacacgtctctgtctctgctatgacccaattcagggattctccctgagaggaggttttgagcctctgattttataatttgggtttctatgaagctggatgtcttgcctgtgtactgataagtaatatagtctgtcatcttttgtcagctaggtagggattggagtttttgagaatggtttttcactccaaacagctcagaggacctgggaggggtggaaggtgcaccgagtgggctcttggaggtctgctcacacggcttcacagtgacttcacagggtctgcaggagctctcctgagtggaccccagagccctctgctaggaatggaggggagtggtttggtttgagggcttttgttttgttgttttcattactattttcttgatagaagggcgggggggagggggggtgttgccctttactctagttcttgcatttgaattgctaacatcctcttttcccttttttcttcctattttgatttggtttctcattgctcaatgtcttctcttcctgtctcctcctttctttctccctatttctgtttgtttgcctctgttttgctcaggtggcttcggtgctgctccagtgtttggcagccctcctacttttgggggatcccctgggtttggaggggtgccagcattcggttcagccccagcctttacaagccctctgggctcgacgggaggcaaagtgttcggagagggcactgcagctgccagcgcaggaggattcgggtaagccccctggggagggcccttgggaacccacacgccagccaaaaagcactaggggcctgtactcttgctctgaaaagaaatttgaccatgaggtgaaggcccctcccttgaaatttgtgaacaactccctcaaggattcctgtacctctccagggtaagactcatttcgttcaagccaggctttgttgaattcatggtggacctcagctgtgttg

SEQ ID NO: 135630 - DNA, 1046 bp, Homo sapiens
aaaagtaaatagaatcaagatcccaagaggagctgaagataaataaatgggagcaggatgtgggggaatggtcggtaagtgagaaatgctaaaatgatagaataaagcttaaggattgttggaggtagagcaggaactgtgtactgcatagttcccaaatgccctggtgttccaatgggggatggaaactaaaacactggccaggttggatttcatactgtagtcctgccatttttcttcctagagcagagataaaagttggccctgggcgatagctcattctctctgaaaggctgctagttaggcccagcctgtcaccctggatcatgagtgtcgtgtgtattgggacttacagcagggggctgaggcttgcagatgggcaagtggtgagaggccccactgacctcagtctgtttctcactggagcgcaggtttgggagcagcagcaacaccacatccttcggcacgctcgcgagtcagaatgcccccactttcggatcactgtcccaacagacttctggttttgggacccagagtagcggattctctggttttggatcaggcacaggaggtaagctgccacaagttctcccctcacaagcaaaatgggtccctcttgccttctcccccaaagaaatgagtatgttttacctgaccagtctgtttagtattttaaaagctgactgggcacgtggttcacgcctgtaatcccagcactttgggagaccaaggcaggaggatcacttgagcccaggagtttgagactagcctgggcaacatggcaagactccattctctacaaaaaatgttaaaattcgccagacatggtggcacacacctgtggtcccagctactcgggaggctgaagcaggaggatcacttgagcgctgcagtgagctgtgattgcaccactgcactccagcctgggtgacagaatgagaccctgtctcaaaataaataaatatgtaacatactgaaagtggttgaaacatatatatatatatatatttttgagacggagtctcgctctgttgcccaggatggag

SEQ ID NO: 135631 - DNA, 2800 bp, Homo sapiens
gcggccgccgccgcctccttcccgccgggcgcggggctgcggggctgggaggccgcggggcctgggggcggcgggcccgggcgcgctcgccattgttgtggcggcgccgcgcggcctcaggctcgggcggggtccaggggccgcgcgactccctcagggctcgcccgccacccccgtacccccgaggccgggccgggctgcagaggccggaggggcgggggtcccgggcccgcagccgggtctcggggttctggggccggcgtctttgctccccgccccgcccaattgacggagcagcgcgcccgaggcgggatcctgcggggtcgggccttgggtccggggcgctgagcggcgttcgcggggccgttcctggcgcggggtgggccgggccccggcggcgctaaagttggcggctgggggagggaggcgagcggccgcccagtctcggtgtgagtgcgggaaccagagggttattttcgaaatgctgaatgctccatgctaaaaatgtttaataataaacaggatgtcgccactcggggcctgccagatggggtttttttttttttcctcctcttttgcctcccctcaacccccaggagagaaattcagccctgttgaaactgtgggcctctgaagagtggatttgccttaagaggtggatttttttcctttttcttttttcctccttctaaatatcgtgggaggtcggagcccacctttaggcaagaattggaggtgttttcagtggtgagcttgaaggaagtgggagaaggggggctggggagtgtcttttgctaaatggcttcctgggagaaatctttaaatgcctttggtttacaggactgttaaactttccctaagattttttttttctttaaggtttagtgtgcatttgatgtggctttgtacagtgtcatccagtttggtttttgtaaccaattgtgtgcggtcttagcatggtttttccgaatctcgctgcagccatttagtcatgtctatgcacagcgctgtggtgtaaggtgggactggggaggcccaggcattggggtgcagatcctgcttctttcttccgtaaacctagtgactctggggctgtctgaggcttcatctgcataaatcggggcgtgcaccctccacctggcaggtttgggcagcggtgaagggcctagcagagggcctggcacagttagtggttcctcctacggttgttggtataactgctgtcaagtcctaggacagacgtgagccccttgtggtgccacccatagagccaaactgtgcccatggatgccacaggtgctggcctaaggcatggacaatacagaaggaattcaaggcccaaacattagtgggcgcttatacagtgctgagcctctcgggaggcagggatgggaaaaagtagcatttggaggtctctagaacttagtagacccggagtgtgtggcagttggtcagtttaaggcagggttagaacagtacgagatgctcaggacaaacagacgcccaaggagtcctgccttctgaggataactgctttccttggggattggcagataatcatctgagagtgagtttctacttgtttgggcaagtgtgtctcttggagcctgcgcagctggattctggtcctcatcgggttacctttacaaagcaagtctctgaggctcagatcttgcatctgtaaaatgggaataattatgcctgccttgggtatctattagggctcttgggagcctcacttaagattcacagtgaattgttttctctccataggaaggtgatgaaatgtatgtgtttgttgattatctgtttttctggttcctttctccttccttcctcccttgccctcttcctctctccctccctccctttcccttccttttccttccttcccttccttcttttttcttttcttttcttttttttttttttttttttgagacagtctcactctgtcgcccaggctggagtgcagtgatgtgatctcagctcactgcaacctccgcctcctgggttcaagcgattctcgtgcctcagcctctggagtagctgggattacaggcatgtgccaccacacctggccaatttttgtgtttttagtagagacagggtttcaccatgttggccaggctagtctcagacatccgacttcaggtgatttgcctgccttggcctcccaaagtgctgggattacaggcctgagctaccgcgcccggtcttctttctcttaatgcttattttttcctcttctcttggttgatggaactgtgacttccccaccccaaattctatggccggctaatgttttgctatggtgactatcacccatctacctggaagcaccagaatggcttagtacagctagggagctcagccagatctcggtgtctgctgtttgagattgtgtggaaggactattgctaagaagcaggagacagactgaacccagtgttggccacaagtgaggactgagacccaggtcacctcttggctgaacatgttagcttgttggtaaatggctctgcagtggttctgcattttattggggaatttgttttggttcattttggcattcccgcaaccatcttgttggttttttggtaaaatgtggcaccccctccagacctcctagctgtggaactgagatattttagcagggtcctgtcatcctttgatttttcctcgcttcctgcctcttggcccttcctttttgtctgacttcactcgggcccagtctggctctatactgttaactggttagttaggccaggagatagtcgctgcctctcccatgagcttc

SEQ ID NO: 135632 - DNA, 1591 bp, Homo sapiens
ctcctaacctcttttgaatttcagttctctttttttatcctgaaggattattttattgtacttttgagggtttttttttttttttttttttgccttgcacaaagtactgactcatgttgctaatggctgtggctgtatgctagttatatgtctcattatcctaccccttaagattgatcatttctgtgttggtttctatttcaaaccagaataggccaggtgggtcaattcatgtatttctgaattcaataatgaggcttccctaccgtgaaatgtacatatcttgtcatgggcggacaggtactaaatagagcctatctatactagattttaaaacaatggatttctccccaaaaaacaacatttccagcagacaatgggctttgtgctccaaatcttgtaattttggttttaaataaatttcatgtaaggaggcagggctaactagactgtcttcttttcagatcataacttgatctctttttaagattatttctgggacttgtacagcctcaggaaacttgggtctgtcattgggacaaagaaatacaggcactggctgtggtgttggagatgggagcgacatgggatatggtgagctttgtttctggtgaaatagaattgtttgtcattagctttaggtttaaaaggtgccattcagactggacctcctcacctgggagctggcagacctgggccttgccattggcgatattactgtttatacctctgggtggcacgtgggaaatctcttttgtgctgggaggtaggtttgtcttagtgtcttgagccagaagttgtggttgagctttgttctcagctgtacttgttggttttctgtgtgacctgagaagcatccttcgtccgagctgaagtgcacctccgaggtgctggcagcagcactgatttgtgaagcattgcgtgcagcaggagtagctggcagaacaaagcctatctcaagttgctggcggtctttcacatcttgtacaggacttccttccgttcttacctctgcagccagttgtgtggcttccgtctggaccgtcttcctcctttccaagataaccatcagtctttttctctgtggggctgcagcagcagtatttattgcatttttaattgacttgtcaggcaatagatactccttgagcacctatcatttgccaggcattgtacaaggccctttaaatacatttttcttgtggtagggcaaggtggctcatgcctgtaatcccagtacttggggaggccaaggcaggtggattgcttgaggccaggttaagaccagcctgggcaatgtgatgaaaataaaaaaatgcctcttaaaagaaaaaattagtagggtatagtggcgcatgcctgtagttctaactacttgggaggctgaagcaggaggatcacttgagcttgggaggttgaggttgcagtgagccgtgatcatgccactgcactctagcctgggcgacagagtgagaccctgtctcaaaagaataaaaagtaggtcgggcacggtggctcacgcctgtaatccaagcactttggcaggccgaggtgggcggatcacctgaggtcaggaattcaagaccagcct

SEQ ID NO: 135633 - DNA, 1028 bp, Homo sapiens
attgtgccactgcattccagcctgggagacagagtgaaattctgtctcaaaaaaaaaaaaaaaaaaaaagtctgggcacggtggctcacacctataatcccagcattttgggaggctgaggtgggcggatcacgaggtcaggagatcgagaccatcctggctaacacgatgaaaccccgtgtctactaaaaatacaaaaaattagccgggcgtggtggcgggcgcctgtagtcccagatactcaggaggctgaggcaggagaatggcatgaacccgggaggcggagtttgcagtgagccgagatcacgacactgcactctagcctgggccacagagcgagactccatctgaaaaaaaaggaaaatactgaaaagaataaatgccaaaataaatatataaatcacttgtgacctcaccatccagagctaactgcagtaaagttgctggtgtgtttctttcctctgataatgtctgtgttttctaaattagagcaatagtatatatacattgaatacacagttgatagcttgcttttccccttttaatgttatagtgtattcctctacgttatttttataattatataattgctattatacggatatgccataatttattgactcctgtattcgtagacatttagattattgttgccctcttttccctcctataagagaaactgtagggagcatctcggcatgttaagtcttggtccacgtggctgattatctcccataagtggaatttctggggtcagaggattgcaggtttgttcttctcttctggacaggatcggttgtctccttcagtctttgtcacctccctctccagccttgagcccaaggcagtctctttcttagttttttcttttttgaggcagggtctcactttgtcgcccagtctggagtgcagtgatgtgatctcagctcaccgtaacctctgcatcctgggctcaaatgatccttctgccttagcctcccaagtagctgggatcctataggcatgcgccaccatgcctgactaagttt

SEQ ID NO: 135634 - DNA, 2065 bp, Homo sapiens
tgcttcctgggtttaagagattctcctgcctcagcctcccgagtagctgggattacaagcgcctgccaccatgcccagctaatttttgtatttttagtggagacggggtttcaccatgttggccaggctggtctcgaacccctgacttcaggtgatctgcccacctcgacttcccaaagtgctgggattacaggcgtgagccactgtgcttggtctaatttttgtattattgttattatttttgagacagagtctcgttatgtctcccaggctggagtgcaatggcacgatctcggctcactgcacctctacctcccgggttcaagcgattctcctgcctcagcctcctgaatagctgggattacaggtctggctaatttttgtatttttaggagaaacggagtttcgccatgttggccaggctggtctcgaactcctgagctcaagcgatttgcctgcctcggcttcccagagtgctggaattacagccatgtgtaatcccatggtggcaatgttgagccaccttgccctgccaaccattttactttctttctgtgaaaccgaatactcttaagtacctcatgtaagtgagatcatccagtatttgtcattttgtgtctggcttatttttagcatagtatttccaaggttcatccatgttgcagcatgtgtcagaactaacttcattcttaaggcagaataatattctcttatttgcatgtatctaccacattttatttattcattcagcgacgggcagcagcctgtagatagttttgttttcatgtattgaatggtcctttcccccagtggagtgagtaaatgcatccggaagcagaattctgttgtttcccattcatcactgtgtgccaggtgtctgagaagggggtcttataggagcccacgcagaaaccaagctcacctcagtctgggtgtggggcagtcagggaaggcattctggaaaatgtagctgactcgaaataagcacctattgaaaatagtgtgctgagccctggaacattaaaaatgtgttcctatgtggaaatcagaaatgtatgggtcccagaagagaacttgtgggtcagcctgctttccagagagtgccgaggccctttgaatggtgaacattatgcaagcattcttgtatggccagtggccagcagggaggagggcagagaatgactgtgcctccgggaagccggcgtcaacttcccgacacgcttcaggatcatctctttgtatagaaccatgggatggatcgctgcaggacctactggaaaaaggaggtcatctccaggactctttccatgggtcctttgtgtcttgcagaacttttttcggcaggtgttgtttacatatggttcagagcttaaagaacagctgtgttccaggccagggcagaaagcacaggcctgtctgggaggggcatcatcactcctgcctgcctgcccaaccgacctgtcggtggactgaatgggccaagtgttcagaagtccttgggaagaggatagtgtcctgaatcataatgtggtattttctggttttttgtttgtttgtttgtttttggtaaaatgttaattgcagaagtatacaggttattttatttatttatttatttttttttgaggtggagtcttgctctgttgcccaggccggagtgcagtggcatgatctcggctcactgcaacctccacctcccaggttcaagcaattcccctgcctcagcctcttgagtagctgggagtacaggtgcatcccgccacgcctggctaatttttttttgtattttagtagagatggggtttcgccttgttgcccaggctggtcgcaaactcctgagctcaggccatctgtccacctcagcctcccaaaatgctagaattacaggcgtgagccactgcgcctggcccatactttaaaaaaaaaaaaaaaaacaaaattaaaagccaagtgtttgaagagaaatgaaagcttttccccaatgtcccaggcagtaaccattattgataaatttgctttgtttatccttctaggctcagtgcacgtataaatatggcctcatgta

SEQ ID NO: 135635 - DNA, 1227 bp, Homo sapiens
gctctgggtgtcttgttaggtgaaggccactgtgggagctggaaggaggcgatagacacagccaggtctaaggttgattttctgtatcaagtaaaatgattgtccttgctgcctgttttcttccaactgttatacactggagcctggtgcataaaattcagagacggcctccattttaagttttctcatagccccgtctttcacagtccttggtggttttgttgctgttaatattcattgctgttggcgcttttgcagctcctgatagtggctgttgtgcatatctcacttctcgactcaacctcttggcgtcacttgccacccctcctgccccccactttggtttagttcttccaggagatcacaccattggttgaagtgactgcagaaatgaagcactggaatgcctgggtggtggtgtttcatcaggctaggctggcggggatttgtgctctggcaagaggaggtgcggtttggaattacactgctctggctcctgggggggttattgttagctggaattcagagagagctcgctgggagagttgggaatgccatgccccctcttcctggtggagagtagctctcccttgcaggcacagtgcagcaccccacactggaagccctgctttggggtcagctgccttcaagtccaggttctaccacttagaagctgggtgacctggggccagcttttaaatctttttgaatctccattctcttcctctgcaaaatgtgatagtaacaccttcataggacctgggaaaggattcagagggtcatgtgctgcagagttgatagggcacctggcacaagacagcaggctctccatagaccgcagctattaatggttcctggattcagccctccccgggggcccgggggtttggagcaggcaggcttttgtacacttggggcttgtttgttacctaggtgttggggtttctaattatgtgctcagcactgtgctacatgctaaagatttggacccgtagcgcattgccctcacctcctggagctcagtcaccttaactagcaagggcctcccatgggcaggtgcatcagggctcttctgtacatctctccacaatgaacaccactgcggatgtctgttcccacgagcaagggcgtttgatagctggcagctgccctgtgtctagtctgttgtgttgtgttcttggggagtttcaggtaaatgtcttggaaggaatgaaggtaggcatgtta

SEQ ID NO: 135636 - DNA, 1051 bp, Homo sapiens
tttaagtctcagttttcttatctgccccaaatggatacggaacctgtctcacagcattgctgcaaagattggcgtaatttctgggatgcagtgttagtgcagtgtaggaaacctagtcaacttggaacagtatatggtgttgatactatgttgctcagttcaccgagatcttaaaaacaatgtaacagttacaatacaggcgtgtcacagttacaatacagccttgctacaaacatcaagctccagaagtgtatagagtagaaagtgaaagtcattccttcttccctgctgtttctttataatatcaagagaggactgctgtcttaaccagttgtttttaactaaggggactgttttaactgtgcatatgaattctaaacctgaagtgaccactggaaggtgggaggtgtgactgtttataggtagaccttaatataagcaaagacatctcatatggctccttagtgtggtctcttcagctttttgaggggagaaaaggccattgtaattctttgcacaccctggatgaatcataatgttgtattggtaaagttcagcagtggcatagactgggtttaattaacaagtgctgcttccaaagatcccacagctttacaatttgctgttgacatggttggagggtgggggaaggggaaaggtgggcatgcccttagggtaatggggcagtgcaatacggttttttagacgcttcggggagatggtgggtgggggaggagagttgtgagtatagagttttgggtgaggtgaggagtctgtgggtaaggtgtttataacgtgtgtagtgtatttggagtgagggtgcatgctcccttttcccaccgttctgaagtcacagcttggcgtacctgggaatgcccttggcgtagtaatccctggcccttattttggatctgtcctttattcctttgttactttagaactggcttcgccggcgattgtcctgggtttcctctagtgtctgaggcttggaggagaagtcatgcacggcttctggggtccagtcctttggcctttgctggagattatttat

SEQ ID NO: 135637 - DNA, 1058 bp, Homo sapiens
gttaggttttccagctcttggggttattatttctactttcatcatgtcttgttttattgcactgttgtcagttttactttacagaatttgggatttttcttttcttttttcagacagagtcttgttctgtcacccagggtggagtgcagtggcacagtcacggcttactgcaaccccaaactcctggattcaagggagtctcccaagtagctgggatccaggcatgtgccaccacacccagctaattaatttttttttttttttctgtagagatggcgtcttgctgtattgcccagactgatctcaaattcctcacctcaagcgatcctctcacttcggactctcagagtgtggggattacaggtgtgagccactgtacctggcctgaatttttcttaaagtctaatatagtcacttttagaacatgtttgctcatctacgttgaccgtctctatcttgatgggcttgatctaccaaggtggacaggcttctgtttgttctaatgtttgtactttcattgtgggtggtcctcttggccctttaaaactaccctgctctgctgcttgctcttttgtgtctgtctcctttgattcaacattttttttgtgcgtttcatctgtatagttgtgtatgtttatttgttcttattgtaggatggtttttggttatgtggatgtaattatccatgtgacagactgagctcatttccatagttcttccaaacaatgctgccacagtgcgggtatgtgcgtgcgtgcgtgcgtgcatgcacacgctgttgggtatatacctaggtttggagttaactgggtcatgggtgagcatatggtggctgcatgggcagctgccagctctcagtgatggcaccaggtacatgagggtcatccttgctctgctgacgctgtaaagatgttgcttctttgcaaattaaccgctggattccctgtaattctagtgaaaatcccagcagcttttcttttgttttagctgtttatttcagaaattgacaaactcattctgaaatttatatgaaaatgcaaaagggccaagaataatca

SEQ ID NO: 135638 - DNA, 1052 bp, Homo sapiens
ttgctttttacattgctccaagaaaatgcaatcaatactaatttgtaatttcctggaaatggtagataatccatcctgtttgttcctccagaagcctctatcctgtttttaccaggactgttgcccctctggcccatggtgcggctaccatcttgggctttttttttttttggagatggagtctctgctgtgtcgcccagactggagtgtagtggcctgatcttggctcactgcaacctctacctcccgggttcaagtgatcttctgcctcagcctcccaagtagctgggactacaggtgcctgccaccacgcccaactgatttttgtatttttagtagagatggggtttcaccatattggccaggctggtcttgaactattgacctcaagtgatccacccgccttggcctcccaaagtgctgggattacaagcatgagccaccgtgcctggctgctatctcgggcttctgttggtcgtcattctgggacttgtttttgtccctccacacgtggtccttatttcctggatcctatttgtattggttggataatttggacataatgacagcaactgtcttttttgtttgtttttttgagtcggagtttcactctgttgcccacgccggagtacagtggcacaatctcggttcactgtaacctctgcctcacaggtttaagcgattctcctgttttcagcctcctgagtagctgggactacaggtgtgcgccatcacgcccagctaatttttgtatttttagtagagacgggggttttaccatgttggtcaggctggtcttgaactccggacctcaggtgatccacccgccttggcctcccaaagtggtgggattttcaggcctggccaacagcaactatcttaataagaacgttcattgactcaagtaattgcaagtccagaagtagacaggtttgggattatttgggtgcacccattctgaaccagtcattagaaccggagctgggcttctcttaggccaggcccccgctcccctggggctggggctgggtcagcctccctcaggctccatc

SEQ ID NO: 135639 - DNA, 2026 bp, Homo sapiens
ggaaacttgtgtgtagagagagagctactgcctgcaaagggggttcatcctctatagggagtgtttgccccagagagtgtttacctagaggttaggtgggagtttagattcagcgttggttattatttgggggatgatagaaccaatcttggttttttttacccccctgtgtttttttctgtgagtctctgtgaggacatagggtttaggaaggtggggaggaatgctttctcctgggctgaaggaagtcacttgctgccagagacaggccagcctgatttgtcttcttcttttgtgcccagattccagcttgctccaggtgacatcattcctacaggggaaaggctttgggtgtaaacaatggcactgccgggcaagccagggacagctgcagctggctgggacgtggccttcctcctcggtgtgtgtgtgctcagctcagcctttctgccatcctgagttttctttaaaattatcttcatagttttaaaaaacaaatagcaaatctgtttggaattaatacacagtgttttatgacccttactgctgaattcttttgaaatgggaagtcaaaacacagtagaacacgggcgaggcagatgattagtattgcagcgtgacagcacctggaatttaagtggctcatgctggtgaagagagatccagggatctaatctgggagctggtttagggatgatacttttctgtaattttttttaagatttacagtttttctgtatcaagcgtatatttcttttgttactaaaaatgtgatggagaaataaatgagcagtactgggattatccacttccataaggccatctattgtaacatcagagggtgactgcagtaaatagctacgtttattgccccaaagtgggaagccttgaaactggggcagtttagtgtggtttaaattagtcacagtagagtgtttatctcaagagggttttctgagaatctccctgcatctctgtcttcctgagaattaaaggggtccactagcagatcctaaacacctgggagtttgtcctcatggtgtttgaaggtctgctctctgtaccagcacccttaaactgtgacacttaaactgtgacacaccaacgtggggacgggtccccagtgcacaggaggaggtagaagcacaggtgcctggtctacccagcaccacccagagcagccctgctggggaacggaggcttccctggctgcataggagtctggagagatgagcactgtcaaaagctgataattgggtgggctggagagagaacaagagcagaaccacggtgaggtgacagccgccattggtcgagtgcctgctgaggacaagtgctgggtcaagtgcgggggtctttgttctcttgtttattccttacagcagacctgggaggtgggagattaacatggtatgttcatcttaatccacgaggaaatagacctcaagtcacagtgtggagtggaggcgagatgcaaacccagtgtttcagatttgagactgccgggggtggtgtggggagaaggctgggtggcggcgtggggccagcatgttgggccgggggggtctggacttgaccctggcgcggtggggggtgatgtggaaggtgtgtgagcaggtgctccccgtggtctgtgttgctgtgtgagccgtggctctggtggaggggacccagctgaccatgtggttccggcaaggggcttgcaactaagtgctggagaaccccccagttctccactgggggtggggagtgcttcttgtgtcctcaccatacgcctcaatgcttctttgtttttcctttcctcttattttaaatttgttgcttcctatatatgctgtctccttggggtgcgtggtcttctggggatggctcatgtctcccataaggaacactgggttaccaggaaccccactttccccactctgtggtttcctcaaaccttattttcaggctgtttattcttggagagtttgtgcagtgttctgcagggacctcacccatttgggcttctgcaggtagaatgcct

SEQ ID NO: 135640 - DNA, 2361 bp, Homo sapiens
gtaggtgaggtcgccttacttacgttaaaggtttttttgccagacattgattggtgtgttggggaaagatagacttctttcatcttgtccctggatttcgtggtgatggttcttggctgagacttaacaagtaaactgtccagtggccacgtccttttctggcccacattgttacttcctgaagcgtttatccagcctgctatcaatttccatgcctgtggaatcatgatttttggtatgttttgtctagcagtgggatctttccgttcgttctataaagagacattccacctttctctctcactgcccccagcctcacggccagggcacgttgcagcactcattgtgtccccctgaggtcgggccttgggcctttgtcactattgtgagtggaggaaagagccatgaaatctctaggtgcccacatgtgaagagtgaagtgactggatttgccttgggtgagaatctggctgttggtggcatggcgtaaataaaatgcttgtttttgaagctgtccaggatcatcatctgtacagttggccagaaagcagctgttgagcctgggctgacttatatcagaacccattgtgccgcctttcgtgtctgcaccggtactcccactgggaaagcagattccaggtcgtggggcattcagtctgcagcctggtggcgtccagtgcagcctgggctccaagcctggccctgcactcggcagccttgtgaccttgggtgcgttacttttcttttctttctttcttttttttatttttttattttattttaagatgggtgtctcactctgttcccaggctggagtgcagtggcatgatcttggctcactgcaacctctgcctcccgggttcaagcgattctcctgcctcagcctcccgaatagctgggattacaggcgcgcgccaccatgcccagctaaattttgtatttttagtagagacggggtttcaccatgttggccagcatggtctcgatctcttgaccttgtgatccacccaccttggcctcccaaagcactgggattacaggcgtgagtcacccgcatcctgccgggtgtgttacttttctatcctgattgactgaaccttaatgtccttctctgtcaaacaggcagtagtatcttccagaaagtgctgttatgaaggggagtagagcacatgagggcttagcagggtgcctggcccttgaagtgctggtggccactgatctcccctgaatgcggagccgtagtggttcctggtgaatgacaggtcatcccagtgccctggtcaggcatctgacactggctggcactcaagtgtggagtgaaattaatcctgttacccggaaatggcttttgataaattaattacagggcagagatgttccctctggtggacagatagcaggaacctgttggacaggcgggcactgtctggagaggcggggcttggatgtgaagttgccgttgttggcgaatctttctggttgtttttgttccagcacagcctgggagcacttctttagattatgtgccaaaatatgcaacctggattctttttcaatgttcttttctccattgatttgttcccaaatctatcttcatatgggttttaggcccctttttcatctgcctaatggcaatattttcttttaggctggcaagtttcagaatgctctagctccccgtggcagtgtctctgagtggcttctgtgggaaaggagggcttacagcaagggggcacataggctggacttctttccagcaggcatcattgggttgtgtctgcttcatatgtcatactgaggttccaagtcagattctgttggagagaaaacgaattctgttgcctacagaagggagagaaggtgaggtaaagccgtggccataagccaggtttgacttatgctaacctgcgaggacttggtgcgtctatgccgggtctagtcccacagacctaggggtgagtcagagctggatggaaatgcctcagacccgctggagagctgttctcttgcctcagccggcttcctgcttcacacttggatgctcaccggtgctttctccctgcctccggataggctagtttagcttggggtatgcatgtgtgttgatggatggaaactcggcaggtatttgaagcctggtaaagccctgctaacagcgccctggcctgatgtttgtgaaaagcagctggcaagcagtggggccagatgcttgtgggcggggccagcctcgcactcagccggtcagtggagatccctgcaacgggaggaaatccgaatgattctggtttattttggagttgtgtccagtgaaagatctcctgactgccgtaaagcaggtgtgtatacacaaactttgtaaag

SEQ ID NO: 135641 - DNA, 1089 bp, Homo sapiens
tgaacagccgtggtgtaagtgggttgtgtacctcccctattctgctagccttattttcagtgttatacatggatgtgttaaagtactgagcatttatttttccatcttgagctgtccttgacttggagagggctctgttgaagtttacatgtcagtgtggttggtgtgcagtagactccagccaactcagagtgagaggaattaacagcaggtgggggttgggggggtactccacagatcgcctcggggtgtctacataaatgccctgtaaatgtgaatgaacagcctgtgggtggtgagagcagttttctaaggacagtccaaagccatcttcagatcttcaaggagatccatgattcgtgaaggattcactcctctggatcagaggttctgctgtagtgacactcttttttttttttctctctctttttttttttttcttctctatttcaaaggcagatcgggagcggtgccgagaaaaatttccttactagatgacatttcatcgcaatgtccgatcgtttggggcaaattaccaagggcaaggatgggaaaagcaagtactcgactctcagcctgtttgataagtataaaggaaaatcagtagacgcgattagatcctcaggtaaggcccagggttgaaggccagttcctcaaactttctccgagtgacatatcccagaaacccagagtccctcacctggttagacagatgtggtccgtgcacaccaggcttctgggtgtgcatgtagaatcactctctacttcctacttgaggtatgatttcagagccttgagcatcctgactctttctgtagtggaattttctccatctattaccttattgaagctggggagatatatctatagatatctatagatagatagatagatatctatctatagatatctataggtgtgtgtgtatgtgtgtgtgtgtgtgtgtgtgtgtgtgtgtgtgtatatatatgttttggagacagagtctcactctgtcacccaggctggagttcagtggcatgatctcagctcattgcaacctccaccttctgggctcaagcgagtctcttgcctcagcctcccgagtag

SEQ ID NO: 135642 - DNA, 1084 bp, Homo sapiens
gggaaggggatgtgttcagggagggacagggccttgctgaggctggcaggcagaaatctgctgctggggtttgcctgttaaggaatgtgaacaaagctgtctggcggcagcgccctcctggcctgcatctctggtggcctccctgctgatgtaggaaaccagacggtaaaagggacccagatctcagcctgctgaccccagcatccttttcttacaagtctgtgctagaaatgaccatggtagcttttgtaaaattgttgcctgtatttacttcagacaggatgtagagagtgagctagtttagttattcagctagatgattataaagtagtaatcaaaatagggccttagaagttatttttaaaacatttctaagagtttgcttagggatcatattgatggacagtatagcatgacttttgaaatctaccagccctaagtggtttccagctagaccacttattagcttgatggaacctggagaattgtttgacttctgagcctcagtgtcccccccttgaaataggaatgatacctggctttgctggtggttacacggtatccatgaggcattgatgggctagcataggtcaagtgcttagcctaaacctggcacagaggaggggcagatattggctgctgtcatcattccattcaaatggtactcattccattcacaccatgagctctggaacgaaatggatattgcacattttaatggaaggactgaaatcctctgcaccaccaaaagttctagagaggacaaagcattactccctcctgttatccagcctttactctgcctttgcggctccagtgagggctagttgtgctggagcacgtccgccagggaagaggtgaggatggagtgttggtgagggcatagacccccgtgtagttctctgctgccccaggccacatcctcccaccaaggtatcaggtggcaagtgggcccacaacgtggggactcagtgcttagttttggagaacacaaaagtgcgactacttggaagcttctcttttaggtagaaggagatgtaagaacccgatcagtagccttctgtttgtaataatcacgaatggt

SEQ ID NO: 135643 - DNA, 1062 bp, Homo sapiens
aatccttcatttgcattgtttacagtgagcttttagtttttgcagacagaaggctctacaagaaggcagaaaagtttcatttttaaaaaagaaaggccaggcaaggtggctcaagcctgtagtcccacctactcagaaggccgagatgagaggattgcttgaggccgggaagcagaggttgcattgagccaagtttaccccactacactccagcctgggtgatagagtgagaccccctgtctcaaaaaaaagaaaaagaaaaagtcagaggactgtcttgtgctaattttaaatgtcagtgactagaacttaagcatggtttgttttcttattagtttttgccagcataagaatctactggggaaagtcgtatttttattggccagaggaggtctgcttcctgtgagcagctgaacagctgtggctcctgagaacgcagagacctggccagcgcactctgtgcggtgcctgaccccactgccctgcctttgtctagttccagtgcgacggcctctcagccgccggagtcgctgccgcagccgggtttgcagaaatctgtctccaatttgcagaaaccgacacagtcaatcagtcaggaggtaggtgctgggaccccatcccaactgtttcctgggcatggtagcccctaaatctctttgttgctgggggatggaaggagttgctactgagaagtgtggttgtgcatgacctgtctattccagaggcacacccgatgagtgactttagaaaaccgtcatgggaaaccgtcaaggtcagtggttaagaaatttaatctgcagcttttagaaaaagacctcagatacagactaggatacaggcacctactttggttcctcttgatttaccgtgaggcagggtcactcaggctggactgcagactagttcagggtgaagctccatggaagcgtcacgtgagctccatggaagcttgggtcacaggaagacaaaaagtggcaggtcacaaaaaggttcactggccaggtgagtttgaaaaacaaaacgaagcgagctcctttactgcggtacttctcagtgcctttc

SEQ ID NO: 135644 - DNA, 1064 bp, Homo sapiens
tgggaaggggcatgatgctgtcagcagcagtctcccttgccaccctcagcaccctcgtggcatctgccagcacagagcacccttgtgacaagactcccttcaaaagcccacttccaggcaacacggctttcaaggtgtggagctgggaagcagacgactgttgactccatctcacttcctccatgtctaccccgtcttcttgacaggtttaaggggctcaagccgactgttatccttctctcccgaggaatttccgacgctgaaagcagctggagggcaggacaaggctggcaaagaaaagggcgtcttagatctgtcgtatgggccaggaccaagcctccgccctcagagtaagtgactgcagcctctgggcactcgatggagtaacagaacttcctcctctcatctctctgcactcctaaaagggtgctgatgccactggggtctccggttcgagctggaaacgtggctctttgactcgccacgtgatctgtgcatccattggacttgctgcctaggccattggattgggccttgtgccttttttgtctcttgggttgggccaggcctgtcccctccccctctgtcatccggttgttaattttgctgtgcctggtggctgtggcaaggatggacaaaggaccaattaacttaggtccccggttcaagagcttgttttctaaagctcccaatcctagctacatctagtcggaatcactggggagtttgtgaatgagtctgatttccagtcctcccctcccccagcccaattaggacctgtatttttaacccattcctctggggattgttacataaatcagcctggtactggtctctactggcccctcatcttaggtcgggccagggaagtggcaggattgtgtagcactggctggaaatttctccttggaagccgagggtggctggaggttaaggtggtgtttaggaatgtgattttccacgtgttctactcagggattttgaagtggctcatgtagtccaggggtcttgatcaggtcttaaattgtgaggccttttgtttgcttgccttgatgtatccccaa

SEQ ID NO: 135645 - DNA, 1388 bp, Homo sapiens
aggtccccaagtctacttactggcagcaggaatgaaatgggggagatggtggtaggattaattaggaaaccccatgactttcctgtttctttttcccattttccactttataaaacacattctgatttaagtggaaattgcagtttcagccattaccagcaaatcctgttcattgatgttatgtttcagatgtgttcgccgaagtcatcagaaaaccagggtacagtggaacgaggctcttttccccttcctcagctccgccttgaacctcgagttccttttagacagttccagatgaatgaccaagacgggtgagtccattgcattacagtcacgtgtgtagagatgagtgcggtggtgattctggtcaagatgaggggctgatgaatagaagtgctgtgtctcctggagaccacagagaacttaaccagctcagcgtggcagggtgtgtggggtggtggctgggatttggagctggatgacagattgagtcatgatttcaagtgcctggtagagttgaagttctggcacgtgtgtgttgctgctgccctaggccttagcaaccagcatgtaaaactgcaggacaaggcagaacttctttctgggatgtactcgtttgctcattatatatttcttttaaaggaactgatagaaataattaaatcaaacatgaacctttgcagtgtggaatttatttttggaaaggtatttgattttgcttccgtctgtatactggacatgattccatcatcttttcttttatcagaaaagaaaacaggctgggattgtctcgcccactccgcccactaaggcagctggtggagcgggcaccacggcccaccattatcaatgcggaaaacctgaagggccttgacgatctggacgccgatgccgatgatggctgggcaggtgggcagagaagcacgggtggtttagacgggcaggaccaaagtccatatgtacttaccagggatggaaaccccctggcaccaccgtgtgttttcccttggcaagatagggatgaagagccggacagggaagcagacctgatgccctccttcctcatttactccctgactagaggttccttcctggccaagccattagcttcttttggtctttagtcttgatcttagagttttgttgttaactttttaaaaattattgatgatgcaaaatttaaacaaaaaagaaaatagctcccaaccactgatcactcaggttcaataagtaccaatgttctgccattcggtttttgtttgttttaatttaatttttttccaagagacagggtctcagctactctgggcatactgcctgtgggttagccctactctgcaaggagcagtaaaaaatataaagataaaaaggaaggctgggcacggtgg

SEQ ID NO: 135646 - DNA, 1050 bp, Homo sapiens
acctctccgatggtgcctgggtaccactgaccttttctttttctttttttttttttcgagatggagtctcgctctgtcgcccaggctggagtgcagtggcatgatctcggctcactgcaacctctgcctcctgcgttcaagcgattctcctgcctcagcctcctgagtagctagtattacaggcacacgccaccatgcccgactaatttttgtatttttagtagagacggggtttcaccatgttggtcaggctggtctcaaactcctgacctcatgatccgcccacctcagcctcgcaaagtactgggattacaggcatgagccaccatgttggtcagtctggtctcaaactcctgtcctcatgatccgcccacctcagcctcgcaaagtactgggattacaggcatgagccaccacgtccggccaccactgactttttcattctttctcattcttcctgggccctcctgctgttgtaggcctccatgaagaagtggactattctgagaaactgaagttcagtgatgatgaagaggaggaagaagttgtgaaggacggcaggccaaagtggtaaggacccgttcctgccctatcagcatgagtgcatccctgcttagtgttgttgtgtacccagagcatttcccagtttccatagcaacctggaatggcagacagatgctgtttccactttgttttgagggtgacagctattgatgatggctgtgaaggaggggagccagggtttgcctgcaggtgtgactgtgtcctgtgcatagtcggcctcttcaccactgcatcagtgtgtccccaggtgtgttatgcagaccacgtcttcatggattgcttgtggctgtcgtgcccaaaaaggctgctgtggccaagcaagtttgggaaacctccctgggttcaacttcttttttttttttttttttttttttgagacaggctctcactctgtcacccaggctggagtgcggtggcatgatgtcagctcactaaaacctccatctcctgggctcagcgattctcccaccccagcttcccaaatag

SEQ ID NO: 135647 - DNA, 1063 bp, Homo sapiens
cctgggctcaagtgatccactgtgcctggcctcaacttctttctttactccagattcctcggagccttgaacatgctaaagtacactgggggccgggcacggcggctcgtgctgttaattccagcactttgggaggccgaggcaggtggatctcttgaggtcaggagtttgagaccagcctgcccaagatggtgaaaccccgtctctactaaaagtacaaaaattaaccaggtgtggtggcgtgtgcttgtaatcccagctacttgggtggctgaggcaggagaattgcttgaacccaggaggcagaggttgcagtgagccaagattgtgccactgtacttcagcctgggcgacagagcaaaactctgtctcaaaggaaaaagaaaaaaaaaattaagtgcactggggaggtgaagaagcagaatgcatgccagctttcctgaatttatttgaccatgttaattttgtctctttttttttttttttttttggatcatttccttggactagtttagttttgtttaatttcctttagaaaatactgcattgtactctcatccctctagtttttataatgttagtagcacttttaaaataataccccacaatggccaggcacggtggctcacgcctgtaatcctagcactttgggaggccaaggcgggcggatcacgaggtcaggagatcgagaccatcctggctaacacagtgaaaccccgtctctactaaaaatacaaaaaactagctgggcatggtggtaggtgcctgtagtcccagctactcgggaggctgaggcaggagaatggcatgaacccgggaggcggagcttgcagtgagccgagatcacgccacatgccactgcactccagcccgggcaacagagcgagactccacctcaaaaaaaaaaaataccccacaattagttgggcgtggtgtgcacctgtagtcctagctactcaggaggctgaggtgggaggactactggaatccagaaggtcgaggctgcagtgagccatgattgcaccactgcactccagcctgagtgacagagtaaggccctgtc

SEQ ID NO: 135648 - DNA, 1184 bp, Homo sapiens
ctggggttcaagcacttctcccacctcagcctctagtagctgagattacaggtgcctgctaccacacctggctaatttttgtatttttagtagagacttggtttcaccatgttggcctggctgatctggaactcctgacctcaaatgatcagcccgcctcagcctcccaaagtgctaggattacaggcgtgagccactacgcccaggccctcttataatgttttaagaaagtttacgaatttgtgttgcgctgcatccagagcccagggccatcctgggccacatgtggttggacaagcttgctttaaagtgaggatcatgaggacttttttttgcatcggtgaaatagtgtgacatatcgtgcctggggctctgtttaatgagagtgacttgataaatggtggggctgaaccgtggaattcacatggaagtagtgggagtggtggtccattctaatgaagaaaatgatttggacagctgacttgggaattctcaaggcctctgaccagtgagatcagaaatgcttggcctgagtgcaaaaacttaacatcaaatgtggtttgtcctaggaacagttgggaccctaggaggcagcggcagttgtcaatgagctctgcagacagtgcggacgctaagcggactcgagaggaagggaaggactgggctgaagcagtgggtgcgtcccgtgtggtccgaaaggcgccagaccctcagccaccgcccaggaagcttcatggctgggcaccaggccctgactaccaggtaccaagggcccttggctgtcctgtgtatttgtacttcattgagttgggtggctgggtttctgagaagtcctaagtgggcatttctttttcatttttatatttcttcttttgttaaaatgttttttcatagagacagggtctcactatgttgcccaggcttgtctcaaactccagctcaagtgatgccaaagtgctaggattacaggtgtgagccaccatgcccggctgttcttactttttttaagataaggtcttgctctatccttcacctcccaccctcaagcgatcctcccacctcagcctcctgagtagctgggactacctgtgtgctgccacacctggctcatttcattcattttttgtagagacgaggtcttactatgttgcccaggctagtcttgagctcgtgggctcaaggga

SEQ ID NO: 135649 - DNA, 1602 bp, Homo sapiens
tgagaccaggagttcaagaccatcctggccaacacagtgaaaccctatctccaaaaaaaaaaaaaaaaaaaaaagccaaagaaataattaaaacagcttcaaagtgatagaaaagttggaagtacattacaaacaatattttttctaaactgattgaacagtaagttgacaacctgatgagactctttacactgtggtacttgtttcctaccaagatggggacattccacccaggtaactacagttacttccaggaaattagccttgataattgattgtcgtttaatctgcaggccccattcagcttttaccagttgtcccattaatgtccttactcgaaataatccagttcagaatcacacacctctagccttctttatctggatcagttcctcagcctttccttcactttcatgactttgaggctttggaagattacaagccagtggaatgcccctcaaattgggtttatcatcatctttcttgtgaagaagtccacagtttccatccttggcagggatcttcaggcatgacctgacttttctcatttcatcccaccaaggcaaccacgacttcatcctgtccccctctggctacgtgcactttggtctcttgattaatggggtgcctgccaggtttcatgctgtagagttactcttttccctatttgtagttgataagaattttgttgggagaaactttgagactgaacatctcgtttttgatcaagcttttagtttactcatttatttacatcagtgggtgtaatctactctcacctggttggccattgggtgttccttcaggccagtgcgtgtcctttttccctgttctccatcctttttggagcccttccttcatctttcccggatgcatgacctgtcttgtcctgggtccgccctttctccatgaagtcctagttcctcttagtgaaggatgatatttagaaaccagtgtctgagacccagcaggctccttgctgctggggtgtcactgcttccgggcctcctcagcggacagttgcggggaatgtatgtaggtatatgtgtgtgcacaaatacacactttcatatttgtattatttctgtacctgtccatattggaaactgtgttctcattgatacctccagttccacagactttgttccacttcctcccagtgcatgtttgcacctcctttctgtgacagggagaatctatctctcatcgtccctcgtatttatactcacttggtcagtctccccatgtatgaccaatctcatttctgctgccacactctctcccttgcacatatgctctccttgcccactcagatgtcattgtccccactcctggatgccctgaatgtccctgctgggccaactctgcctatgaatgtccccctcatctagcttgggctttggccccacacctctacctgcatgccctcctccccttgcctgggctctaaccatttggagtgcagtcagccgccaggactccctggcaccaggctcctggcttgcattgccacacctagtgactctgggactggactgttgaggagtgggagggctggggaagggggagtcatgactttgaatacacttggtaaagcctgct

SEQ ID NO: 135650 - DNA, 2738 bp, Homo sapiens
catctcagctctgccactgaccgtgtgaccctggacgtcatctaacctcttgacccttagtgtcctagtctgtaaggtgacaacaggtgaagcctcctcacatgtgttgtggggagtccctgagcttgtgtacgtgatgcgtttggcacagggccagggttcagggacgtgactgttctagcagtggagcgtacgggccaacaggaagaagtacttgtttgtaaacacttggttggctgagcttctgtgagctcactgtgtcatttctctgctggtatattctctaggctccccagaattccctgcccaagagacccccaccacattcccagaagaggcacccacagtgtccccagcagtggcacagagcaacagcagtgaggaagaggccagagaggctgggtcccctgcacaggagttcaagtatcagaagtcccttcctccccgattccagcgccagcagcagcaacaacagcaggtaaacagatgagatggtaaaagactgtgataaacaggcctgagtgccgagcagatgtttcccctcctcgtccccatgccccacctccaacttagaaaaaggccagaatatcccttatgtgcccccaagaccagtggggacgtcaggagttgtacctcaaaacttgtgaccttggtagatcagcccctggccattatttatttctctgagtggtggaggtccctgggaatgaatacagtctttgtggtttattgagcttgttttctaatattgttaaggaacctattcagtgctgtttgcagtgagctccatttttctagtgtgcaggctggttgttttatttcagagcagtgcaccttggacgttccttagaggacagtgtttcccaccctggggtcctcccaaggtgtaagggaggcctgtgagctgtttgaagagctgcccaagagaggcacgtcacctttgggttacagatgtaggtttgcaggtttcaagttggacagctcccttcctgatgttgctgctgaactagttgtgcatggccttggaggggtcagttatgcccctctcacccatatttcttcatgtgtaaaccaggaagaatgaatacctgcctttcagcatggcagagtgtttcatgccatatcgcctataaactattttattggtgtcaccgttattggctttttataaactttatttttatttttttataaattttaaaagggacctactttttgtcctaaagatcatgtggataatggttgtaattccacccatctctcctagtcctgatagtcttgaagcactcatcagcaatcgtgcctactagagtagtaataagtaagggaacacagtagtcaatactaaggaatagtgcattttggtgggacactgagatgatacatagacattacttagtgcacaccaaacagcaaggtgtgcagtaaattattactaatattaattgaaaatatttcaaaacgtgtgtgccatggagaaacaaaccaaggacttaaggcttttcccagtatctcacttaattacctttaaacttctcacctcagcctcttctctcctctgggcacctgggagccttccagggaccgcctttaatgtgattttagagcatgggagtgtaggcgagcactgcacagttactcatgttcttggggtatagaattactgatgggggagagctctggaattacttgcgccaaacctagcagcgacaattgctctaggtaactccttggggtgcggaggaagtgatgggtaagtccttccttaagaatagaaggaattgccgggcgtggtggctcacgcctgtaatcccagcactttgggaggcagacagatcacctgaggtcaggagtttgagaccagcctgaccaatatggtgaaaccccatctctactaaaaatacaaaaattagccaggcgtggtgccgcacacctgtaatccgagctactcaggaggctgaggtaggagaatcgcttgcacccaggaggtggaggttgcagtgagccgtggtcgcaccactgccttccagcctgggtgacagagcgagactccatctcaaaaaataaaataaaataaaataaataatagaaggaagtctgaaagcaccagggcagcctgtctggtcatattccctggagacctagggtgtagacaggaggtggagctgggagatggaggcccacagccttctctgtggactgggagagtgaatgactcaagtctcttgattgatgagctatatttattgagtgctcttaataggcactgggagtgccaacagaactgtccagggaatcagctcaggatgtgctgtagactgccaggcaggttggccgcctttttgtttgcggaatggaagggtgtgtgctggaggccgtttgggtgtcctcagagtgtgacgcagcagtgagtcctgcctcaaggccaattcagggttcctttaggaattagcgcccgaggtcactgatgggatagagcagggtctgaaatgaaccctcctgagtcaggcaagggccttgattttgaatagttactgataatttgtttacccatttgtgcaaatgttctgtatcctgagtgtggtgctgtgggcaagggtgcacagggagtctcttagggttcagtgagggttaccagcagtaaaatccatcagctgctgtgagtgcaacaaaggagcactggccattctgtgggagcagaggaccggggacctggtctcgtctgggggttacgacag

SEQ ID NO: 135651 - DNA, 1417 bp, Homo sapiens
gacaaggagagaagtggccaatgtccagacattctgtgggaggctgctgttcggttccaggagtgtctgatctaggtgaaaacctagcctgtctcgtgtagcacaggcacagatgagcctccattgtgataatggcatggctgtccaccagccttggacagggacctgagcttgcaagctgtaacacactgggggcttccccttgagcagctgcccatccctcccctccttggtcttctgttctaggtgggctttctgtgctgccagctggaaagctggaagggcgtgtgttgggtggcatctctgtccctggccgcaccagcctgaccaagtctctctctctctgtgggcaggagcagctgtacaagatgcagcactggcagccggtgtaccccccgccgtcccacccccagcgcaccttttacccacaccacccccagatgttgggcttcgatcccaggtggatgatgatgccttcctacatggacccacgtatcacgcccactcggaccccggtggacttctacccctccgccctgcatccctcaggtaagcactgtggtctgacggtccatacctgtatcacccaggatagcgtggtggtcaagggtgtcctctcgagttaaacagatacacctggattttggtctggctctttgtcaagtacacaactggtctgagtttcaaagtagtcacttgcaaagtgtaggtacaataatagttctgtcataaagatttgttgggaaagtcatgaagatcgtgtatcataaattgctttaattaattttagatttctgctatgtcgttttgtccttcttctcattcttaatgttctttgtgctgtctcttttttctttgattagtctttcccaaggtttgtctagtgcctttttaaaatcagtatttgggcttcttcattcctctaacttatttgggttttattttaataatgcctgctttttcttttcttatttcctttaaaatattatcatatacttagtttattaatttttggcttttaagattctctttgcagtactaatttctaatgtagttgctctgtggtcagataatatggtctgtgtgatacagaccaggggtcagcaaacttctactaatgaccagatagtaagtcttttaggccttgatcagctagtcagttttggtgttgtaggacaaaaacagccataaacaatagtaattgagtgaacatggttgtttttccataaaacgttacttgtaaaaactggcagcaggctgagttttgtttaatggctgtagtttgctgaccaactcctgacttaggttgcttgacatttgttgggttttctctgtagcctcttccatggcaattcttttttaacattctacatttgcctgaaaagactgtattctctggttggagatagtccattaa

SEQ ID NO: 135652 - DNA, 1149 bp, Homo sapiens
aaagtaagcatgtgagtctgaattcctgggagggggacaattgtttccctgccctggtccaggccagacagacccgccagtctgttcctggtagtaaagcgcatgtgtctatctaatgtgccttttgaggatgtggcccttttgggtctttgttttaaacaatgtctcagttgtatctccctgccctgtatagaaaggcttcatcccctgtcctgagtgttaaggaccaagcctatatctgacaaatgtgcttttcttgcccccttccttggacaggtctttgaaccaggcagggtgcatgtgtgtgtgccttcagaggtcctcaggtcaggaaagattaagagccctatgatgtgtaggtgggtggggtgctgtatccacatgaaagtcagggtaactgttaacttctttgggcctttggttgaccctgagattggagcagggctttctaaatgagatgatgtagatcagtctttgccttcttcaggactgatgaagcccatgatgccccaggagtccctcaatgggacaggctgtcgctctgaggatcagaactgtgtgcccccactccaagaaagaaaagtgacccccatcgactcaccccctgtgtggagcccagagggctacatggcactgcagagcaagggctacccgctcccgcacccgaagtcgagtgacaccttggctatggacatgcgtgtcaggtgagatgaagcctggtcctgctgccttgccactgaaggaggactccaggtcctaattgagagggccctgggatgagctaccatcctaggagacactgcccacgggagacgtgctccttgaagggactcctggttcctctggggaaggagagtgtgaggaggattgcttgaatgctttgtccaagaggctcttttcagatggtgagacgtaaggtgaaggagaagtcccggggtcctcaaatcctgggcacagggcaggcgggtgggggcttcacaaggcaggtggggtccagagcatgggtcttggctcatttctgtggaagtaaacagagttagccctgccacccccatagccccagactcttcacggcctcccaggctccagcttgctcttgctctttgacccggaggattgcctggctcctctgtctccagggggcacacc

SEQ ID NO: 135653 - DNA, 1214 bp, Homo sapiens
gaggactgccccagagccaagccccgacggagagttgccagtgagacccatagcgagggctcagagtatgaagaacttcccaagcgccgccggcagaggggctccgagaacgggaatgaaggctcgctcctggagagggaggagagcaccttgaagaagggcgactgcagagattcttggcggtccaacaaggggtgctctgaggaccacagcggtctagatgccaagagccgaggccctcgggcctttgggcgagccctccctccccggctgagcaattgcgggtatggacggagaaccttcgtctccaaagagtcaccccactggcagagcaaaagtccaggcagctcttggcaggaatatggcccttccgacacatgcggatcccggcgacctacagacagagactatgtcccagattcctacagacaccctgacgcatttggtggccggggctttgaggacagccgcgcggaggacaagagatccttcttccaagatgaacacgtggcagattctgaaaatgcagagaaccggcccttcaggagaaggcgccccccacgccaagataagccccctcgattccggcgcctccggcaagagcgggagtccctgggcctgtggggacccgaggaggagccccacctgctggcaggtcagtggccaggcaggcccaaactgtgttctggggacaagagtggcactgtgggccgcaggtcccctgagctctcctaccagaactcctccgatcacgccaatgaggagtgggagacggcctccgaaagcagcgacttcagcgagcggcgggagcggcgggaaggccctgggtccgagcccgactcccaggtggatggtggcctgtcgggggctagtttgggtgagaagaaggagctggccaagaggagcttctccagtcagagacccgtggttgacagacagagccgaaagctggagccgggagggtttggggagaagcccgttaggccaggtggtggtgacacctcccctcgctatgagagccaacagaatgggacgcctttgaaagtgaaaaggtaaaaccagacaccatctgggccctttttgttgttgtgttctgttctcagcagcactgagttcacgcatgcatgccgatgccgccgtgtgtcggggctgggggcctgcccccaggccgtctgtgcgcgtctccattgcctgcccccacattgcctgtctgc

SEQ ID NO: 135654 - DNA, 1706 bp, Homo sapiens
gcatctaatccagctttccaggcgccagaggctgacccttggcttcacctcagttttctgccccaagggccctccggcagggcagtcctggagaggagcagaaatgctggcgtctccattctgagcatattccccttgtctctctcccccctacactctgaacatagcatgtgggagagccctggggagccactttccccaggagcaggcagagccggtgggggcagccttacacgtatgtttgcacacggacatggatgcactgtggccagcctgccgctcctccccacccgaggagtcagctagaggaagtgggcctagatcagggtgccgggcttgtgtgcaggctgtgtgcacgtgcggtgttttccctccttccccagctctggttaacaagatcctctttcccttacagatccccagacgaggccttgcctggaggtcttagtggctgcagcagtgggagtggccactccccctatgccctggagcgggcagcccatgccagtgctgaccttcccgaagcctccagtaaaaaggcagagaaggaggccaagttggctgctccgagggcaggtgaacagggagaggccatgaaacagtttgacctgaactatggaagtaagtcatcctcatatcttcaggggaaagaactcaggcagaaccaggggccatgcagtcctcgggcctcccgagtttgcccttgcactgagtaccttagctttcggaacagctcggccaggccctgggctgggttctggggctgtagaggtgagcagagtaggtaggattcccaccgagtgttgctcacagcccgttgaatccccgtgacaccctgcagcttccgggctttaaagagaggaagcctggggcccagagacgttcggtggtgtgtccgaggtcacacacagctgtaggagcagagctggggtttaagctctttgcgtgttctctcagttgtgcccttgggcctctttggtttggggtaacaatgtgttagatcagaggcggcctgagaaaagtgcggaagtcctgtccaggtttctgtcgagcctgatgctagatctcaggcgcctgttgaattgggttgttcttgtctcctggtgagtggaaagactgttccttctcgtgaaatcttggttcaggtgccatcattgaaaattgcgggtccagccccggggaggagagtgaggtgggttctatggtgggcgaaggcttcatcgaagtcctgaccaagaagcagcgccgcctgctggaggaagagagaagaaagaaggagcaggccgtgcaggtgaggggcggagggtgggggggcatggggctggagggcaggctggcagatgcccaggaaacccagagccagagggtaagggagttctcggtcaagctcaaggtggcagagaggaagaaaggagtatttagcaagcacacattgtctccccgttcctgctattaccaaggcccttctatcaatgtaggaataggtggtggcatcactgttatgcagtggaagaaaccgagtcttgaagagggtgacttctctagggtgataacagtggaaacttgtccaaggcaagatgcagacctccgtcacctcccagcttctccttcctccccactcctcattcctgagtggaatgagatttgtctccctcaagtcaagtggatcgtgaacgctatactaaaatggagtcagggctggacct

SEQ ID NO: 135655 - DNA, 1109 bp, Homo sapiens
gtgagatgggtttggcagcctcggtctggggcccatagaagatcctgtggtcacgagctctatcggggttggtgtgtttggccacacgtaagttgtcaggcatcctcagcagggcaggatcaagatcaggaccagacttggcaagggacaggcagctggggtagaaaagtctctgtgccacatgcagttttactctctggataatcgagttgggagtttgaggctataacccattttgtgctctgcacagcagggttttaagagcagccagggagatagtggcgttgacttgagtgccgagtctcgggagtcgtctgcgacctcctcgcagcgcagctccccatatgggactctgaagccagaggagatgagcgggcccggcctggcggaacccaaggccgacagccacaaggagcaggctccaaagccatctgagcagaaggtaacctggacgttccagtcacagtggccagggcctgggtggaaggggccatcgtctcatcatcttcctcaattcctgggacagtagaagctagagagtgtggtcattccagtctgtgtgtctccacctctctgcttttttatcaaggattcagaacaaggctctggacagagcaaggagcacagaccaggacccatcggcaacgagcgttctctgaaaaacagaaagggctcggagggggccgagcggctgcaaggggctgtcgtcccgcctgttaacggggtggagattcacgtggactccgtgctgcctgtgccacccattgaatttggagtcagtccaaaagtgaggctttgatttgttttcttgcttgctttttttactttttattttggtacttggagaggctgggggctcagatgggattgtctcctagaaggaatagaaggatgggagccaagcagtcttccagcggctagagtgttggtgtggagtcctgcacatggccagtgctctgttgagttgctttaaagattgcttcactgacaccagacaggccagtgatcttccctgtttctgtcaggccacccaagggacagggagaaagaagtgaggctggcgtcctgtctcctgtgccgtggggaaaatctggccatctcgctcatat

SEQ ID NO: 135656 - DNA, 3295 bp, Homo sapiens
tctccatttattatcaagaaaaacggattaacagccccgaatgtcacctcctggccttgtcttaagtagcatgtagaagtagcaacttgtttttaggcccagtggtcgtagctcccatgtgctgcaggtaatgtgcacgtcctgcttccccacgctgggaaacagaactgggggataacagcgaggcactcctgcctactggtgacaggagcgagcaaaggcttgactttgagtcagacctgggtcatgtgctggagccgtgtcgcctcggctggtgagcagctcttgccgagccacagtgtcctctcctctcttacatgaaactccgtggggtggccacacccgtgaggccaggtcttacctggaaagggctttgtatcaacagagccctcagtcactggcagctacttttgtcctgattgctgccatccttatcgtgtgccagtgtccccaaggggaagcgtgggggttttgagggcccagctgccagtctcagtgatgtaattccaatagatccttctgaccctccactgtggactcaatagcagggagatgaagaggacagtgactgagagaccaaggcagccctggttaaagtagaatgccccttcgagtgtctggggtagttggtgagtgggaggtgggaagggtaggccagagcccacctgcctcctccctcctcctaggtctgacgctgcaccctccctacgttccctgaggtgcgtgccaggcgtgttgtgagcaggcgtgtgcttccggcacacagggaacctagcagcctctgtacacacgccctcgtccccactgagtcccctgggtagagcagacctgtagactgtttccctcagggacattgagaagtagtgaggcttgatcctcttctacgtcccttttgccgctctgtttccaggcagccacctcccgcccctgtacctggatggccatgtgtttgcaagtcagccccggctggttcctcaaacgatacctcagcagcagagttaccaacaggtgacagcagctagccaggtggcctggctgggggtggtggggaggagccagtgcagggcggaattggcttgctcatctatttctcattgtctgtctggttttccatccccctcacatgtggtgaccagcacctggcccgccacggcagccaggaggcatttgttaagcgaataatcgagacagggaagaggagtggagttggctgctccagactctgcttagttttcctttctcaaagttctccctcctgtgtcctagccggggaattagctaaaatggaattttctttggtgatcaggtatccttctgatgaagagaagaaaggcctaaactcccaggcatggatgcattagaaagaggtagtcttagaaatgagcaggcgttggttatttatgcaggactggcatactttctgtgctgccaaggggtgatttttggaagtctcccctctaatgctggtgctgggcctttgggatggtctagccgcccctcagacccatgtgcctccacagccacgacagtggacttccaggcagaatctgctccaagtgcaggcttgctgatggaggatgtggcctctgctgacctctttttaaaaacatgttcttaactgctgtattgtttggttaccaagattttggttcttgcataactgggtcagactgcatgtatctttctttttgtgcattgttaaattcagcgttatgtttttggaactcacctctgttgacgtatgtgctaggatccatttttgttgctgtgtagaattccagggtagggatatgctgtggtttggggttgctaccagtttttcattataggctttatcccaatagcaagggaagcccaggaatgacatgctggcatttgaattttgggcagtgttccagcagccatgtggagaggggcaggggaggtgggaggggaagaaccacctggatgggccttgcggttacctccccgaccccgttttcccgttcacaggccgccgctgcccagcagatcccgatctcccttcacacatctctgcaggcacaagctcagcttggactgaggggtgggcttcctgtgtcccagtcccaggagatcttcagctccttgcagcccttcaggtgagctcatgtaccagcttgcggagctggcagctcacagccagggccttggccctgtgtgcagccttcgtcctgcagctgtttggtgcttgtctgctttggggccagtggggcggggaggggtgggagtttgctctgaatcactcttcagtccgttgttaactgtgctctaggagaggcctggggcgagctgatatgtggtgggccgtgttttgcttttccatgtcatcttgcctcctttccttgctccttcctcctcctctccccttgactccctgtctcctccccaccgcgggcttctccgtcagtgtggctgccagtcattgtggctgatgtcctgtgcctcgtacagcctggatgtcttcacttgtttaatccagcagcatcagcgccatctaggagcttgttctcaggccccatcctggaccctctgagtcgcgctctgggggtggggccggggatctgtggtttagcaagctctccggggatctctgaagggtgggaccagatccgcagctggactcatccacctgatcccgaccatctgtctggcttttgcagatctcaggtgtacatgcaccccagcctgtcaccgcccagcaccatgatcctctctgggggcacagccttgaagcctccatactcggcgttcccaggcatgcagcccttggagatggtgaagccgcagtctggctcaccctaccagcccatgagcgggaaccaagccctggtctacgagggccagctcagccaggctgctggcctgggtgcctcccagatgttggactcccagctcccacaggtcaggaattcagtcactctacccaaagccctaggcttctttccttcacgaccttgccttttcttttcacccgcctctcagtgtgtgctggcctatcgtgctgttggttggtagccaccgtgcccattcctcagcgtgcaggaaatcagcctcttctgagtagccccatcacctttttttttttttggacagagtctcgctctgttgcctaggctggagtgcagtggcatgatctcggctcactacaacctctgtctcccacattcaggcgatgctcctgcctcagcctcctgagtagctgggactacaagtgtgtgccactgtgcctggctaatttttgtattagtagagatggggtttcaccatgttggcc

SEQ ID NO: 135657 - DNA, 2454 bp, Homo sapiens
ttgtcatcctcccccttggcctggcttcttcctccccatcagcagatctgccgagccacatggcctttgcatttcatccaagctgtggctcccagtcaacccccaccctcctagcagcttttcagacttgcatcttgcccctcgctgcctcccacccatgacctccctttctgtgtcacccaggaaacaggagcagtgacagtctccaagcccctgtggccacatccctgcctaggtgctgcctgtgcccctggggggccctgccccagcacatctccctctctttcatgcatcagatatcccttcccgtcagtacacagacgagctgcagtgctgaccccgtaatcccgccccccacacccctcgaaccactttcttcacccagtttccaggccgtcgctcctggctttcctgctgcctcaggcctcctcctcagtctcctttgctgtcccctctccttcccagtctgtaatggtcagcatgcccgtgggccctgctttgggtgtgtttcaagagtcatggctctaaattccttcatcttctcctcactcccaaatggacatctttagctcagatctgtccctggaattgaatctcaaatccaatggactttccagcatgtctgctatggtgtcttatggcatctcaagactcatcatattcaaaactcgattttcctcccggtccttctgcttgtccagtccacatcctccttggctccctgctccccctcacctcacccccttacccttcagcaggcctgtcagctctggctttaaaaggattcagaatccagctgtgtctcatcccctccacacccctgcatgctgtccagctcctgtagggactcctacctggcctccctgcaagtcagatcataccccaagtcagcactctataaatggcagcatcttcccatcattttcatcctgcaccattttggtgctccaaggaggagcatggtgttttgcggctctggccaccacaagtctcagtgatgtaattccaatagatccttctgaccctccactgtggactcaatagcagggagatgaagaggacagtgactgagagaccaaaagtggcccagcccccctaccccatcctgttcccctgtccttacagtctctgggcccacatccccacctcgcatatcttgttctagttagttaggccctgcagctaccctgttctcctgtcagcatgcttcaaaggacccccacagtctggaatccagcccagtcttgtttttaccaccacttgatgcaaaacagtaagagtcttgaacgtgtgtgctgtacaaaggaatgcagagatatacgtccgatgcagctttcatcttttgggacttggcttcgccattacttctgactttcctcactcgtcctctccttgcccaccccgccccgtgtgcacccataaatctggtgtgcacccacagatcctatgccgctctgcatcccgagtgtcctgcagctgtgtccagtgtgtgacacactatcctggcagtgtgcaggcccatgttggacagggccctgccgcttccttggcaccttgtatgctttcagtaagcacttgctggacaaaggcagaaagggctgaagatagacgcagcccttagcagagatgtggatgagacacacttaacgctgttagttcccatgcctgcagccagcttagtcttgcccgttttctcaccacctactctattccagcaagaagacgtgcctctgccatcgaaggtgtgaaatcctgggcgatctctcctgtgctgcagtagaaattagagcatgtcctgctttatgcaggctttgctttagttcttctgaagtgtatgaatctgaagtgcatgtgcggtcgctctttggtgcgtttggggtttctccatagcatcattccccctcctgactgtcattgtcgcccagcagctgaccatgccactgcctcggtacggctccgggcagcagccactgatcctgccccagtctattcagctgccacctgggcagagcctctccgttggggccccccgaaggattcctccgcccgggtcccagccgccagtcctgaacaccagcagagaggtaaggggaccccatctgcctctgaccctagggagggggccttgtgtcaccaactttttctagcaagctaagtacccctgtgtggtagaaagagccagtggcgtgggactgccagggcagaaaggaaggtgaccatgtgtggggccatcacagaggcaggtcctggggactctgaacatgtcgagggctgagggccaggaatcagcattcctccccagctccccaggaggccctgctatggacggccatgtttcattggctctcccacttcactttaaaaagaacaaaatattgtgatggttcttgcttctaagaagaagccctcttgagtctggcttagagggaaagggcttgcagatttctctagaac

SEQ ID NO: 135658 - DNA, 2062 bp, Homo sapiens
ctggacagcaccgaccatggagcggaactggaaggaggaaggcggctgcaggtctcagcagacgctgtcccgctgctgccacaggcagattccagcagcctctggctacagagccttcctcaaaaagcaaaacccagagacagagcctcacgggacaagagtcgcctgtgtctatgtagttgtaggaatgaatggcagcagattattctttggagcatatttagaaagtggaagccttaaactagtagctttgtttctatggtgttttaggggggttggggaaattgctataattgtataaagcagtgtttgccaaagtgttctggaaatagagctgctgagatgtgcgctgcaaaaacaagggttccctggtcaggtccttgggggagtgctgtccccagggtggcctgctggggagggtactcaccacacaggctgagcgggcctaggttgagagtcctgttgaactctgcacacggcacttaggctttttgaccgcagactttttttttttccacgtagcacctaattaacatccctgggaactaactagtggtcagtggaacacatttagaagcatgttgtacattttggttcccccatccccttttctgaaaagtgaagactagaacaatactcggcacagttctggctcagcgtcaggcttctaggccttttgtctggggcactgcatcgtgttggtccagaccctgagacggccagtgtcgctttctgcacagcaggacagccatgcccatctgtacagggcctcagcctccctctcttgcggtgcgtctccttgagctctgtcctggaggtgccagggtggtcagtgacagccaccccctcacccttctgcgttctgggctgtcttaggtctgtggttgttttccatccaagagatccacggaccgtcccgagtgagcgcctctggccgcaggcccttccttccttgtgcctcctccatgtgctaggctttgactccatttctgtggtgacacgttgtgtattctcaacccctgcctttggttttttcaggcctagctctgctagccccagtgggaagccctctggatcagcagttaacatgggctctgtgcagggacactacgtgcaacaggtagaagatggctttccagacccttcagccctggacacttaggcccgtctccaagcgccaaaagagaagggactgtccaacctatctgagcgccccctgtctaaagacagccatgccctagcggttagagcacagaaccgggagctgggccgcccgcgtccctcctggcgaaggcatttctcctcttgacgggcgtctggatccttccttgtcctgcagagaagggaggatgctgattcctctgaggaggtggtgctggaaggtggaccagccctggcaggtcggggctgaggcgccctgggagactcggttaggtttgggggtcggctttaggagccggggtgcgcgcgctggttctagtcagtggtgtgtctcatctttgtcttggctgggtgggagcacaggtgaaattaagttttcccattttataatgaaaaggacatcgcagtgtcttttcctgcacgcactattctcttctctattctctaaaacgtgctggggctcagagcttaagcccctcagacgtgggtttttaatcagtcactgtgcctggctggtagagatgggaagtgattgctctcattggttcccctaggggtcatgaaagttgtgtggaatgagcttctaaagctttcttccagagttcagacctggtggggggcagatgcgctggctgctctgtgacttccccaccccactccccgtgtagagccacagaccaggggagccctgactaggaatggggccccagggaaaggttacagagtgggaatggtgggggggttggctgaatcgcggccagagatctgtgggggccaagtctgcctagggccccagcagacagtcgggggctccgagacgtgcagggggcacttggatctacttgaaggggccttttttgcctgtggggcaggaggtgcactgatttgaaaaggttcttcc

SEQ ID NO: 135659 - DNA, 5169 bp, Homo sapiens
cgaatcactgcactcagggcttatggggagggagcagagacggcactcgcgccactttccttactaggaggggggtttctaagtctggtccttcaaccaagggactgacaacttaggggagctttccctgcaactcaggagcaggaagggagtggtgggaactatgtatccaaacacgtttcagcgtcagggtcactttgtttttcccattcatctgtccaaaggcaaaacaacgagtggatgagaaacccagcctgggagccgtgaagctgcaggaggccccctcggctgcctcccagatgaagcgaaccggagcgatcaagcctcgggctgtcaaagtggaggagagtaaggcctgacagtgcctggctgccacctcgcctctccctactgaggacggtgccgccatgcggcctcgacacagccgacactcgggagcctcaccagatccaccgtccaaatgcgtggcccagactgagagacctccctcctctccactcccgaaagctccgttgtcaaccagcttgcacccgtggatatatggcattgacccgcttgctttgatacgaaacaaaaaagcagacgactccttcatcccatctgctcctaccgtgactgtggagtgacgcctcctgtgcagtgcagatttgccctccctgcctcctccctgtcctgccgcgcagccagggcgccttctcagcagtgcttccggcccagccgcccatccctaggcacagtgatttggcagcagggtcattttactttgaggctttttgttttaaaatgtagccaaggtttttacaaaggggaaaggaaaagaaaacaaaaacgcaagctccatgtgtatagctgaacttttatatgtttcttgccagcccctccgctcccttccatctctagcctctgtcctgtttagtttgatacgtcactgcagtaccttaagaggtgactcttaagaatgcatcccctcctgattcctcagctggttcacccttgaggttatttgcaaaaagaaaaggaggttcttgagggcaccgattgcgagcattctggtgcctggctccccgcctgggaagcgatggggtgctcagagcagcaggcaggttgggggagggggggggtcatagttgggttccagctcctggcttgatgagcccagggcgcttacaggcagcccatgaagttgatgacagttttagcatgagaatcacacagggtccctgtcctgggctcctctaaagccagtggatgtgctgggcaccagagacaaatcatggagatggctgctggtggctcccaggttggcccagatggggtgagctgacataccacaggcccatcccaggccccgtgggctctgcttctggggctccataccctgccctgcaggggtgctgtgtttttcacacatttctttccctgaagccttctgtaacctgtcattttccttccttcctcttccggagcctgctgctttctctggacctgtctccacctcccacacagctcatcgtgaacaccacttggtgatggagggagtggacccgtgtgtggtccccaagtgaggccactgggagtttgtccttttcctcctttgcttcactcccagcagcagacccaggttgtcaggacaggagggcctgagctaagcagtaggcatcagtctcgtttgtcttcagacggcgggggcaggtccagggtgaggctgggtggagggctgaccaaggtccaaagggcctgcgcagcctccgggagggcagcttctccagccagaggcttgtgtgagccatcgtgtgctgggcttgtttttaagtaagaaacaaggaaatcactccagattctgtcattccaaggaaagggaaggggacagttcaggtttctcagctgttcttaggggtcactgagcgtctacctcctcctccagaggaggctggctcagaacacctagaggagggggccggggatgcaccccccaccagaggctgccttcagcgtctcacgggtgcaggacagcgctcaggcttgggctctaagctctgtgtctagtgtagaacatggggaaggagcatcttaggaactgctgaagtaacttcttactgctctcacaattctaaggaagcgggagaacggcctcctaccaacagcgcccaccccagagctgcctgggaaagggcagttttactgaaaggtgctttactgttcacctgcatctttcagcagctcccctcctgccctcacctggtcttttccctctttatcccaagcctttatgcttgagtcccttccccaggggctgcccacccgacagttccaggcattccctacctgagcttcttgtctgcttttccttctcccactgcaagcggctgcttgtggggcctgggatgagccctctctgtccccaccggccctccttgccaagccattcctgggtgagttcaggcctgcgggagccacacattcatctccacctggacacttgagccgcatggccagacccctcccacctgatgcggtggtgcgtgtgatttgtcaaaagaaagccttctggatgctgttaagatgtacccttcaggtgaacctggtatcagacccacagtacttgctgtttgagaaaaaataaaaacaaaaaggtcacctgttctccagcccttttctcttacctggtatttccttcctttctcctcccccaccccaaataaaaaaacaaaaaacactagaatttatttatatgtattgatgttgtaggtctaggtgaaaaaaaaagaagtaaatgtttcactgctctatttatatataatgtctgaattaattctgtgcaggaaaggccaggaaattgcatgtgaagttcggtgcagtcaccacctgtgtgtgacctgagctgcagtctcttcgctgagatgcaggttttaaatgagacttggggggctgagggcaggcctcaggcctcccagcgccccaacccctccttggtctaatgaaatgcagttcttagtgcagagatgttttaaggtgcaatatatctcttcctttcccgtggttttagagccaagctcaaggtagtaggacgtagggtcttattttgttttcaaacccccatcctcagagcgcagatacatgcagaggcttctgccaggataccacggggccttagtgggaacaggtggagaccagcacttccctttcctgctgctgaggtagggattggggggtcagaacccactcacttttgcctgttaaagttgccctcctgacgctggcagctctgccttggtcactggggatgcggctcgttgctcagccaccagtggccttgcggtattgtccaccatccactagagtgggatgaagtccagagtgtgggtatacatctcagatgcccatctacccactggggacttcaatgccagctgcatttggtttggttttcttaactgttggcttctccccacagcgttttttgtttttttttaaacattcatattgttttcaaacttggaattcatagacactctggctctaggttccttaagggggaaaacaaaagatgactttatttcacattcaagaaaatcagttcagttccaaagctgtggtccttccagccacttctagggacactggggaaccttgttaaacgttgacatcagtgctctccagccgtgctgtcaccctcctatcttctggatctgccttcgcgatggtcagtgacagcttctggaagctgagcacacacaggtgcacagccatgctgtggtctggcctgctacggcagcatggcagctctggtggagccttctcccttgccatttggttcccctgtgccaagtagctgcaggctgcccctcaaatcttcatttgtcccttttcacttcctgcagaacaagcctgggttagagggtctgctggaaatggcctttgaagaccaaggataccaggatgtgtgcactctgtcgtgttctgtgatgaatgggaaacgtaggcttccagaaagccagctctcttctgaaatgtgacggacctaagcaggaagtcatccaggacaggagtggctcagtgttggggatggacgctgtcgcccagccatgctccaccagggccaccaatgtgtagttggctggtggtcttcgggcatgtgagacctgctcttcactgtttccaccccacttggtggcctccaggatggtagtggcaccctcagagccccatcttcagcatgttctgaagcctcagagtggaaattcctgctaaggctctgtgtggacgcctttctcccgtgatctaaaggggacactgtactcaagcttttgacctcatgccttgtgtagtaaaaaaggatttgggggttttgtttggttcctgagagggttgtgttttgtttttgtttccttttgtttatgttttggcctttcctctttgtctttccatgtagaccagatatttgaaagggcagacgatggctagaggtgtaatgtgcagcttgtttatacggtattttgggaaacttaccttggatgggaaatcgaatcgtggattcaccaggccggtgctggcacactcaccctcgccctttccctccggttcagtacctattgtttctcctttcaaatatgtgattgtactagctctttccatatgaaagaattctccttatttaaataaaaaaagtttaaaaagataaagctgaacgtgctttctcaggttgtacatccctcgtttcttggtcatttgaccagagagacctacagatcaaagaattctaattttacagagttcacacggaaattaggagtggcacggctgaaatgccttaacagaagctgtgtgggtagagaagggattgaaacccgtggctaagaagcatcttccaaatgcggcagcatcaagcactccaccctcttcccacggatggcatctggttgtgcacagtgcctgcctgtggccccgtcacttgccgtgagaaacgagctggtcagaggaggtaagcatttgatgtggcgtgttgtgttgtcacttctagcggtgcttttgcaggaagtggaggaggattatgctgtgctttggggtggggagggagcaagccaggcctggggtagcgaagggtaaaaggtaagaatgggctgaggcagcagttctcggttttgccattgcctcactgacctggggaaa

SEQ ID NO: 135660 - DNA, 1075 bp, Homo sapiens
cactgggggcagatgcatccttgaggagagatgaggaggccccgaggctcggccaggttggggtccctgggctgtaagcagctgagatggcacccaggagctgcccagggtcaggtagctgtggccgcactgtgggcttctggtcgtcggggagggaggggagaaaccctggcgttccttagcagtgttctcgcgcccaagacgtgctcggcaggttttgtggaatgagttgttgaaaggagtgaatgtccagtcctgagatcccctgaattcccacccgagttcactgctagtgcccctcaccccacatgtctacctgaaccaaggctccaggaacttcggtctttctcagcagcccggctgtgctgtggttctcctcgtgtgtccgggagccgggtggctggggatcccttctgtagcctctcgtgagccctcatggaccacggctcctcccttcttttctagggcgtctgcctgagcccgcttttctacaagatgtggggatttttgaagcgccctgtagtggtgacggctgacatcaacttgagccttgtggccctgactgggatggggttactgagccggctgtggcgactcacctacccgcgggctgtggtgtaagctaaatgactccattcccagggtgaatctagaattgtactttgtgacaggaggcgcccttactgaatagcataaatgggagagtgaaatcctggcttcttggtgataggtgtttttggcagtgagaggagagaccagtctgtccccaggacagccccagcagagtacaccttttaggtcttgccttctgagtctgtaacaggtgaaatttggcccattaaaggggtgcagtagaggaaaatctggttgccagccttaagtaacagttttaaagtctggacggcagaggattaatggatttggaagtaagtcttcactgttgagagcactttttagaatgtgtttttgtcataatgggaagtgattgctgttattattgaagggctctttattaactgattaatgtgtgtatgtgtgtgtgtgtgtgtgtgtgtgtgtgtgtgtgtgtttttga

SEQ ID NO: 135661 - DNA, 1064 bp, Homo sapiens
gtcctcctccatctccttatgttttcctgtctcatgttaactccatttctgtcatgtctttgcagcatcaagtacatgggtgtgttcacgtacgtgctcgtgctgggtgttgcagctgtccatgcctggcacctgcttggagaccagactttgtccaatgtaggtgctgatgtccagtgctgcatgaggccggcctgtatggggcagatgcagatgtcacagggggtacttggtgaaaagactccaatcctcaatgttttagaagcaggcaggcctgggcagcctcgcctcttggcctctgcaggtgcctctgtatgggaggccagagtttctgtcactaactttttctaagctcacaatgtctagaggtgggtacgcttttccacgcagtggaacatgacttttctttgaatctctggcaggtctgtgtgttctgtcacttgctcgcccgagcagtggctttgctggtcatcccggtcgtcctgtacttactgttcttctacgtccacttgattctagtcttccgctctgggccccacgaccaaatcatgtccagtgccttccaggccagcttagaggtaagtaagcagtgggcatcgtggccactggagaaggaagatgatagtggacccagagttttcttacaaacacatcaagtgaacattagcacttgaatcaaaacatgaagaatccacatccatatttctttttttggtgggggggatggagtcttactctgtcacccaaactccgcctcctggcttcaagcgattctcctacctcagcctcccaagtagctggtattacaagcacctgcaaccacacccagctaatttttttgttttgttggtagagatggggtttcaccatgttggtcagtctggtctggaactcctgacctcaagtgatccgcctgcctcggcctctcaaagtgctgggattataggcgtgagccaccgcgcctggcagctgggagcattttaaagtcaagtcttacaaaccctgggcagtttcacccgccttaaggaccacactcaactgtgaccttcattcctatgaacctc

SEQ ID NO: 135662 - DNA, 1009 bp, Homo sapiens
ccgtcagtaatgaacactccctcacacggagcacttcctcacccggagcactccctaacacagagcacttcctaacagaacacttcatcacacggagcacttcctctaacacggagcacttcctctaacacaggacacttcctcacacggaacacttcctcacacggagcacttcctgtaacaggacacttcctcacacggagcacttcctctaacatggagcacttcctgtaacacaggacacttcctcacacggagcacttcctctaacacaggacacttcctcacacggagcacttcctcacagggagcactttctctaacacaggacacttcctcacatggagcacttcctcacatggagcacttcctcacagggagcacttcctcacacggaacacttcctctaacacaggacacttcctctcacactcacacggagcacttcctctaacacaggacacttcctcacacggagcacttcctcacacggagcacttcctctaacacaggacacttcctcacacggagcacttcctcacatggagcacttcctcacagggagcacttcctcacacggaacacttcctctaacacaggacactctcacactcacacggagcacttcctctaacacaggacacttcctcacacagagcacttcctcacacggagcacttcctcacacggaacacttcctcacacggaacacttcctcacacggaacacctcctcacacggaacacttcctcacacggagcacttcctcacacggaacacctcctcacacggagcacttcctcacacggagcacttcctctaacagaacacttcctcacacggagcacttcctcacagggagcactccatcacacggagcacttgctcacacggagcacttcctgacatggaatgtttgaaactgccgttgagaataatcatttttcctttttttcagtttacccagttgaggttggatatttagaataattctgattcagatgtaaag

SEQ ID NO: 135663 - DNA, 1028 bp, Homo sapiens
ctcagtgaacacaggcctctgatgcaggaaaccaccaggttccccagttccaccaaggaagacgcatcggttccctgtgaaaacatctgtgactttatgtacgaataaaacttatgtaactttacatctgaatcagaattattctaaatatccaacctcaactgggtaaactgaaaaaaaggaaaaatgattattctcaacggcagtttcaaacattccatgtcaggaagtgctccgtgtgagcaagtgctccgtgtgatggagtgctccctgtgaggaagtgctccgtgtgaggaagtgttctgttagaggaagtgctccgtgtgaggaagtgctccgtgtgaggaggtgttccgtgtgaggaagtgctccgtgtgaggaagtgttccgtgtgaggaggtgttccgtgtgaggaagtgttccgtgtgaggaagtgttccgtgtgaggaagtgctccgtgtgaggaagtgctctgtgtgaggaagtgtcctgtgttagaggaagtgctccgtgtgagtgtgagagtgtcctgtgttagaggaagtgttccgtgtgaggaagtgctccctgtgaggaagtgctccatgtgaggaagtgctccgtgtgaggaagtgtcctgtgttagaggaagtgctccgtgtgaggaagtgctccgtgtgaggaagtgtcctgtgttagaggaagtgctccgtgtgagtgtgagaggaagtgtcctgtgttagaggaagtgttccgtgtgaggaagtgctccctgtgaggaagtgctccatgtgaggaagtgctccatgtgaggaagtgtcctgtgttagagaaagtgctccctgtgaggaagtgctccgtgtgaggaagtgtcctgtgttagaggaagtgctccgtgtgaggaagtgtcctgtgttacaggaagtgctccatgttagaggaagtgctccgtgtgaggaagtgtcctgttacaggaagtgctccgtgtgaggaagtgttccgtgtgaggaagtgtcctgtgttagaggaagtgctccgtgttagaggaa

SEQ ID NO: 135664 - DNA, 1042 bp, Homo sapiens
ccaacccctccgtgaattgcagcctcagtgggtggggacttgggggactgagtgagagagcttgcatggcctggctggccttctcactcactctgttgtccagaggctgggccagctccctcaccactgtggctctgcccccacagtacaatggcccgatggctggcgtgccaggccctgccacggtggagcacaggcccctgccaaaggactacatgatggagtcagtgctggtgaccctcttctgctgtctgctcaccggtctcatcgccatcgtctactcccacgaggtaggtgcgggggcggccctgggcacagcctctcctagcacgcagccactggcgccccagtgggtccacagagcccctcttccagcaacacggtctctggtgtctctccctctggaggggggtgggaattgggaagtcagagcccagttgtttgtgggatccttgctcctcctgtctctgcccccaactattcaaaatgtgctgtggaatgtttggccaaaacaattcacggtaaagctgtgaatgactgataagacccaatgtgctgcccattccagtggaggcttgtgttttaaagggggtacaatctgctcattcattcctatgctcatctcatctatccatccaccccatctctccatctctgtagctacccatctattcacccacccatttatccatccacccacccatccaccatctctctctttttttttgatacagagtcttgctctgttgccaggctggagtgcaatggcgtgatctcggctcactgcaacctccaccctctgggttcaagtgattctcctgcctcagcctcccgaatagctgggattacagacgcccaccaccatgcccagctaattttttgtatttttagtagagatgaggtttcgccatgttggccaggctggtcttgaactcctgacctcaggtgatccacttgcctcagcctcccaaagtgctgggattacagacgtgagccactgtgcctggcccatccaccatctctctagcctccatccatccat

SEQ ID NO: 135665 - DNA, 2907 bp, Homo sapiens
gacttgagagcatgcccaccaggctccatgccaggcctagcctggccctgggcctggaccccgtgacagcacagctcgtcctcccattttacacaccagaagctggtgcccaccttgctgtgagaagggcctgacaaaccctggcctgcctgactctgaggcaccagagctcccccagggcgggccctggcatgcgttgttgggggcagtgggatcacctggggccccctccctgtgagcagcccagcctcagggccctgtttgtgctccatgtgctggtggcaccgtctctgagcactggtgtcccctctgtcacattggtcaacggtagcccctgcagcatccgtttgctgcgaggctgtggggatggtccccgcggcaccttccaggagggtggcgccatcgggccatccagcccacacaggtgctcactgactgctccccatcccctgcaccaggcactatgacatgcggaggaacgacgacattataaacttcttcaatgacttcagtgaccacctggctgaggaggccctatgggaactgtctctgaaaattaaacccaggaacataacaaggagaaaaacagaccgggaagagaagacctaggagcagacgccgggatccaggagaatgctcgaggggcgcagagggcagctcccagaccggagaggaccttggacctgttaggcgcatggcaggagtcccggcctcggagccatgaggctggccagccctcagcggggccgggcgggagctggagcctgccagccgcttcctgcctccttcctctgtgggagcagacccgtgggcctcagggcagccagcaggcaggtcttgttgccaatttacaaaccggtggttttctggtttggttttgttttctgcttttacttccatctctcccctcttgaccttccacccactcccctccagggagagagcagcagagacctcatcagcagaccaaggaagtggtgggtgctccccctccctaagctccagggtccctgaatcttctgaaatctcaaatgagtggaggcctcctggggtggcctgtcctgcaggggccctggaatgggggcaagcagctgggtgggcagaatgcagagtagactcgggggaggatcctttcactttccgcttccccttctgatgcatggaggatggtgtgagcttttcagcaggcccggaaaggtacgcaggtgacgccttagcagccccgcagctggtgctctgccccgcggtactggcgccatcagggcctcccttgcccgcctgagagcagcagcagtctctgtcatcccgtcgccccttaccccccaccccaggccactgggcccctcccacaccacctggggagctgagaagaggaggctggagtaagggaggacttgatcatccaagaaatactttttattgctgggagtcttctgaacctcaccaaactgaggccagagctgagctcctgggggagttaattcagaggggagaggccagcacctccctcctccatcgctcgctgtgtgccttaaactccatctcatgtccctccccatcccctggctttccctccctccttgccccatcctgggccagccagcagggctcctcctctggctcttcagacctttcagccagtgctgtcagtgcccctgggagggaagggcatccctgaggcacccgaatggtccctcagggtgcagggaggcagaagcctggccacagaggagcctcctaaggcagcagctgcagcaagcgcaccctctccccactctccccacgccagagcggcttccagagcagatgctgtttccatcctcctcgtcaaaaccattctcgctgctgagcttgacaatctgggcaaggcttgtggggcgcttgacaaacagaatctgccctgtgccgcctggttccgtggcctccagcatgagcctgcaggcagggcgctgcgggaacccagttgtgctgccccagcccatgcctccgggtctgctgtgcatgaatgagtgctcacttgtcccgggtttaggacgtggtcaagtgaacagcagggtctaactgtgcttacttagcccagttcaaacagaacaaaggaaaaatatagaaagcaacatctgttgatcatttaggtttttttttaaaccaccatgtcactttgagtccttcatgggtttttgaacagcatttatcaagaagaaaatgtgggctttttcccctctcccgtgttttgtttgtcctgtagatagagggaggaaagccgtgcagtggcaggcgggaccccctctggtggcgggaccccctcttgcggtggtcttgcggggccagccgggacctgtcactttattatttaaggagtgtgtgtgtagagtcgctggcttattaacagtattgtgtgtgggttgggtttttagtttgttccttctttttgaagtcccttcatttcaatccttgactctctctccccttcccttgcccagctctgttgaatgctgctgtgcgcgtgtgagggccgctctgcacacagggcccttgggttgtgtgaactgaaattctccctgtatttgtgagactcgcaggagtccccatctgtagcacaggcaatgccagtgccatgctgcagcctcagaaaccaggcctctcactccagcagcaggcagaaccgtgtctgtggtcgggtgctgtccacagctctgtctgccttgttcttgggcttgagctggatagaggtggggtctcttcaccttccctgaattcagaacagaccctgtgcctggccccagtgtgcccaggcaattccccaggccctcactgggagcccttggtgttctgagcagcagggcccaggcagcacatgagcagtgcccaggggctccctgcgtgaggacggcaaggtgcgatgtatgt

SEQ ID NO: 135666 - DNA, 1072 bp, Homo sapiens
tgaccaggaagcgggcagcagggcatggggcttcataggacagggcaggagtgcacacaccctgggctgtggtcagttctgggttgtcccagcacgaacatggcagtggttgatgccagtctgtggcccgtcccctcgacaccgacggtgagtgtcatttgcacctatacatgtctgttgagtagtgggctccttccagtgagcgcatagccttcgtttctttggcaccatctctgttcttgctggccacctggaagtgggctccagccgtgagcgagccttcttggcatctcaactgtccatgagctcacgagggaaactcaggcttctgattccagaagctgctggacatacccagcagaagcaggagagaaaggcagacagtgtcgtcccggagagaggcaggaggccattagggccccagggagccttttggggcttccccgccctgtagcctccacgctcctgctgggcagagaggctctcctgctctgacgcccgcagcccgggcctgctcagccctccccaccggcctccccacccctgacggctcttctcacacctctgtcttccaggccggggaccttgcacgactttcacagccatgagatagcggagcagctaacgctgctggatgctgagctcttctataaaatagaggtacaggctgctcctgccagggggagccacactgtttgtccctgaatgagagaaacccccatcaggggaaagccggggctccacctccatctgccttctttccttttgtagattcctgaggttttgctttgggcaaaagagcagaatgaggagaagagccccaacttgacccagttcacggagcacttcaacaacatgtcctactggtaagagaggcccagcgccaagccctgttgctctggatggtggcacgtctgggtgggctctgcgttttcctttgcagggagcttgaatggtaggagaaggagctgcctctttcattccgctaagctcctgggggttcccatgagcactgacaggctgaggacaggggcagggacaggatggggcttgctggaagtggccacctggt

SEQ ID NO: 135667 - DNA, 1012 bp, Homo sapiens
tgggacatgcaggcggagacaccagagggggttcccaagccctcggctccctcgcccatcccactccccgtgccatctcccctgcctctctcagagcaaggactcaaatccaccctggctaccaccccccagcactctgcacccagacaagcagtttgcattgttttttccctctagatttggtgttgtactgcgaggcattcctgaccacctacaggaccttcatctccccagaggagctcatcaagaagctgcagtacagatatcctttccttcctgacccagggcccctgcaccatgggcattttggagagagagggaccctcttgcccttcagtcctcgtgggggaagccgagcagcatattgggtggcagtgtgattgaagtagggacacaggagccccatggaccgaggttcccacctctaccctcccgcattccagctttgagctcaggcaagttcctcatctctaaaagggccgagtgaaatgatgtgaagaggctggaacatagtctgggaatgtgtgtctggtggcagttgtggtcattggatgattctaaaaacgaattagacatgccccagactgggaggggtaagtgtgccggtcctgcagacgcctctgagagaccctcatggtcggctccggcagcttctcagagctgagccccagggcgttgggcacgaaggataccaagacccaaatagacagctcaggggtcagcacagtcaccttccctggagcggaccctgcgactgccacatccacaactggaatgggctcctgtccccagatctaccccatgggcccaccctcagtaaatgtcaccctctgcagtagtggctgaggaggaccccaggggtttggaaggacccacttgtgtgacccattgcctcttcaagtccaaacctgcccatcctaagaggctgacctgcagctgctgctctaggagggtagcctgggtcagctgctcctcagccacctctttgcacatagcccacggctgccatctg

SEQ ID NO: 135668 - DNA, 1023 bp, Homo sapiens
tgcagaccattagaccggacttcactcacatactccacgaggaaattcttgaaggtttgttctgtccaggaaccttcaattctgtagcagtggcctcagtttcacagcacacagctgccccaccctaccacgcattcagtgtgctgattgagagggctggaaaagcagggaccgtcccctaatccctaaaacgtcttgttgggtggactctgctagcaaagtcattcccagtcatgctctggaaaggaggtgctagtgacctgatggggcatggccacagcacccttcactgcctgccctcaaggggccagcaccacctggccggccagtctctccacacgctgcttctctttttacgtttaaaaaaatgatttaaaagatgatgtcagagcaatggtgaagtaaattgtggagggaatgaaaacacccccaccttgaaatcctagcccaacccgtttcatttctgtaagggactctgtccctgtgtttcctcagcacgtttcccaaaacatgtgacccagagtgactcggggaatttctgaattatggaagtagtactaaaaaatatttacattgcagaaaattagagaaaaagaagagatggctcccacaaactcaccgcagccactgctccgccctccccttcactgttccctcaccctttgtttgttctgaccagggcagggcccagacctggcgatgctgcatcctagccccagctgtgccatgacaggctcagagggcccctgggcagtccccgggcttctcggcctgagccgactccacttgttgaaggggtgaacggtgcctgttgttgtgtggattacgtgagggagtgtgaaacctgccccgcatgtcagcggtgctgggggcgtgatcagcagcatcctgagcgccgagtgcagcccttgcttggcttctctgcagtgaatccccctccctgcctgacatagggggctccatactcagccaggcatgggagcgactttcatttcctttttgtccacagcgaggggctgaaat

SEQ ID NO: 135669 - DNA, 1026 bp, Homo sapiens
tacctcctcttcctctccacatttcccacctgcccaccagtctcagagctctgacttagccgtgccaaccatggccggtccacctcccagcaccgtggacgggcctctctcggcttctcaggagagcagctttcatgggaatactgtctgccttccttccgaaacctctttcactgactcggtgagaactcagcgtgcacacacacacacacacacacacacacacccctgcacatggggctgcacgttttttaaaaagcggtttcacgttcctgaaagacactgcctcccctttactagcagttgggggctgccagcgcacacctgctggcagcatggctgagctgacagctactgagggtcacaaggtgcaatgggagcccatgtgtttccagaacagaactgactcttctatacaaagttctatcaaactaggaatctgattttccacaaatggattagtggccatttagagaggaacttatcagacgcataagatacaaaatgctactagctttccatttacttgtctgtttttagggaaaggtacaaagcccttcgcaagtgtggaggtgacagattcaggacaagtgtctgttcggttgcatgtggtgccgatgacagaagcctggtctctagcctgttaaagtgcctgtagcgcttcgtccaactcagagaaatgctgccttgcagattggagcagacaagtacatggggcagaggaagtgcaggcagcggaccccactccccagtatgtgggattgtcttgatgtgttgcttctctccctccataatcgtttcccgccacactggggacccctgctgtctccactacagtggggccatctctccaggatgatttagccccagacaccattggaggggcagcagcaggagacttggatcccctctagcacagaggcaagaggtggcaaaagcagctttgctctctgcacctgggaagaccagagtgcaggctgtggcatcccctggccagctgtgagggccggctggagggcctggccc

SEQ ID NO: 135670 - DNA, 1045 bp, Homo sapiens
tgtacctttccctaaaaacagacaagtaaatggaaagctagtagcattttgtatcttatgcgtctgataagttcctctctaaatggccactaatccatttgtggaaaatcagattcctagtttgatagaactttgtatagaagagtcagttctgttctggaaacacatgggctcccattgcaccttgtgaccctcagtagctgtcagctcagccatgctgccagcaggtgtgcgctggcagcccccaactgctagtaaaggggaggcagtgtctttcaggaacgtgaaaccgctttttaaaaaacgtgcagccccatgtgcaggggtgtgtgtgtgtgtgtgtgtgtgtgtgtgcacgctgagttctcaccgagtcagtgaaagaggtttcggaaggaaggcagacagtattcccatgaaagctgctctcctgagaagccgagagaggcccgtccacggtgctgggaggtggaccggccatggttggcacggctaagtcagagctctgagactggtgggcaggtgggaaatgtggagaggaagaggaggtaggcggaaggaaaggcggaacggaagcttggtggtgaggcacgaaatcctgggagtaggacctaaacacagacttatactacagaatccaggtggagaacaaacaaaaacgagaatacaagaagaaaagagaaaaagtaattagattggcagtagctgagcagtgacaggccgttcacaataacttagtctaacgggccaccaatcacgccaagcaacccccagtcctcaggccactgtgatacccacacccagcacctcctcccttgagaagggccctgagactggagagtgaacagcgctgtcctcagggctatctaaacagcatgacacagagaacggctcaagtggccacatgctctgctgggacagaaaataaaacctgcgtggcccatcgctgtcttgtctgctcaggaacttcgtggccaaattcaatgtcattgtaattactcattttgaatttctggatgaatctctcaggttttattccttaaga

SEQ ID NO: 135671 - DNA, 1120 bp, Homo sapiens
tgtgtccctaaccctcagccgctgatgagcagacagcctcctctggcacgcgctcttcctgatcagcagaggaattaagtggagtggctgttatattgaggactcagaattgttcctttaaagatctgctttcctgctgggcacgatggctcacgcctataatcacagcactttgggaggctgaggtaggaggatcacttgagcccaggagttcaagaccagcctgagcaacacagcaaaacgctatctctacaaaatccaaaaaatcagttgtacctggcgacacatgcctatattcccccctatttgagaggctgaggcaggagaatcagttgaacccaggaggttgaggctacagtgagccaagaccgcatcactgcactccaacctgggtgacagagcgagaccctgtctcaaaaaaagaaaggaagaaaaagatctttcctgctttcttgctaaggcaacacagagcccatccctaatcctttttccatgccaggactataatagagagaaggtgtcaccgaaaactagtgccttttctaagtattttacttgtgagaaaaaaaactggtgcctggccagcttcaggcagctttgccttttaatgaattggccacacgctcgcatatgaggtcatcagcctccagcatcgtttcgactccggggcccagtggctttcaggggtgtgtttccaaaggagctggttactgattccaccttttccctgcctgtcctgccacactctggccagtgcacccctctctccatcctggcttatggatcaagtctcagctcactgggctttgcatgcctggtgtcacaaagcactcagctaaggaactctgcagatttggtgaggctgtaccctgcagagctgtgggattgcatggttagggcctgtctcgtccaggatacacctcagtatttcagaaaacacgaactgattgtgatatcagccatacccacgccacctcttgccagctgtgttattaggcacgtggtctcccctcccagcctcagtattttcatcagtaataagaacagtaaggcactgtgtgtacgttaattgagatgatccgtgcaacacttacatctgcctagcaggaagcatgaggta

SEQ ID NO: 135672 - DNA, 1022 bp, Homo sapiens
tctagtcttgttctgtttctaactttacacatgagagttaacctgtttggccttttttccccctctgtaaatgatgagtttggaccgagtgacttttaaagacttatccaaactcaagttcccagtttggtcttgtctggtttccatctgtgcccagggtgggcagtccaatgcccagtgccttcgaccaagatggtcctgcctgtctgaggaccttggagtgcattctcccaatgggtactgaggcctcacgccttagagcccccagcatccctactcatgctgggaagatgcgctcccctcaccctgctgtggccacacagaagcccctggtttcctcagaggcacctctggcaagctcctttcacaaatcttgcgaaacttggcctttagacaatccgagctcttgactgagctagatttttgtttttgttttctttccccttagagtttccacaatatcccttttgagcagttagggttagaggactatgaatgaactggactgttcgctacaaaattaaattcgaggacgttttaattaagtttggttatgagtacgtcatagtttttatccctgggacatacaagagccttaagacatcttgtgtctaaaacactgcattcttagcaaaaagcccaccaaggagcctgagggaaggaccttataaggtccttatgtcattaaaaggagaatacctcaggaaccattagtaatggccaggtttgggacattcagcacccagtatgccggaacctcagagaagggattcagtacggtgccaacatgtccttcatatatcctttggttaaattctgagatgagccccagacatagagctttggattactatcagagcggccctttattcctgactttcttcattcattgctcctgggcctgtatggtttgtccagcatggaactctgaaggagtgccccttggaaacacagcagttgacaaatctgaagacacctcacgtggttcttggcacagtggacgattatttccactaaaagat

SEQ ID NO: 135673 - DNA, 1052 bp, Homo sapiens
ctagatgggaaggctatgaatggttggttctctggggccttaaagaccatgaggcatccaggtgaggcaggggcaggcatgggaaatgtgagtggccaccttgggagcatcaccagtctggcataaactgacagagacattttagcctttttatcccaatctcgctttggaccttggatcagccctctgtgttccaggattaaaaaggaatatagccaggtgtggtgtcactcacctgtagtccccactcctcaggaggctgagacaggaggatcacctgaactccagagttcaagtccagcctgggcaacatagtgaaaccctgtctcaaaataaatagataagatagatgagatggatgagtagatgggtggtactattcctcacgtagaaagccaggtcgaggagagcaggcttcactagcgcaggatggtttgactctcagggatgtattagtttgcttttgctgcataacaaaccacccaaaacttggtggcttaaaataatagtgagcatttgtcactgcttaggacagggggtagcaggatgggtgtgctgctctggcccaggcttggccaattttggctgaactcactgacatccctgggacctgagctgagacaatggggctgatttggctgtgacccatgtagtctgtcacttccatcaggctggcctgggcttgttcacatgacagctggcgggcttccaaaaataacaaatggaagcgtgcaaggccccttagggcctcagctcagaagtagtgtgatgcctgttccattgcatttgctcagttaaattacaaggccagcccagattcagggagcagggaagttgcttctgcctcttgatggtagttgctactaagtcatgttgcacggggcatgggtccaggaagggaatgggctgcagccatttgggtaaacagtttactgctgaagcctaggggctgacactgaagaggggagtctttcactggcatctgcgcatgtccaggaaccaaaatggccaccattctccctttcgtctgttaaaatgaaacttagcacagg

SEQ ID NO: 135674 - DNA, 2806 bp, Homo sapiens
cattagggttccccattggtgttgcgcgtctgccggtctggacgtgtctcctccgttagcgcatcagacagagtgtgatttcattgcccgaaaagtcctccgtgctccgtctgttcgtccctctctgaggtgctttcagtggaaagccccctagctgctgtgggaagaatggggggaggggttccctgatgtggcctcccccggcctcgctgcagctttctcccttgtttcacagtgctggcctacatgcagttgctggaggactactcggagccgcagccctctatgttctaccagacgccacagaacgagcacatctaccagcagaagaacaagctcctcatggaggtatacggcttcagcgactccttcagtggggtggactccgtgcaggagctggccccgccgcccgccctaccccccaagcagcggcagctggtgagtgacaccttcccttgtgactagaacttccgatcctagcaggtctctaggaaccagaatgaccctccttgggggcagggttaaccctcctccctgctgtggcagggccctggttttgggcgtggaaggcaccatctcccacacagatgcttttacttcctccttagatgctcaccagcagcccagcgcccactccaccacctccccaccctggggtgcagggacctttcttttccacagcagccccgcgcagcagggacaggcttgtactcagggtgtttgctctctctgctgacagtctcttgtatttttttctttcttctttggcttcaacatagacctcccagaaaggagggactcaatcaaagcacaggacatggtctgtgcacagccatctgtggacttgattggcataatgggcctaactgtgtagagtgacttacaacccagccttggccggggagggcccaaggaaaacaagtgccattgaagtggaggatggctttaaacagagccactctgtttcagacatggcaccttcctcttctagaaaacactcgtgtgctaaggactcctgtgcatgtaaggaagcacgggccagcacagaaggcaagctgttccaccgtgggcaccccatgaggctctggaactgcccaggcactgggagggtgagcagatcgggggtacctgtggcatccctccaaactttctccctttgctgccagttaatgaacatggagggccctagtcaggtttgaagatctgagcctcttgtccagccatgctccccaggaagaggaagctccccagcagggagctccaggcttgttcagagctgcctgggctgctgctctcgtgtgctggccagtctggtggcttctaccaggaggcgactggtgtgcactgggccatcttttatccattgcgagaggacatgaggggccatctgattcttctgggaggcagctgcagactggaggacaaatgtccctggattactccgtataatcaatcacctggggctcagcccagtcccaggagttcctgagccttcctatactcagtgggctgtggctaaccaagcaagctgttttgtttccactcaaaaaccacactcagccacttcagaggtggccatgtccagtagaggaaaggccaagcttggagttgggagtcctgaattccagtcctgccacttgttagccgtgtcgcacgtgccattttcagagtctcagatcctcacctgccctgcccgtcccacagacacaattgagaatgtgaatctcaattgctctgaagatgtttcaaaaagggtcccaccatggaaacataaatgcctcatttagagaccccttgcctaaaatgtttggttagaactgttgccgagagccaggagtggtggtggcacatgcctatattcccagctacttgggaggctgaggtggaggatcacttgatcccaggagttcaagaccagcctggacaacatagtgagaccctgtctaaaaaaaaaaaaaagccattgctgagccagatttattgaaaatattttcggcccatttgccatccttgggcatcttctccatactgtggagtccacaggcttctgaatatttggggagacacccctagggagcacgtggaatcagaacctgttctaccacgcctgcagggcagtggcgagctcagcccccggaggcctgttaggaacatctgtgttgaacacctccccaggtaagcaccagggctctcatctggctctacatggtccctgccacagctcctggcatccccattataagtaaattgaggcagacagagccagcgaaccttaatccaagcccacagctagaaacagaagacctgggagccacacccaatcctaatgacagcccaggcataccacctgacaggtcctgccagctgctggtcacaccctctctcaaatgcagatgcaggaagcgttatccacacttcacagacaaaaatggtgctcattacacacacctgttggcccatgtacagtgtggtaagcaatatttcaagtgcttcacacgtatcatcccatttcatcctcccaacagccctgtacaggagacactagggttatccccattttacagatggaaaacctgaggcacggagacctttaagtagtgcccaaggccaaacgggtgagaaatggcagggtccagactcaaacccaggctgccggagccccgtctgagttctgaagacgtgtgaatgacacatggatccactccccacagaggagcagctccaagcccagagtcagcccagttctgtgtggctccagccccctcgtcctccttccacccaacctgcttccagtggacacaatttt

SEQ ID NO: 135675 - DNA, 1032 bp, Homo sapiens
gccacattggccaggctggtattgaactcctggcctcaactgatcggcccgcctcggcctcacagagtgctgggattacaggcgtgagccaccgcgtggccctcagttaggctttttcaaaaaggaattgtataggcaaaaaagtcatttaaggaaatacttcaaaatgtaaatagaaagtacagttagattatggtactgtgggtgatttttattttcttgatgtaatttgccacagtttccgtaatggttgtgtattttttttttaaataagaaatgtaaaaaataaaagtatagcaaacagccatattcccatctggtttgcttttataatcagggagaagaatgaagaatataacatgtgaatataaaataagccctggagacaggtctttgtcacacacccatgagcgagccggcgagaggcgggcggggggagctggctgctcctgcagggcctgtggctaacgggtctctttttcccctgttgtaactgcagaccactatgatcccgactatgaattcctccagcaagacctctctaacgcagaccagatacctcagcagacggcctggaaccttagcccgttgccagagtctttgggggagtctgggtctccatttcttggccctcctttccagctgcctcttggcggccatccccagccagacggacctctggccccagggcagcagacagatacgccacctgctctccccgagaagaagcgcaggagcgcagcctcccagacggcggacggctctggctgcagggtgtcctacgagcggcatccctcgcagtatgacaacatctctggggaggacctgcagagcacagccccgatcccatccgtcccctacgcgccctttgctgctattctgccctttcagcatggaggttcctcagcccctgtcgaatttgtgggtgattttactgctcctgagtcaaccggtgacccagaaaaaccacctcctctaccagagaagaaaaacaaacacagtaagcctttgttgcactgttgtcaggaagtg

SEQ ID NO: 135676 - DNA, 2520 bp, Homo sapiens
tgggctcattgcagcctcctcctctcagattagagcaattctcttgcctcagcctttcaagtagttgggactacaggtgcacgccaccatgcccagctaatttttgtatttttagtagagacagggtttcaccatcttggccaagctggtctcaaactcctaacctcaagtgatctgcccgccttgacctcccaaagtgctgggattataggtgtgagccactgcgcccggcctggagcattttagagaacccttagatcattttcagatgaggaaattgaggtgcaaagttgggggcacagccaagctccagtagctcattagcaaccaaaccagaaccccagggttctatatccagggagcctgctcttcagccccacctcacccactgtgttcttcctggtcacgtcctcaccctctcagggcctgtgtgtgctctgtcccgcctttgaccttctgtaaccccaagttcttcccaattctccagcccagcagagctccccctgacagaccgcgaggtagagatcctaaacaagacgactgggatgtcacagtcaactgagctcctcccagatgccacggatgaagaggtcgcgccccccaagcctcctctgcctggcattcgggtggttgataataggtaattaccttcctatttgtccagtgcctcccatggcagaatgagaaagaaagggaggaagacagggctcgggccctttcccctcagcgctgagggcttggccccccttgggaggctgactctggagctgtccccaccccgccggccctcgctggccaccctgagctctcctgaaggcctccttgtgccctcagcccagggagacatggtatgatttattatgaaagaaaaagaaagggttgttcttttttgttcatttggtatttacaggttttattttggcggaggggagtaggcaggagttgaagtgtgaacattgggtgtggagagtctagtaatgaaagaaccccacatcctgtaccccaatatcacgctgaagagctttggtgagtgtggtttggtctgcctggacgtttcggtctgtttcagtcctccaccagcattgccacccaagaaaagacagtcggcgccgtcccctacccgagtggctgtggtggcccccatgagccgagccaccagtggctccagtttgcctgttggaatcaataggcaggtaatgcagcccctgttccctgcatgggaaggcagggagggggtggggggctcagggatgtggctcctgaagctgaaagaaacccatggtcttcaggcgctggtgtttgtcacatcgaggagtgcgagaccttgtacccatccctctctctccaggacacggtccaagttcccatatggggataagggtcagggcagggagggcagagccaaagggcgtctcctggggataggtgagtccagccccagggccctccctggccacaccccccacaaactccagatggctgcttctcagctgtatgtgtccttcgactactgacgtcagaggtggtttctgagttcgcctggcagtatttccttctctaagtaaatgcaccggttgcctcacccctggtctgtgccaccgtttctcagaagtgatttggctttgtttttctttttccacttgaggattttgatgttgactgttacgcacagaggcgactgtcaggaggcagccactcatatggtggagagtcgccccgcctctccccctgcagcagcataggcaagctcagcaagtcagacgagcagctgtcctctctggacagggacagtgggcagtgctcccggaacacaagctgtgaaacactaggtgagccgccaccatcctcctgttccatcgtgtctcggtggcttctctggggccattacagtcctgggtgggagtcccaggtcatgcaatcattgactacgtggctttggctgacttgtttaaaatctgagcctcagcttcctcatctgcaaaatatggataacagtatctgcctcccaaggaagttgagcatgtaaatgaaatcacaatgtaaaaccacagcctagatattcaagcggtgactgttagttcatctgtcagtgagtaatttgactctctttaccaaaattaagagccatttgtgttgagagctttaaacaaaggggtgggggtcctgacaacacttgacagaggctgaaggggagggagccgcgcgagccggccttctcgttagtcagtgctgaatgtgtactgtgcgggcccctccgagtctgctgggcagggggcttagagagcaggaagctgttcgtatcctgtgaactagatattttcacttctgagaatgtatcctaggagcataatcagtgattaatagcaagattttcattggtaggaaatcagatgaattatggtacattcatttgctggaataatctgtagctattaaaaatcactcatattgataactagaaaaagtacaggaccatttacatagtattctcaattgtttctttttttttttttttttttt

SEQ ID NO: 135677 - DNA, 1001 bp, Homo sapiens
atgtcttatgattattgaccattggtatctgtaaatttcttgtttgatatttttttcggcgtgttcaccttctagtttttttgttttcgaaagaacccttgcgctggaaaggatggtaactgactctttgccttatttgcagcatacgctgccttttttgtgtgtggtgcttttttgagtctggagaggcttggcagccgctggttcagggtctctggttactgtgttgcccactggcatccgctgccacctcctctgtaacttggaaacagctttctgctgaaagcctggaagcccctcatcacacacatgcaggccctggccaggccagatgtccagcaacaggaaggtggagggagaagctgtggtgcatccacgagtgggaacactgctggcagcgagcagcaggcgcctcgcccacacgaagcacagctgttgacgctgagctcgggggacggagcaggcaaagatgtgcggacaggaaatggattggcagctgccaggggctgggggtcgaggggaatgcggagcttccttatggggtgatgagaagtcctaaaattgattgtgttgatggtcacacaactctgtgaacagactaaaaaccactgaatcgtacactttaaatgggtgaatttaatggcatatgagttatatatccataaagctgtttttaaaaagaaggttgacacaaaagtgtatgtatgatatggttccatttatatcaagttctaggacaggcaaaagtaatctatgataatagaagttaaacagttggggcggggcagattggctggagacggtgatagaaatgttctttgtgtttttagtggcgcttacttgggtatatgcagttgtcaaaactcatcaaactgggaaaaaatgcattctaatttaaaaaaaaaaacacatgggcacttatgtcttcccttttttttcttttgctacgatttgaaaaaggctatttttcttttctgtttttctcagttaatggttctaaa

SEQ ID NO: 135678 - DNA, 1048 bp, Homo sapiens
tcagtgaccagtcggcagtttccagtcactgctgtagacatagactctagagtagtctcttcttctttttgttctgagacagtctcactctatcgcccaggctggagtgcaacaacggcacaatcttgctcactgcaacctccgccttctggattcaagcaatcctccagcctcagcctccggagtagctgggaccacaggtgcatgccaccacgtccaactaatttttgtagaggcagatttttaccatgttgcccaggctggttttgaactcctgggctcaagtgattcacttgcctcggcctcacaaagtgctaggattacaggcatgagcaaccacgtctggcctttttcagtcttttctaactcgtgcctcaggacaattaaaaagtctgacatccctctcaaaaaattctaccttcagtaggaggtgttgggctcatgccaaattataaatggtcaactttcaatgagattagggtgttagcacagtagccagatatgtgcacattttaaggtttctcctctgtgatagttaaggcaagtcaagactaaagaccttctgtctaggcagggagataggtggtaaatttaaaaagcagcccgccccttttatagtcttttcaagcctaggccacgcgagctagtgtagggagcgtcattgggatcatgacgtcatctttgaatttgggcacatgtctgcacatgtgtgcctgtcattccaggattgttttgccattgttcattagttgagttcacagctgcctctccagaaagatgacgatctaattataattgctcatgaatcaatgaagaaccaggaatgttttcctgtatcaacagatgcaaacaacacagacttctctctgttccttttgccctgcttgtaaagaagagtgaatctgaaagtggggcatccagggcactgtgttctggcgctctttaactccctctaaggccgtgatgctcctctttggggcctggcgttgtgcttttaggaagagctgcttctcccaccgtcctccctcctccaggcggtagggtgcaa

SEQ ID NO: 135679 - DNA, 1023 bp, Homo sapiens
gccccttgcccctttcacaggtgtggagactcaggctcaggtggagcagtagtcagtggcaaggctgtgattcccacccccaacctgctgccccctccccggctcctgtgcaccatgacaccctgagctgctgcctcccatgggaggacaggattctctgcactcccacctccaagctagctggcttccagcctctctcaccgtccctttcaggcctgggacaccttaaaagcccatgccctggtggcgtgagagagcctcccccagctgggagggactggagctgtgcagaagggaaatgcactcatgaggatgttgtcagcccacttggaggaggggcgttggacgttcttacactgactcaccgttgtttacgtaacccattcagttgttcaagggagtctttcctctttttttttttttcaaatgattgaacatgggttgtaaaacaggattactttggttttgtccctgaatgcatggtagcatttatcatttaaacctccacataaatgccacttgttcaagctgtataaccttgggcaagttacttccctgagtttcaagtaggttttaaaatatttaccctgaagatttgaggaaattcagtaagataaagtatataaagtacctggtaagaactaggtgaccaggaggcagtggggaaacagtgttacctggagaagtgttcatttctaacggctcacagtgaccatttttgacagtgattatggctcttttccaggtagtcttatcatctcaggtaaaagatagacccctgtcccctcatctggctctggggctgcttttccaccgggagcctgtagctcagagctgattatgactcttgaaggaaggaaatctgaggaatttaaagaccctcaatgtttttctctgagaaccacacccagcctagcacctggatgctggggggccgagccactcgaggccaaagagatatcccagcatgatcttttgaaatcggtaccccacctcttcccaacttcaccaggtaatttactg

SEQ ID NO: 135680 - DNA, 1312 bp, Homo sapiens
tttttctctgagacggaatgtcactctgtcacccaggctggagtgcagtggtgcgatctcggctcactgcaacctctgcctcctgggttcaagtgattttcctgcctcagcctcccgagatgctgggattacaggtgtgagccaccacacccagctaattttatatttttagtagagatggggtttcaccatgttggccaggctggtctcgaactcctgacctcaggtgatctgcccgcctcgacctcccaaaatgttgggattacaggtgtgagccactgcgcccagcctccccatgttcccttcattccaaaaagttactagtatctgcttagggcagcgagactcaaggatgtagcccagggtggctgttgtgatcagagctgatggccctttccaggatttggaggacaggcacgtacattatcatatctggtcctcacagtagcacactgggttcagcagagcagagtggaacgtggcctggggctttatcagcagccctgagtcactctggcccacccacccctgctgttcctgtctaggcttctgaaaatgctattattgaaaattgttattcttcaggtaacattgttaaggtttccttctatcgaattgattctgatgagatgttcacaagttagagcagccaaaacagaggagaatgagtttccactcataaagctctgtggcagtcccaagtacatttcctctatggagtcattacagcaccacttcattagtagaaaggcatgtctgaaagaaaaatttccttgatttttcaaagtgactggggaaaaaaaaaggagagagaaacctataggttatgaacttgtcaatgtcagagcaaataacttttccacaattgctttaaaaatattttagccagaacaaagattctctaggtgagaagctttacaaattcagttttgtttcatttattcaagaagcatttagtgagaaccttctatatgccaggcaatgagagataataggaaatatgagcaaagctggcacagaccctgccctatggcacttacagtctaaggggggcaggaccgtaaacacaaaggcacacccatgtggtatagcgctgccaaggaagatggcacagggtgtgatgaaagggtatgatgaccttcctttctcagggtggtcagagacgcttccccaaggaagagacaggccagcatctggaggatggacaggagctgcctgtggctgggagcttttcatgctggagtcattacagacagtgagagtgatcgagacactgtgacgctggcatttgttgttattgtctaatagtaat

SEQ ID NO: 135681 - DNA, 1744 bp, Homo sapiens
actcttaaacagctgatttgatctctctgcaatgacagaaaaactctctgctctgaagtgccttgccactttcgagtgcctcccatcttcagattagccactttctccctgtgtgacctgatgacacattttcttaaaatgtttcctgttcctcagcaagtttcatcattgctggtctctaacactttctgatgtgctaaggtggcagtgttactgtcatagtcctcttcttgcctggttgaccatggctttaggcacatctgaggtctgtcggcactgcgactccttcacactcaggttcctccctgccccgggcagatgacatgaagcagagagctcttgtccacgaggtggaaaagtaagcgcccagcctcttggaaacagaccgtaaacaaatctgtcaggtagtgaaaagagaaaaataaagccagggtgcaggacccagggatggggatgaggaagggcacttcccccaccatgggagaattgtgtcttctagtctgcaggacaccttgtgggaaagactcaatgaaagaaatgactgggtcttttgtgcattgtctgactaaagtagccatttatatatttttcttttgacattcccatgaaataaaagcctctactattgaacatttttatatttaaaatgatattctgcacctttttttaaactttatttttttaattgagacggtgtgtcactatgttgcccaggctggtcctgactcctgggctgaagtgatctgcccaccttggcctcccaaagtgctgggattataggtgtgagccacttcacctggccaatcggcactattttagaagaaaagagctagtattcagaatcataagcactttttattaatttctaccatttgtttgtctgtatattgtttaaatcacctttttctagaaattatcttcttgccctcagtttttatttatatcctctagacctctgagatcctgcaggtggctgtttgcctcatacacacccctcttaatttgcactagacatgtaatcgactacttgagtacactgtccattttgggatttatccattctgtagactactctttttttttttttttttaaaggacagcctcccaaaccagaacaggttcagagactccacttctgtagattactcttagcctccttttcctgccagccagctgagacctggatcattgacatcagggcaagtagaggggaagttggagagaagaacaaaaggggtgtgtagacccaccaactggatccaaggcctcccacggtcagggagaaaagcttggggttgtggcttaaacactggaaagcgcagggctctgtattttccctttctctcaggtgggcttctctcaggagcagagggaccatgaatgctgctagcgcccactgcatgagtcgtgattgaatcttgagaatcacggtcatctgctctggcttctctgccttttctccccagatttcctgccccttctagccctgggagcttccaggcccttgaggaatagcatatcatttccttgagtgggggcttcagtggggtgaacaatctgggaacctagtgaggagtcctgagggaatgggtttcagcccctcatgccctggaccagtcttacacagtctttcagatctttgaaacaaaagcctggagcttcttgatgtgatttacaggatacagatgtaccatgggccttgactggtgcttctccaagtcatcagcaaattagtcctcactct

SEQ ID NO: 135682 - DNA, 1013 bp, Homo sapiens
atttagccaaagtcgcacagcaaaaaggtggcaaagtcaagatttgaatgcaggctgtctgacgtcagagtctgaattgtcgagatgctacgtttcctctttatgaaagacagaatttttaatatctcgtgaatttaaatattaatcctgactcattacataaaaataaaactaggctgggcacagtggttcacgcctataatcccagcactttgggaggctgaggcaggcggatcacctgaggtcacgagttcaagaccagcctggccaacatgacaaaactccgtctctactaaaaatacaaaaaaaaaaaaaaaaaaaaaaaaaatttagccaggcatagtggcaggcgcctgtaatcccagctgcttgggaggctgaggcaggagaatcacttgaacccgggcggcagaggttgcagtgagccgagatcacaccactgcactccagcctaggtaacagagtgagactctgtctccaaaaaataaataaataaaactaaacttagcaatgtaaaataaaataaaccttgtagacagatattcttaatcctttagtgattatccaaagtataatttctatgtagcagaactactgtcacagccatccatttaatgccgctggtaaacactagcctgttatttaaatacataattcttgaattttgcagttcatctatttttgggttttatgttgaccagcagaatatcttaaaattttagttaaaagtggaggaaaataaaggttttaaatctaaaagtcttttgttgaaaagtggtttttcctgccccctcttttaacgaaaggtgactgacaagcaagagggaaacagtcagtgtttgccagattgatctaaattccagattgaagaagagtaatacagtagatttggtctgtgccacagttattttttattgcaatctgtttagtaacctcttgtagccgaatgtagtattaactacaagtagagtgtaattgtcatccaacactagtccaggcagtcagagtaaaat

SEQ ID NO: 135683 - DNA, 1621 bp, Homo sapiens
acatctgtgatttgactgggtgttctttcttctcagccagttcccttggatgttagttagatcatcacacaaactctgtaaggacacttgggaatatttgcaagttctttttccatatttatttggactgcctttgatttccacaattccttgatgaaaattgcaaaaattgaagcatgtaagcagaaatgttttgtaatggatccatacgtcctttcccttgaaactctcaacagccaagaaaaaagatgggtttggggacattgctcatttccacaaaaggtcaatgaaccatcgcttcttcccactcccatctaacagtcagtaccctctttgttttcagactctcagcgttctcatctctcttccttcaccatgaagctgatggacaaattccactcacccaaaatcaagagaacgccatcaaagaagggaaaaccagctgaggtgtccgtaaagattccagagaagcctgtgaacaaagtaagctgactctggatgtttctcctggcctcacctgcttccagcaatatgagtttgtgcgatttgtatgttccctccctggggattgagctttcagtgcatcatacctacttcgtagcattccatgggcgggacctttggtgtccttgtaaaataagaaccattaggatggtgagtgtttgccacgttagccaagctcagttggctaagacagttctccttttccagctgtgtcatcctctgggcatttaaaacagctcagcacatcatgtccacaccccaggctgctgcctccctgccctgcagttccctacgttgccttggcgcacactcaaacacagggaactctgtgatgtccagaacatccatcatttggctttagggcctgtgctctgaaacatgcaaaccccttgagacacagccaaagatgtcctcaagagttagtggcctcagcagggccagtcaagccagatatgttgaaacagctattgactttcatcaacccctcccttcggcctcaaacagccatttcaaactctgtaggaatccaggtttcctctcttccaggaggcaacagacagatttctaccagagggctaccctctccccttggatctggagcagcaggcagtagaatttatgtccaccagtgctgtggcttccaggtctcaaaggcagaaggtcagtgtaacattaagaacaattgggtttgccttgccttctactgcagaatcctggtccatggttttggggatggaaaaaactctattgcactattattatgttcaactgggtggtgaccgtgggctgaattgttcaggaaagagtccaggggaccttggataaaagtgagagtttatgcaaggtcccatgatctttggagagagctttgtggcaaaagcttagggattctttctggggttggtttgggtgtgctgcttgggtccaacgggttccaggggatgtgggcgagtctcatctctcaagaccagctgttccttgaattgctaagatgatctgaatagtttagaagggaaaaggcttctgaagcctccgagtgctttcttacccatctcacaaggctggtggagtgcagtgagaccgccgcataaccaagtgctctcagagccccagacac

SEQ ID NO: 135684 - DNA, 1045 bp, Homo sapiens
tcttaagcatcacatgaaggattagactgttcacatccatgttgaagtataaagaaggaagtataaactgtaaatgggatccaccctgcttgggtgaagagagagaagaggcaggacagaggggagcgggagaagtcacaccatcccagttcatttgaatgcgagggatgactgctgacatatgagggctggtgttgagagcctcctgaccctgttgagctgttccaggtgagctagccaggtgcagcagcttcctgttgacttgtgtccccatctggggactaagaagggctttctgcagctctggccatcacacagctgtgaagctgtttggtttgaccacatgtgaatgcgggtcaggccctggcttttctctttggtccagagcgcagtgggtgcctaggtaatttgcaaagggcaggtagtttatctgatcctgcctggccacctggaaggtctttagcaagggaactgaactttggccttgttaagtcacgtgcagcaatagtagacagagtgagagccatgtagtgcaaggtgccgtgctatttatttggagggttgttttgtttggttttctggtttgttttgttgtactaaattgctggaaaaacttgacagagggagtgctttttatttttaaaactacaggtatttatttttccattgcgtaggacagtgttttgttgcttaattttcagccaatttcaagtatttctgctgttactaaaagaagcagtcttcttcctgggatatttttgttgttggttggtttcttcatttgttgaatatatgtttactgattatcttctatgggccaactgccatgtcagcactgggaaaacaggcatgaacaagacaggtacagtcctcagggaacttgtcccccaagcctttatttttttgagacagggtctcgctctgttgcccaggctggagcgcagtgctcactgtagcctctaactcctgggctcaagcagtcctcccacctcagcctcctgagtagctgggactacaggtctgcaccaccatgcccagctaatat

SEQ ID NO: 135685 - DNA, 1027 bp, Homo sapiens
tgtctaccccagttccgccgtggtcatgacggcgcagttgtgaatcttgccagctcctcagccccatgcctgcctgaacagcaactcagggcagtagacagtggagaaagcggaagttggctcacccagcctgaagatctttgagcaccagagaacccacgcatcctgcccagacttccccatttgtgtctgctttccctgcttcagtcctactcaacaggatacaagtcacatggattaggaaactgctctgacagcccatctgacttgggaacctgcctggtgagggaagaggctgtgtcttttagggacactgtggggctgccatcagaagacatggagtagggacagcaataggatccgtatgcagggaggcaggttaaaccaaagagggaaatagactaataggctaaaagccagattgagacttctggttcagtgccaaaggaagagaagagtgggcatttataaggtctcatttacttagaatagtgagttaaatgttcagtgttgcagaataactggatgaagatctggaagcagctgggaaataagaattcggtatctatcgaccttgctatgcatccaagctccttgtgttgagcgggtgccgtgtgccaggcattttgtgaaataccttattgtattatccacagtaaatatctcatttaatctacatcacatcagccatctcaagaaatataatgttatctcactcattttccagacaaaataagggaaagatttagagagatgatatctaagtatttgaatgcaaacattctgactccagtgcacaccccccttttagaaaattttttggccgggcgcggtggctcacacctgtaatctcagcactttgggaggccaaggcaggtggatcacgaggtcaggagatcgagaccatcctggctaacacggtgacaccccgtctctactaaaaatacaaaaaaattagccaggcgtggtggcagtcgcccaggctggagtgcagtggtgcaatcttgcactgcatgctctgcctcct

SEQ ID NO: 135686 - DNA, 1056 bp, Homo sapiens
gggggacagagtaagtgagactctgtctcaaaaaaaaaaaaattttgttttaattacatatgtggttcacactatgtttctattggatagtactggtccagagagtccgttagaacctagaggaggagggtgaacagtataatctttcttgtctattccctggaggtagcttgaacaacagatgttctagtaacccaggctgaagcgtcccaccaaagaaagttcctgaatgagttgtctctgactcgtgtgctagaactacttagagaattatattaaaaatccatataaaccatcttatctacatctctgatattaccatctggtgtagactgaatgtcatagctgttggttgttacagggttaattcattgattcttttatctgcgtgtttgctaacaagcacttatttattttatgatgtgtcagttattgggctaagtgccagattccaaaatgaatgagatttgattctctcattggggtctcaaaggactagtaagtagaacccttctctgtcccctgaattctgaaagttggaaaagaagacagtaaggtagatagatggggacccaaatatcaccttgatttctaaagccttgcttgaaggatgcagcttgttctaagagcccagtgagcttcccagtattgagtcccaggattagaccaacattacccaaccactcatagtggctttgcacttgtcaggcctccccatctgggggacatcggagaacaggcttaccatggagggcttactctcagaggtggggagggggttggttggggcggcacatggttgggtgcaaatcacacagggcctctctgagggagaatagatgccatcagaggttttcaaacagaagggtgacatagcgagacttagctcttataaggactactctgattgcagagttgagaatggggagggcaaggagcaggggacagttagaaagccatcgcggtcgtccatttgaggaataaagatggcactgggcaggctgaccgtggtgcaggtggtgagaagtggtggattctgaatgtaccattaaggta

SEQ ID NO: 135687 - DNA, 2066 bp, Homo sapiens
ttttgggaagtgctaaatgggttggttgtgcatcgtaaacatcaacattgggagtaatccacaaatccacccctcaagtggccaggaccagttcccacaactctccagggcacctgttctcccccagctcaactgccctgcactttccacagccagatcctgcaccgtctgccagtctcggttccagggcctccattcatgaacttttcctgcatctctcacaaagtgacccccacatgtcctcagcatttgactcacctcacagtgtgccatagccctgggttggaggcttgactttcttgtcagcttatagaccacctgagtgcagagcctgcattccagtgcccccagaacctctgtggcagcaaaggccccacgttgttgggctggttggaggcgctcagccacattgcaaccccagttttgtgggcgggcccagaactgggacttggtttttaactttgtttcaaggggaaggtgtgttctgattccaacaactgacttggaaaagaccgatctctgctttgcctctccaccgtgtggcccgtgcctcctccctggcgggctgagatgtaggccttcagacagacggcaggaggctgcctcctgtggaggatttgggcctttaaaatagaacttcaattccaggagacttagaggatacagctgctgagggagagcaatgaaaaatgagattccctcttgaaaaacgatcactatttcctgctctgaggattctagagtaaagcaactgagtttttgaagttgggttgcccctggtttttcctaggggcattccccggacagtgtggggtttagagagtgttaaatgagagaggtaatttggagggagttagaggaatgctatttggctgagttcaagatccagggaagggggatggctgtcttttcaaaacacttggttgaggagcctctttaatcagtatggcgagttttgtaactgatcacagactgctaaggcataaaggcagtgagaaagggaggactttctgacttaggaagatccccttctccgctttcttgccaaatgttggcaattccaggcatcactgaaatatatgttcttccccaacccattatttttggggttgtttaaaaatagtgtcttggttgcacccataatcccacctcccaagtcgagagagccagtgtataactttggcctcttccttgaggccgggagactgtcccgaggttttgcgctgagagtatttttagcccaggtgctagcacagccgggaggtctttgatgtgcgtctgctatgaaccagccatcttggtcctgggcttttccagaagggtgtaattcacttttacaagcagtcctggcctggaagtcttttcttctcctcttacagtgacttactcccctggtgatcaaggttgtgaacacacttaataaacagcttatttgctagtctttggcttcaaaagggggaagaggagcctacaccaagattgtggcatctgcgtcagaagcgagggtggggacaggatggtggtgatcctagccaagcccagtgtcccacgctgagtgggtgctgacttaagtggaacactgacccagaggaaataagaaaagtcctctagggccaagagcagacgtgagccctccttcctctgaacttgaattctgctttgtttgaacaatccttagggtacttactcctctctctactaaattaggagaccgtgtggctggtgtgtgaagcagaactgattcaaatccagggtctgtcacttactcctcggcctcactctccctgtctgtggcatgaagacagtggtacctgtattggagggtcacttcgaggcttcagtgagatgaggcctgttgagtgcctgcggtggtgctgggtgctcactgcacaagaagtggtcctagtcattgctgtgtagccattgtcatcgctgccagctccacgtgggcagggccttgtgttactcagcacctgatacaactccctgtacatagtgggggccaatacatttgactggaaatgaagtggattgaattttaggctctaacccaatgaaattctgtc

SEQ ID NO: 135688 - DNA, 1005 bp, Homo sapiens
gatttgggacacactgatgtttcagcccctccctcttaggaattctgatttgaaaatcactgtatctactctgtattcctatgagagagactaaaagattttgttcagatttgctttcttctgattgcaaataggaacatgtatggtttttttgggtgcactttttcagaccagacgccaggtcattctgacccaccccactcctctcctgagaatcactgacttagtgcagttatttgagggcaaaaagcactttttttcccagcacaaagtaggtgctaaacaaagtctacagccaaatataaacaagcaagccctgaagcagaaggaagagcagggctcagtggtggctttggccccctggttcttatgtctgtcactccacacacgcagtagggcttcaggagatactggctgactggtgctctgagccttttaccagaagagcctgattcagctaaatttccttggtaggggtgactgcttagttggaatttggtggctggaactggtggtcaccccctcttaccctacacggaccttttccaggttcagcatttacagatttgtttcccaaccaggaggggcttatcctaaggaatgttctgatctgagatgagattagaacttcccctgctgtcgaagtcaaagggtcccatctgcctgtcacttcccatgtgccctgggctgtgctgggctagtcatcagcccctccccgtctttggcccaagatgtggaaaatcttaatagctcaaccggttccctcagacctttgtcttctgaaacagtgcttctcacactccagcactgcagggccacctgttgaagcccagtgtcctgggtcccttccccagagaccccagttcatcagattcttaggtttgcaccagggctaaagagctggcatccagaccccctcccatgtgacactgatgccgtcatctgatgcccagtcccttttcagctgaacgaaggatgaagacacaatgttgtcctaaaattgat

SEQ ID NO: 135689 - DNA, 1512 bp, Homo sapiens
tttaagcattcaccttggggaggccacccccacccctctctccagacttggttaggggtctttggcctcacttgtgtagcacttgtcccctgacctcggtagcgatgcttcaggtctgccctccccgcgcctccacagggtttcttgttctctgaggagtaggggacaggacagaggcttttcctcagcaggcagccagctcagattggactttccttctagggatccctcttcaggttgggttggtgggaaggccgtctgaactggagcaggtgggctgtgtcagggaggcggtcaccggactggactctagccagcggttcccacctccacgcgcccaccgcccaagcagccagagctccagccctagccgcccaaaacaatgcagggcaacggttttctcctgagccaagtgtggagacctagatttccttgcacctgagggagagggaccacagtggtggcttctcacgccttggggaaccggaccagggcctgttcataacacagagatctgagctccttctcaagtcaggctgactgctttgggtaagagggcagaattttaaagcaaaaccgtgctctgcagggcgcctatttcagcattttcagactggtcttaacgtagttggttcattgccctcagaaatgaatgttgaaagcggtaagccccatttgaagcacccccgattttaacaagcttcaggacacatagttctgtgctaatatttttgttttgatgaaaaatttaaaaacactgctctcaacccccaccacaaagaacacgaaaatattattataaagaaactagatatatcccaatccctgctctgcagtggtggttcaatttgtaaagcaaaagttagaaccaaaaatgctttcaaaggtggcttcgaacaatgttcataactctctgctcgcatcattctgctttttacagagtttagagacccatttatagattcagtccacggattgtcatgcatttgcaaaaacgtctactagctctccgagttccatatttttattatcaagggacccttagatctgaggacatggggactggcagacaccagctgcagaacggaaccgtcttttaggaaacagaggccacgatgagtacatgatgggccccatctacctagtggaaaatgaagcggcatgtttttcttcacggtcactggtggctcttggcaatttctgactcagcaccattggactttctcctggcccctcctttcctctctgttgggtggggcggccgggggggtgcttttgtagccctccacagatggagttgataggaatgtcctgctttctaaccatctgcagaggacctgtgctttgggtcacagggtcctcagcaaattcctttcccttccagttgatttacagttggttccaattggtttacctgtttagaaaattctaagtccatcttaaatgtaaaaggtggttatcatcttagaatgtgctcaaagaactttaaagataactgctttccactgagga

SEQ ID NO: 135690 - DNA, 1022 bp, Homo sapiens
tcatggctaaagaggcaagttgctggaaaatacagttgtgctgcttactcagtgaacaaccagccaacaagctgcgtgcacgtttattgtgatgagaacttaaacacaaagcagacgtgtaagttcccctggtgtccccagttcctagcacatagtagaaactttgtaaatatttgtttggggtaaatgaagtcagtagcactacagataggaggccgtaaggaaggatggtttctaaaacaataaaaagggacatcagctaggccagtggtcttccaacttactgtgtatcagaatcacctggagagcttgttaaaacagattgctgggcctacccccagagtgtctgcttctgtaggtgtggcatgggcccaagaatttgcatttctaagaagtctcttggtgaagctgccgtcgttgttggttcaggaccacactttgagaaccgctgactaggctaatgcctgtggatgagaaaagaggcttagagaaattatgttttgcctaattgacaaaaccaattagtggctgaaacaacacagaaggccaggtttgtcctctcacttcctaacttgaggacagagaaatatattctgatgtccctaactggcagtctgctatgatagtgaccacatgcccatttctttcttgggatttcgtcccagcctgacaaccttggaacagaacaagaggacaggaggtgtcgttccaggtatgtgttagctgcaccagccactctttgtggcatctgctacccatcaaaggacgtggttgggctgggagccaagttaagttttctcattgtttggcagttgtgtccccagattttcttgcccatcttggagatcttagcacagccggggtgcttggggctcagctgccttgaaggggactcagtcccccacacaggtgattcccatgtcccatggtgggcactgagattggggtgaggggagcacacttgagggacccttcacttcctcacagcccttgcccctttcctcagggtgcgctgggaagaa

SEQ ID NO: 135691 - DNA, 1034 bp, Homo sapiens
aggagatatacctaatgttaaatgacgagttaatgggtgcagcacaccaacatggcacatgtatacaaatgtaactaacctgcacgttgtgcacatgtaccctaaaacttaaagtataaaaaaaaaaaaaaaagaaagtgtgaaggtgatgagtgctgtaggaaggaggataagggggcatcaggaattccagggatcatggggtcaggttgcagagctaaagagagtgtccggggtggcctcattgaaaggtgatatctgcgtccagtcttgagaaggtgaagcagttggccaagcagataaacctggggcacaggcatgccaggcagggggacctggtaggtattgaaggaacagcacgaatctagtgtgactgcagcagagtgagcgagagcgtgccagccttgggttcattgcaagattacatttctgtttcattttaacaaacctttgagcacctactctgtgtcaagtagtatttggcacaaagcttttcaaacctgggttccccatctgaaccatacaacacagaactctgtgactatttgttcagctcttcagctcttccaggagtgtgacacagctgatgctttctggatgcttgggagagaagttcattcagtacatctaatgcatgccctagggtattaggcctcattctctgctggaaccctgactgaaaaaggcagaattcctctgcccccagcccttgccctgtaattacagactagtaaatactatgaaagatcagagctaggatctgaagggtaagtcagagtaaagtaggtgaaatgtgaggtgggcccttggggagggagaggatactgtctaggtgagaaaacagtgggcagagacctgaggcagaggtgggagagggggtgagatggattttgtagggcctgtcacagccttgagtttaagaacacttaaactcagtctcaagctaaatagccattaagtgtttggagagagagagagagagagaaactgattgagaggatacgagatttgtgctttgaaaaattgatgagatt

SEQ ID NO: 135692 - DNA, 1009 bp, Homo sapiens
cctttactattaaatgggacactgtactaaaaaaaattctattgtttctatatttgttcatttattgattggatgttcattcatccaacaaatgtttattgaacaggtcctgtgtctccactgttccaggcacgggggatacctaatgaggaaaataagacatctctgccctctggagtttttagtttacatatgaacaagtataatatgtaggcttttggatgacaggtatcatatagaggagccagggaaggggacaggatggacaggggaagagggttgttagttttacatgtgatggaaagggagagtgatcagaaataaggagcagaatcctgtgtgttgcagatgtctgggcaggcgcgctccggaaaaggaagaggtggcgcagaggccctgacctgggaatgtgtgactagggcggaggctggagacccatggcagatgaagccaggccttgagatgactgtaaggacttggaagggagagccagtgggatttactgaggggttgagtatggggtgaaagagagaaagagtagtctaggacgaccccagtggttttctcctgagcatcggaaggttgactttcgaagcaggagagcttcagtggcacagattgtgggggatgattggggctgtgtgggtacagagtgagtttgaggtgcctgtcagagagctacaaggaggtggccattaggccattaaaatctggagtataaaaatctggagttcagaaaagaagtgtaggcttttttgagagttgttgacataaagatggtgtttaaagctatgagactgggtgagataccagcaagtaagtcagagaagagcaggggccaaagcctgagccccagagcactccagcattaggaggtggaggagatgagggagcaccagcagaaacctcgaaagaccttccaggaaggtagggggaaagcaggagactggtgttcagaagccaactgcagaaagtgttcctgaggaggaggcagagagggggcttcggt

SEQ ID NO: 135693 - DNA, 1119 bp, Homo sapiens
attccctaattttgccaatgaagaaattgaggcttctagaagtgaagtaacttgtctgaagccctgcagctagagtgtggctttgtgtctcctaagttaggatagcaatataacagtgatataataacgcatgtaataatataaaaccatacaacatactgtatatgttatgattttatatttacatgttacagaatattcaatacattgtatatgcaatccattatgtattgtatcatatataacatatgatgcaataatatatgtaacaatgatacaataataacatattgggatacagtattacaataatgccagtggcttcctatttgccaggcatggcactgaaaggtctgtgtatattaggagcttccatttgggagcagttgacatgtaactaaagtgtcctggaaatcggttttttcttaagtgaaagatcagatgttggaaagggaaaccctaagtgtgacagaatttttctcatgagaagtatgggtgtagttttgggtgtgggtaagaaaagggaaggaaacttcattctgtcatcagatacctccaaatttagaacaatatctatccgtagccattggttttcggatatgctttaccctgggaacgtgcgtaaaatacatttccgtgtttggctatttctttcccagctgcatagagggtgtcaccattattttagataatagccatggccagtgcccactttaatcacttttccaatcacttttcactgattgcttctaaggcacttgatttcagatgtcactttttgctgaaatacctggataactgtttcagggggccttgtggactaccgagaagtttgcctccaggggttggtaaacttctaaaagtgccaagtcatgaatattttatgctttgcaggcccaagaagcaaaagtaagactattatgtagatacccataaaacgatttaaagtgaaatcatttaaaaatatgaaaaccattcttcacttgcaggctacgaacaagcagcctcctgtttgactggggttgctcagcgagccttctggcttctccggcacacacacattcaggtctccatctatgcaaatggagacctccttcttcttctcaccactgtaataag

SEQ ID NO: 135694 - DNA, 1049 bp, Homo sapiens
aggcaggaggatcacttgagcctaggagtttgaggccacctgggcaatatagggagaccctgtctcttaaaaaaaaaaattattcctgaggtacagatgtttgtaagataaattttattttaattatactaagagaatgattatttactagaatattgcagtggatcttactctgatatgggggagaaaatccctagtgagggtaaataatttttttcaatgtattgtatctaaagcttggagatttataggtaataataataaaaacagtgacagctattctcattgagtatctgctgtgtaccaacaaattttaaacatctttattttagtttagttttttagagatgggttctcgctctgtggcccagactggagtgcagtggtgtgatcacaaatcactgcagtcttgacctcctgggctcaaatgattctcctgcctcaacctcccacctcagcctcccaagtctgaattcttatttaacctttaaactacccatgaagtagacagcataatggtacacatgaatgtatgtgaaaatacaaggtgtggaaaggtttagtttctatcccaaagttgttcagctaggaagtgcccccatagattcaaaccaggccagctggccttcaaagccaattccttcacactgccctcctgcctcctctggtcatgaggaaatgggtagcagaggttttcctagccaaggataaagatttgggggctggatccagccctccaactaaatgcctagcgttgatccctgcccctctctgaggaatctgtgaaatggggaagggagtcgctggagcagatgatcttgtggatctccttgggttttacagagatttgaggcttggagtagtcatacctgaaggagtgaccttgataacacatggccaggtcgggtctgattgaaggcagttcgtacagccacagcgttctcggcgtatttgtgcaaggcttggaaactcatcacagtggctgtgcagtcagccttctgcttctggtaacagttcacttttgattcttcccatttgtgaagaatcag

SEQ ID NO: 135695 - DNA, 1555 bp, Homo sapiens
caccaccatgctcaggtaatttttgtattttcagtagagatggggtttcaccatcttggccaggatggtctctatctcctgaccttgtgatctgcccaccttggcctcccaaagtgctgggatcctaagtacagacgtgagccaccgtgcccggccattcttaacctcttgaaactccttaagactttggtgaaagccatagacctctcttcccagaagaatgaacacgtggtttgccggcaccttaggaacccccaaagcccatgagacaaagccctggatctataaggccctgtcccatctgacccccggccttcccctgggcacatacctccagctacacaggtctttcatacacactgcccctttgcctggtccagctctgctcatccttcaagtctcacccttccctgacttccagcttagattaggtcgccctgctagacatgcgtcccccaccctgaatttagcactgatcaccgggataactaagtgattcttcgtgcatgttatccgaccctccccaagctccgtgttggtatttgttgagtaaatctctgaggcccctccagctatgacattctgagactgatctataagtttgcagatgtgtcataagagagtccctgagcttgtatttcctatgacattcgacacgtggtggcctttgccttcgatgatttcctccaggcctggacaggaaagttacttcaaagcagtctcggccagactcggtggctcatgcctataattccagcactttgggaggctgaggctcgaggatcacctgaggccatgagtttgagaccagcctggcaaccaagcaagatgctatctctacaaaaaataattttactaattaaccaggcatggtggcaagtgcgtatagtcccagctagtcaggaggctgagacaggaggattgcttgagcccagcagttggaggctgcagtgagctgtgattgcaccactgcactccaacctggacaacagagggagactgtctcaaaaaaaaaaaaaaaaaaaaaaggcagagtctagaggaccccagaagacagaagagtgcctcccagactttctgcctcagtgctttgctaggcctgacctccaggctggtcatcgcttttgtttatattctgggctgagctggaactcacacttggaacattcccacagtgcttggcgcttcctcgtattgttgtatttttctccaggagggaagtgaccaacatcagactttcctcccagcagacaaattccatacacaaagctttgtgtgagctaccgggtacccgcctgagagcccagcctctgtttctttggttctgggtgggtgagtgtgcacattacagggatccacgagcccttcccttctgagccatttctatctaaaaaaaaaaaaaaatctccttcaagaagtgagcaccgccttgcaggatcctgactcagagttcgtctggagccaacagcgtcttgcgtgtagggacaggcactccttaaaatgtttcctacttcagtggccacaatattacccctctggcttatgtcatgttcca

SEQ ID NO: 135696 - DNA, 1079 bp, Homo sapiens
taactttgccccaattcggtgtatgactatgtacaaatcttaactctttcagatctcaaagaaaagctctgtgtcttagtttcctcctctgtagaatgagaacagtaacagtatccttctcttatcgtgaggatctaatgcaaccacgagagtaaaatacacagaaaggagcctggtactgcatgggctaagtgcctaatgaacatcagcttactactatctctccgggtgacagagtgagactgtctcaaaaaaaaaaaaaaaaaaaaaaaaagccctgaagggtttatgtgacttgtccagctgggttgaagagctaggttgaagccgctgcccagtattgaaacaaacccttataaaatagagaagtagcttaataatagccccaaaaagacatcacagactgaagacttttctagtagtataagtacacgtgaacaagaaaatggtgacacttctgcttccagttcatgcttcttgtcagcagtattgcgagggaaaaacaacagtgatctaatgagccctgacaagagatggccagaagctgagcagttgggaagaaaactctttggtgaatctcactctgaatgtatattgtgccttgggatattagctgattaatttggatgacatattagtcatgataagcaagacatttacaaactaagcatccagaacgtgaaaactaaaattttgccaagcaccgtggcatgtgcctgtagttccagctactctggtggctgaggtgggaggatcacttgaacccaggagttcaagtccagcctaggcaacatggtgagaccctgtctcacacacacacacaaaaagccacaacctctaaaatttaaattatatctgaagtcacgcagtactcccatgagtaattttacagcatcaagtgtacgtgctctgtaaagggtttcatctcagccttctgttttgggctcttctgtctcctgaattgccatttgggaacaggcagcctagtcccgtggcactaagccagctagctaaacactggtccttctcaaatgcatgtttccagcccctctttaggacattatgcacctgaaccagaa

SEQ ID NO: 135697 - DNA, 1039 bp, Homo sapiens
gtagtattttatgaaacctgtgtttttcactggtatcaactattccattttctcattttcactactttttataaaatattaatggcaaaatataataaagcagtcaaactctttccacagcaacaatcactgccaccacaacaaaaacaccccacagaaaataagtgttgtggagaatgtgggggaatctgaacacttgtgcgctgttggcaggactgtaaaatggtgcagccactgtggaaaacagtatggcagctcgccaaaaaactaaaaatagaactaccacatgatccagcaaagtatatacctatgggtgtgtacgcaaaagaagggaaagcagggactcgaggagacctttgtgtaccatctctgtagcagcatcattcacaacagccaaaagatggaagtgacccaggtgtccactgatgggtgaatggataaagaaaacgtgggctgttcatacatggaatattattcagccttaaaaaggaaggacattctgacatgttccagtgtggatgaaccttgaggacattatgctaagtaaaataagctagtcacaaaaagacaagtaccatatgattccactagaccgtgaggtgcctacgctagacaaaattatagcaaccgaaaggcgctgaggtggctgccaggggctggaaggagggaggaatggggactatttcagttttgcaaggtagaaaagttatggagatggctgctggtgatgatggcacattatgaatgttacttattaccactgaagtggtaataagtggtaatcactttaaaatgattaagatggcaaatgttatgtgtactttaccacagttttttcaatgtttatataattacataatttaatcttaaatatctttttaaaatttttatttatttatttatttatttgagacggagtctcgctctgtcacccaggctgaagtgcaatggtgtgatctcggctcactgcagcctccgtctgctgggttcaagtgattctcctgcctcagcatcctgagtagctggggctacaggcatg

SEQ ID NO: 135698 - DNA, 2225 bp, Homo sapiens
gttcttcttctttttttttttttttttttttgagatggagtctcactctgctgttgcccaggctggagtgcaatggggtgatctcggctcactgcaacctccccctcccaggttcaagcaattcttctgcctcagcctcccaagtagctgggatgacaggcgcccgccaccacgcccggctaatttttgtatttttagtagagatggggtttcaccatgttgaccaggctggtctctttggccaggctggtcttgaactcctgaccttgtgatccgccgcctcagcctcccaaagtgctgggattacaggtgtgagccacctcccagcctaaggctggttctttgggagtctagactgcagtatgtggggtggacttattgaggcttgttttgttgatgatttttaatggcagtaaatgttggatagcacttaactaatcatcaaaatagcttttgaaacatttttgtacacattagtttctttgttgttttgggctttgttaatttgtttctttttttttttttttttttttttgagagggagtctcgctctgttgcccaggctggggtgcagtgatgcagtctcggctcactgcaagctccacctcccgggttcacgccattctcctgcctcagcctcctgagtagctgggactacaggtgcccaccacttcgcctggctaattttttgtatttttagtagaaacggggtttcaccatgttagccaggatggtctcgatctcctgacctcgtgatctgcccgcctcggcctcccaaagtgctgggattacaggcgtgagccactgcgcccagccaatttgtttcttatcataagtatggagttgcccaagatttttcccagatgaggatgatggcagctcacatttattatttcctgtgtgccgggaacgatgctaggagctttaccttcagacgtgtgtgtgtgatttaattaattctgttcttataaagagtcagcaatggcaggtattgtgcccatttgacagttgaggaaagggaggcagcaagagggaagtgactcgccaggggtgggttgtgtattgctgagaactggagtttcacttctctccccttcctggggtctagggctgacttgccggcaccaccactgccttgggttggaatgtactctggggttcccccggggctttccagcctctctgtaggactgttaaggtggcaccacatctgcctacagatttatgaagaagcccctggtttctccattattgaagtggcttaaaaagtacatttgctgaaaatattgcatgagaatctgctttggagaaacctttcacagatggcacaacggtaggaagtggcccttacgagttaaagtagttccacccacccacccacccaacactggctgtcactgagtgtcaagcagcctgccaggggaggagagggtactgagagggctgaggcgtcagtgcccttggggaactgacagtcagccaccacctgcgttgtgtacaggagacttttgatcttggctctcacaccctcatccgtgttagaggcagcatgagcctgagctgagaggtgggagacctgcctcatggcccctgggcctgcactgatgcactggatcagtgcccctccccaaccctgtctttccatctgtgcagtgagccagtacagaacagtgtctgagagcatgtgcttcaggtcctctagctgtggctttagataccagccctcctgtgtcattgttgtgggatcttgggcatgtcactctgtcttgtctaactctcagtttttccttatctgtaaaatggggaaaatcctaacagtacctaccttatggtattgagggagaattaaacgagatgatgtacataagcatttaatcagagtctggacacataagaagtgctcgataaatcttagcttttgttcttacttcaggtcgccttctactctaaagtgaccatttctttaaaaatggtaatctggtaactaaaattcaaacctcagcactcacagagaaggggaggtccctgactattgaggtatttccttttaggctggtttgttctttctctttctctctctaagaaagctgaagtccagggagtaggtttttacaattaagtaataaacttttgaagtgatcactcgtaggaagagtagagggcaattcatttcagctacacatatcccagtgcatgcaggcagaccaggaggccctgattttaat

SEQ ID NO: 135699 - DNA, 1089 bp, Homo sapiens
gggcgcctgtcatcccagctacttgggaggctgaggcagaagaattgcttgaacctgggagggggaggttgcagtgagccgagatcaccccattgcactccagcctgggcaacagcagagtgagactccatctcaaaaaaaaaaaaaaaaaaaaagaagaagaaccagcattagaaagggctccggggtgggtttatccaccctaccaaattacaacaaaggcacctgaggctcaggagattaagcaatttgcccacggtcacccagccagaagcaaggcttccgcagccccctgtgagctccagcaggacagtcaggaggagagctgtcttctgaaggaatcctcaggatgatggggtgtcctgttagtgcagcagctgcctctgtggcagaggggtccctggaaacatgaaggctcattttcacccaagtcacacagccaagagaataatatcagaatcaataaaaatatagatgcatggggaatagtcagatgggctttagtcctaactttgccccaactcagtatatgactatgtgcaaatgttaactctttcaggtctcaaagaaaagctctgtgtcttagtctcctcctctgtaggatgagaacagttaacagtacctttctcctattgtaaggattaaatgcaaccacaagtgtaaaatatacagaagcgagcctggtacagcacgtggtaagtgcctaatgaacatcagctactactattatttgtatttattattgaaaggaggggttgagagtagccaattccatgactcatgaacaatcatccatctatttattcagaaccatcacttgaaggaggatgggcgcatgtgataaccagcaaataaatacaaccactgtttccaaccaggggttttgtttgtttgctcgtttggggtcagctaagtggctatttaacacggtcacattccactggatgtcagctgtcctctcttctcattccatgtccttccttctctcagttactgtcagtgtcacactcctgctccgtttttaacaatacagtgtgtggctgggaatcgcatctgtcaggtccacatcagtggcacaaattttaaaag

SEQ ID NO: 135700 - DNA, 1793 bp, Homo sapiens
atcagtggtgtgcagttagttgggggttctgtgttttcctgtagtcctctgaacactaatgatgaggttaggatcaaattcccagaacaccactgggagaacgccaggacaccgtgaaggctgagccgccactcggttctgatgccgcatccattggtcagtgcacgttctttgagcttccacttgagtgcacgttctttgagcttccacttgagtgcatgttctttgagcttccacttgtagtgactgcctggttctttgggatgtgcaggagcaaagcgctcttaggtaatgctcgttctgccctgtgtttacaaaccaaggcctgtgccagctctactcagcctgacacccataatgagcaccatcccaggaatccctgtccctacttgttatttttttttttttcagttggcctttgaatgtgatttaggactggcttcctgcagcattactctcttttcccaggatgactgtgcagcgtgtgctgtctagggctggggtgcaggctgttggtgtgcctctggcacccccttccttctttgtcaagaggcatgggcagtattttcttgctacttccccctcctctgtgagctaaggtacagggggggaggttcatctgaatttattagaaatctgctgtctgctggtcacaattcctttctcccactttcttctcccaggctgtagtttgaaagacaggtgacaattctctgaacccaagtcccaccctgcagtctggactgctgcttcccggaacaccacgactcctgtaacagcttagacttctgtccccacagtcccttagcagcagctttctctttgcttttcactggcttgcccaaaccacacagtgactttactgcatattaagttttgtgatcaggcgattctgcagtgcttttaaagcgtagaaatggagcactgagcacaggatgctgtgtggtttgcccagggctgggttcagaggggcggatttcaggcatttgctctatagcttttaaaatttgtgccactgatgtggacctgacagatgcgattcccagccacacactgtattgttaaaaacggagcaggagtgtgacactgacagtaactgagagaaggaaggacatggaatgagaagagaggacagctgacatccagtggaatgtgaccgtgttaaatagccacttagctgaccccaaacgagcaaacaaacaaaacccctggttggaaacagtggttgtatttatttgctggttatcacatgcgcccatcctccttcaagtgatggttctgaataaatagatggatgattgttcatgagtcatggaattggctactctcaacccctcctttcaataataaatacaaataatagtagtagctgatgttcattaggcacttaccacgtgctgtaccaggctcgcttctgtatattttacacttgtggttgcatttaatccttacaataggagaaaggtactgttaactgttctcatcctacagaggaggagactaagacacagagcttttctttgagacctgaaagagttaacatttgcacatagtcatatactgagttggggcaaagttaggactaaagcccatctgactattccccatgcatctatatttttattgattctgatattattctcttggctgtgtgacttgggtgaaaatgagccttcatgtttccagggacccctctgccacagaggcagctgctgcactaacaggacaccccatcatcctgaggattccttcagaagacagctctcctcctgactgtcctgctggagctcaca

SEQ ID NO: 135701 - DNA, 1032 bp, Homo sapiens
gtcacattaacagtgctgtagagagataagaaatagcactaatgccagctaagtgtgtttttagaaaaatcaaccacagcaaccccaaatgtttcctggtctccagagcagctgttggcagaggcggtttgaatgggattccttgtagccaagagaccttataggaggtctgtagagatgagtcatgtgtgagcttgcagaaaaatgtctcccaaagtagcccggattggagattgccttgagtgccaggctgggtcttacctcaggccagctgagcgtgttccccatggccaggataagatcacgctctggaaagaggagaggcctgacaacccaccgcctgccccaccccgcggccgcctcgccgccgggacaggtgttcctctgactcgtcacccgtcttgccccaaaggctgttttatgagtaaataaataaaacccaccgtttgtgaattattaagggatctgtcatccagcaggccagtcatcttagtttctggtcatctgtttgagaacatcttagttgtgtccttgggtgattcttaccctttcctggggcttattttccccatcagtgccaggaaggagtgggactcaaaaggagcgctcctctgtttgtgtttttaagctgtagccactgcccccgccaaccccgcaccacccccccccccgcccccgccccggcttttttaaattttaagttctggaatacatgtgctgaacgttcaggtttgttacataggtatacatgtgccgtggcggtttgctgcacctatcaacccgtcatctaggtttgaagccccgcatgcgtgactgcaggcccttttttatacataagaaggccattaggtaaccactaatggggaagcctctttgaatgcagtccttcctgcttagctgtggccgaggctcctccttggaccctccaccccaaacacaatgtgaaaacccacttcctcgatgctctcacagctgcctctaccaaaatcaacttcctctgggctctttgtgccttctcttcctctaacatat

SEQ ID NO: 135702 - DNA, 1972 bp, Homo sapiens
ccaataaagacattgagcgaggagagttgataccgtcatgtttttggagcttaagcacagactggcagctgcgggctggattcagtccacagatatgttgggttggatccgcacgtgttcttgaggaaaaaaacaaaagaattgatggtcaatattgaaaaatcaggaagtcactcaaaaatctcaaaagcctggttcctgatttccttgaaaaatgagaatctctggtaactctgagcgcttgttcctgcctacaaggcagctatgggcaggagtcaggtggcggacactcccacagagcccctcaccactcccacagccagccacacctccgacggcccacttggacttttgacatttgcgtttgcatcccctcctcggagaaatgattcatgtttgtttgtttttgtctggactttgaaacctttgccccatcccttcattgactcattactccatccctcattcatcagggattgagcaccggctccatcaggctccgtacaaggctctggggactcagtggtgaactcagcagatgtcgtgctgcctgccctgaatacaggcatcctctgtgtgtcacagggtgagcaggaaggtggcaagagatcagacttgcagtggggagggatggtcaggaaactcctgtgctcctgtgacaaaatgggacttaaggtgagaggcggaggatgggtccacttagctgggcacaggcagtggggtaggggaccagtctcctggggtgggagcagaccaaggcctcctcagctgaagggaagaaggtccttggactgcatgtgtcagtttcagtcactcattcctttcttccctccttcagtggcttcactcatcgcctgcctcacggagcaacctcctgagggcctggagttgttcttgttcttgggacacagcaaagatcccggcctcctgggccataccttctaactgggctggccataagttaagcagttttgtatgtatgtttttaaagtccctttccttcctctctgtgctcccagcgaaccacaggctggctgggagtttcatcatttaccagaccctcctgccagcgctgtagctcctgtcaccttggagcagttcactgggcctgctaaagtggccacaggcttgcccagcacgctgcctgaagatggaataaataggtgtctcacgctcagtgtgctacggtttcaaatgtgtgaagatgcttttattgtaaatcgaaaagaaatttataatgactgcatttcatggtcacatttttgtcatgatatattttctcagaacagatactaagagtacaggccctatgatgtagggctactcatttttgtggcctgagaaagaggtcctcttagattggcagtcattgtatttcgatcaattttaaactcgtcaaatttgtacttcctttttcctccatagttaggaatttttgtcgtcaaagtatactcagtcaagcaatgagacattttgatggcacctgctctgcctcctttcactcacccgttttaacacttactgagtgcctccttgttggcaaacaccaagtgatgcctcgtggcagggagccagcaggaacctgtccctggaggccacagtccaggggtagaatcagaacgatcttgaacatctctgcaatttcctgtggttttcagaatgcatttatagactacctcatttcatttcatcctcacaacagcccagggggtgagggcagggcggagtatccctcttttgcccctcagggcagctaaggcccagggaaatttggttgtttgcccaaggtcatgccctggagaagtggaatggggaaccggccccctttcttgcctttatagagcactggttagagcctccctggttgctggggacacagctttccatcttaattcttcaggcttctcaatctcttttctgatctttgaaaaaaaagatctaccaatgaaattaagggaggctcactacagtc

SEQ ID NO: 135703 - DNA, 1035 bp, Homo sapiens
ggaaggggctgaccaggagctgcggaaagtgtgggaggaagatgcattttgtgagaagcagaaaaagtaagagttctgagattggcaagaccagggtcaggacctcgcctgcagattggggattgcagatgtggagctggctggaagtccagcctccttgcagaaggtcttttgctgcagttcataggaatcatagtgaaagattacaactgccaaggaagactggggcgcgcctggagtgaggatgacctttcctggtggtctctgctggctattctcagtgaacttccctttgcatttagacgacattttgttagatttctgttggagtttttttaatggacttcccactattcagtctccagaggagtatttgattcagaggagaggcccttaggtgaagtggtggcagagcctgacaccaggcaaacaattgttgtgattggagttttgctgttttgttatctcaaagcaacagaaacgttgcttaaatatgttcataatctcctctccctgaaagtagaagaaccagcgtttttagttctcagtgcttaaggcatccagggttttttgggtaaacaggaaaccccttcacatcccgcatagtgtgcagctctggcctgttcctcatcccgcccccttgcattgcctgatacctccttggtgtgcaggactctccttaacccctgggggagatcttttgagtcattgctgttctttgggacattttctttctcatgcagcagtgcctggctggggcagggccttgaggggttcatccatacctatgtatatcctcagagaatacacaaggtcataggcctcacatttgggggtcccaagtgccatggggaatcaagacagtctgggccagagggtggcacagggacaacttgctgggctggtgggggcctgtcaagtgaggcctggtggagaaaggttgaatttggagggccaggaacaagctgggatgcaggggaggctttctaaactctacagtgcttctagagatgacgaggaggtagggagtagaag

SEQ ID NO: 135704 - DNA, 1037 bp, Homo sapiens
ggccccaggctttattagcctgcagcaccttgcagggcaaatgcgaattcttgggtctaaggtgaagtgggcgggtgctcctgggctcctgtactgggagcatgccctgtggtcataaccccggtagcaggttagcttggcggctgaatgagggaaagcagatttttagggagctgcaaaggaggtctgtggctttgattgtggaagttgcttatgtttcctgggttgaatctgggatacttctgtggggtgcacccctgcagcggacccacaaggcaatatgacttttgcaggctgtggttgaagcacagaaggacatttttgtaggctttattgagggtttactatatatctaactcttagcacctaaaatgcattgcttcttaaatttttgaagctagtctgtgggaaagaatatggtcccagttttacaggctcagagaggttcagtgagttccggctgtccagacagcaagagggcggcaggcccctagtatattcattcctggccctctgaccagaagccagggtgcttttctcaggggcagggcgcttgggttcaggtgccatttcttgagtatttttctcactgaatttgagcccccacagccttgccgagtgaccatgagtcgccatcctgtacacctgctgctccagaaataacttgggttcatctgtgcagcatttctcaggaacttcttgtatagtgtcttgtcagaacggtactgttgggaaacttggataatttattttaaaaagaacattcactgagttcttttataagaactttataatatataagattatattatatctttttatatctaatataagattatattatgttttatatctttataatataagaatattctatgttcattgtcaaaacttggaaatcacagaaaagtaaaatgaaccggattggaaatcatctgtcagccaggtacagtggctcacgcctgtaatccctgcattttggaaggccaaggcaggaggatcacttgagcccaggagtttgaaacaagcctgggcaa

SEQ ID NO: 135705 - DNA, 1048 bp, Homo sapiens
tcatgcctgtaatcccagcactctgggaggccgaggcagaggatcatgatcctaggagtttgagacaagcctgggcaacatggcaaaaccccatctccccaaaaaaataaaaattagctgggtgtggtggcatgtgcctgtggtcccagctactcaggaggctgaggtgggaggatggtttgggtgtgggaggttaaggctgcagtgagccatgagagtagctgccccacagacttggtgtgaagttgaattcgtaggtatgaagtgtaaggtgaatgtcttgtctaccacctggtcaacttctctgaagtgcctgtcaatggtgacactctcttgtcctgagaaagttctccctccatcccctgtgggcaggcttcctcccgcaggcctcttcctcagtgaccaccccttccatctgtgcttcccatatctccacagtggacacggtggctcagggtataggctggagtcagacagacctgggtttgtgcccagctgtcgtgtgtaaagtcaacccaagacccagctgctatgacagacctacccattcccaccaaagcattgtctgccttctcattttttcaggcatgttatctgctcttctggtcacaaagtgagctgaagatcctgtaagacaccacagttacagccgcgcagcagtgccctgtgggcagccctgatatgctgatgtaggcaggatcctgggtccaggaactggatcagtccctagggtcctgggagggccagtggcgcaaccagtgatctccagaaggcacccgagattgagatgttgtgccccaatttcccgtttcccccactgagcaggggtggctggggcgcctggcaccttggcggctgagctgcctcttggcggggtctctctcccagctctgcagtctgcattcttctccagtcattgcctcaagtttgatggagaagtaggtggtattgtctgtgttttcctgggagcccagatgtctttggatgtttctctgactgcagggccgttcctacagaaaataatatcacaccaagtgggtgcagaaca

SEQ ID NO: 135706 - DNA, 1053 bp, Homo sapiens
ttttgtgttttcagatctttcttatgcttgctcagaatactgaagggtgcttcgctttctttttcctgacactatagttcagaataatttcttgttcatcaggttgaaggtttgcagcttccagaatgctccttttttgaatattgcagccagcaaagaattggtagccatgtctgcctctgcagtaaataagctgaagctaataaatattcacttggatcagtcctggctccctgaaatgaatttctgaaatcttcctggccctgaggagaggcagggcattgactccagaatgctcatttctggctttctttggcataaatctagcagaaaatcaagtacgaaccacctgctgtgcactcctagcaaaagagggccctatggttaaggggtccctttttcacccatgcgcaccaggtaaatagaccgtattatctaaggtccttctgtcccagatggtaggagcttttccctagggtcctgaataatacatttaaaccttttaaaaagagcatcatcctcactttgaataaatgtggtgtgttttgagaatccacaatgaggctggagaggccatgttttcattaaaccaatgcatatttttctctagatttttttaaattaagacattttgcagatactgaaggatttttaaatatgtttaacttttaaataaaaactataactttttaatgtagcagattcttcttttctgtttttcttggctctgtgtttatgtcttggtctgcttatgtatgatgtaagcaggcaggaagggtaaacagtgaagaagttcagaagaaacagctgtgggctcaaaatggaaggagaactatattagttccaagttcagacatcggtgttcctcttcctaaaactgagatttggaatctttggcttctctctgtcatcttggcagtaattttggtacaactaaacgatgcaaaagtcattcttattcatcctgcaacccctgaataatctttaaatgctgcatttgttaagccctgtgctaaactgcggcactgagaaagtaatacgaacccgatttat

SEQ ID NO: 135707 - DNA, 1765 bp, Homo sapiens
taatgtgttgaattgtctggcacatcccaaatgaaatgtggcgtctggaaggagcccttggggcctgacatgtgttctacaagagcacgttgttgctggagacgtcgctgctcccgggacgcagcctgcgtttgctgagttggtgcctaggtggctgcaggggggtgttttgctgcagtctcctggagcacagccacagaggccctgggtgtggctcaggaagcctcctatgggcttaacttctgcctctgcggttgtctctgtcctccaagcccaaagcaaccagcacattcgaaagtttcattatccttcttgctgctgtagtggcccagcaccacccctaatttccagaccttgcaggttttttccccatcagaatccagcccagcaaggctatcactttgcactttgcactttgctctaacaaccaccgccatgaccctagcatcctgtctctttacctgcaatgcatatttttgataccaaggaccaatagcctgattcctctaataaaataaaaatgcttttcagacttaccaaccacttattcattgtactcagggagtagcaagagccacgactcagcatgttaaaaggcaggattgaagatgaatacctggccattgtcctgattttataccagtcagacttaactgaaaaaaaaatgtgtctcgttcgaatttaactttttgggggatttaggttatgttaatgctatagcttcattaattaccccatatcaataaaaaaggcagcttttagcctccgagcataagagaggaaaagaaatggtggtatcaaaggaaaccttcaaagacagccagagctgtctccagggtaatttctgatccctgcattcttcccacttcaaagttggctgtgtgtgtgcatgtgggtcgagggggtggggagctgaatctgatttctctaataagtgttggcatcagccctgtttgatatcagatgcagggaacattttgatttgttatagcctttgaaattgttcagatgaccttcagaaaaatggcctcttgttacttctagggggaagggtgaaagccagggaaaggggaatccagtttaattcatatgcagaggattccctgaaattgtgctttcagcagttttttagtaacaaatgcatgtcctgattgaaagtgaaaagttgaagaataatagacctgtaacactgtgttcttgggtgaggctcttgttcactcttattctctggggagggtcagcagatttgagagggtgaccacatagaagtttatggtttggaaaatgtgggtaacaacatggagagatccgtcaccatagctggtttgcagcattctacccaaactgataggcctatcacctgttcaccttgcaagacgaagctactaaatagaggttctaaaagttggaacctcgtgtggcttacgagttttatttagataattttgaatcgattccactgttttttgaaatgaagtattgataactttctgataagctgccaaaatgttcacttgctgttacatgaattttagtggcagtggttgtcacagcagcaggcctcaaagcagaactatgctcccagaagagctgcgcaagtgacagcttagggagcgcgcagccccggcatcctgcctgctgtctaactggaaggcagtctcttcctcccagggtaagagctgggcctctgcacacagacctggtttcaaattcccccacctcgcattaactatgcaatggtggacaagtcacctaacttctctga

SEQ ID NO: 135708 - DNA, 1049 bp, Homo sapiens
gtacttgcctttgctctgtatattgtactctgtacatattgcataggtatacatagggccatgagcacgaaacaacgtgctcactaaatcctataattgccagaattgtagaatcctcgcctttgaaaaagaaaatcttaaaatgggaaagggaaggattttactttttccagcagatagtaaacatatgaaacttatcctcagagtttgtaagccaaaaatataaataaatttagggaagttagacgagttgaggcccaaaacatttttcagtgatcacagaaagaacttgctgttattgagagttcattttccagtgctggaggatccacagggccagcaccatgaatccagtctcactggattggccaggtggtcatttcttctcacacccctgcccaactttgtgtgatttgcgtgttcaagtgtcagcttacatgtgttttggcaggtgaccttgggaaaggtgttgaaagtgatcgtcgtcatgcggagcctgttcattgatcgaacaatagtaaagggatataacgagaatgtctacacagaagatggcaaggtaagcattgtgcagtcttgtgtgttccttggttttctgtatcccagaacaagtgtagtcgaattccagatgaatggcattaaaaactagcaatcatagcggaaatgatcagcaaacatagatttgtcagtgtgaggatgcacactttgtgaaaaaacatttcattctctctgcttgcattctccatcaagcttctgctttttcctctaagcctgatgcccttagttgaatttctaatttatcaccttagaccccagttgcctcattaaatgtgtcttctgaggaaatggatttttttccccaagtcaagcagctcctcagtagcccaaggttcagcattttgcttttcctagaaccacgaggaaaattcccattcatttgacacaacctgatgacactctttttccacaaaactaacaagtcgcccttaggaagtggctgtgcacagcagcatatattgaatactgctgttgaaagaagacgtgttatt

SEQ ID NO: 135709 - DNA, 1016 bp, Homo sapiens
aggctggcctttttggtaagtcccagctctagtgtcaaactggcttatgagatatgctactaaggcgttcatatttattcagtaaatactcactgagcccctggagataaaggcatagttctaggcactgttcggcgtggaccacacgaagtttttgccctcacggagcctgtctgtagcatagaaaatggacaagagaccagcaacttgcataaaatgatgccagatggtgataaagctcagaagaacagaagcggggtggccagagcacaggagtgaggggaagaaagggagaagttgacaccacctaagcaggagacaccagtctgggcctcacaggctgggaggagggctccctgcttagtgaggtgtccctgtcattttaaattcagatgtacaaatttggattcatcgtgacccttgactcatgacacactgtcatcactaacgcaggcatggccctttcatattggtttatttatagtgcagtgggcatctttgaacatagaactggaccaggagctgcagcatgattggcagcctgtgctgcctgggattgccccccaccgcccccgcaggagctgctgtcccctggcgtgtttatcattctctctcctgttttggaggggatgcttcaccatatatatatgcatattcctaaatttattctttaattttccctgggttttaacttaatttattttaaagggattatatgttatcttcagggacttaatttttcactgaacattttgtgttttttactaaatttcattcaatttgttggtttagctatagcttattcattttcactgataggaaatattccattatcagaatatatactaatttatttatccatttttcaatcaatggtcattcgatttatttctgggtttctgtttttctattataaacagtcctgctcttacattttaaaataatgaagagtataattggattgtttgtaacacaaaatataaatgcttgaggggaaagacaccccattctccatg

SEQ ID NO: 135710 - DNA, 1089 bp, Homo sapiens
aattttcataccttctccaagggatctgtgacccaagaaagactaacaaacagccgggcgtggtggctcacacctgtaatcccaacactttgggaggcagagacaagcagatcacctgaggtcaggagttcgagaccagcctggccaacatggtgaaaccctgtctctactaaaaatacaaaaatcagcctggcatggtggcgggtgcctgtaatcccagctacttgggaggctgaggcagcagggagaattgcttgaatccatgaggtggaggttgcagtgagctgagattgcgccactgcactccagcctgggtgacagagcgagactccatctcaaaaaaaaaaaaaaagactaaaaaccactgatgaaagaaatcagaaaacccaacagtcttttataaagtccattcatggaccccagaaagcctttagtttttggaggaaatatttgtgtgtcattctaaaggctaaagtagggtgattgggtgcagatactagtaagtggatttgaaacaatcagacgtcaggcaatgcaaggggttgcctcatgaggtggcaatggggggtatttatgcagaccacctgttggagatgctgttcaagccgtaaattgttggggacactggatgagaggacctctgaggtcctggtgttctttaattctcggactaaggccattgaaaggagcaagctgggctacttgaagaaaattagaagtgaacaaaagtatagggctcttgaaatccattttcgccatttgaaaatggtgggattgtttctgatgcagcggagatgttgaggcagttgagactgaagctgtccttctggaagagatggttgggttgtgctggaaaaaagtggattggaaaccgttgagagtcttaccgcagctagggcaaagggcagggaaacagaatgctctggttgcttaaaagttcgttttctatccgaacatactgaagttatggatcataccttgatttgaatctgtaatttctagaagtttgtgtttctagcccagttcttggaccatcaagccagctcattgaccaaatacttcaaaaaggagaaccaagcagctctccat

SEQ ID NO: 135711 - DNA, 2193 bp, Homo sapiens
attctggagctgcatatcaagctggaagactataaaggagctctgcagctttcttcgaggtttgttttgtggagttctctggttgctgttgttggtgacttttgatggctaatgtaatggacccccgacacctcacatcttcctctgctaaagagaactttgtattgtagttgttttataatggcctaatttgggtctccgtggcttacttttaatgtacagtctgttcattcaggaaatatttaaggcatgcttagcgggtgccagatactgtgacaaggtgctgggattcagcatcaaagaagacagtcataggttcccatagaattctgtaggggagttaggtgttgaataatcactcaaaaaattatttaatgacaaaggggacaggagcacaaagcaaatttaaaagtaccatgagagataaaatggggtacactgactgatggggtgccaagggaagtgtgagaccgtacttccctgaggaagcatcatttaagatgaaaactcaaagacggaagcatgaataggaatgacccaggcacgggggtgagaatacttgtgagaagaatcttccagacagagtgtgcacagtgtccaagatagagtgagcctgctcagggacgtggaagaagcctagatgaggctgtaacagtcactgcagctggagtgaaggtctccttggccctcctaggacttgagactttagtttaccactgagctgtgccttaacagtgatacaaaaagtagggagccctttacttatacaaacaaggagcatgggtgtaaagcatgagaaatgtggctttagagggcaaaagtggttaccccaatcagatgacctctgaagtcatgggggtaggtctttgattttgttggaaggatgagtaacagtcagaggcaggtgtttaaaaacagacacaaaagatacgtgttggcaagaatgtggagaaaagggaaccctcacacagtgttgatggaactgcaaattagtacagtcattatggaaaatagtatggcggttcctcaaaatgttaaaaatagaactaccatatgacccagcaattctgctactgggtatatgtccataggaatgaagtcagtgtgtcaaagagacatccacatccctatgttcattgcaatattgttcacaatagccaagatgtggaatcaacttaactgtctattagtggatgaatgagtagagaaaatgtggtgtatatacacagtggaataccattcagcctgaaaaagaaggaaatcttgtcatttacaacaacatggatgaacctagaggacattatattaaataaaataagccagagacagaaagacaaatattgcacgatcgctttttttttttttttttttaagagatagggtctgatttgtcacccaggttggaatgcagtctcacaatcatggctcactgcctccttgaactcctgggctcaagcaatcctcccatctcagcttcccaagtagctgggactataggtacataccaccacacccggctaacttttttttttttttttttttttaagagacaggatcttgccatgttgcccaggctgatctcgaactcctgagctcaagccatcttcctgccttggcctcccagtgttggaattataggcataagccaccgcacctggccacgatctcacttctatgtggaatctaaaaaagttgaactcatagaagtacagagtagaatggtagttaccaagggcttggcatgggggttggggagagatactgatcaaaagatataaaatttcaagtaggtaagaggaataaattcaagagatctattgtataacatggtagctgtagttaataacaatgtattatattcttgaaaattgctaagacagtagattttaggtgttcttaccacacacacacaaaaatgctaaatatgtgaggcagtgtatgtgctgattagcttgctttaactgttccacaatatatgcatatttcaaaacaacaggttgtacatgataaatatatacaatctttatttgtcaattaaaaaataaataaacaaaaactagcctgcggctctatcacagaaacatgatttaaagatgatcagaattagtagattctttgtaccccctatgccatttcagttatgttcacttctgggctgcaacaaatatatttttatatttatatatatataaa

SEQ ID NO: 135712 - DNA, 1033 bp, Homo sapiens
ttctcgttaggaataaatgtaagtatatctttgttttaaaaagatactcataaaaatagaaaaaattaagcgtaggcattcgaagagataggcatgaaggatctgaaacctttgctaatgagaaagggcacattctccagcagtggtggacaaatgaggggaggctggggcactgagcctggctccttacagctgttagtgtcataaatacttttgccatgatataggtgtctcccttgttcccatcttcttctgcttgctgcttctgggggctttaaaaattttcatgtttaagttagggggcctgccactttaagctagtcacacttgaaatatatcccttgaaattatctaaacttaatttctggccattttgtttcagaaatgctaacctcagggggtctttgttctctacgctaaaacttaatctgtttggaacaattccatttcctctctgtagaaattgactggccatggctcctgtgaatgatacggttgctattatccctgaacactgtaaaaatgaactttgaaacagttgggtaggacccaaacagaaaatgatgtatggcttggaaatagtttagctgaacattatgctttaatattttactggccattgcagcacaggtttagaaatttatgttcggctttttaaagttttatttttatattagaaactttcttgcaaaccaaaatagatgaatcaagtgtatttgaatcaatgctgaaatgtcgtccacatctgtggaatgaaaatcattagccagttacttaaaattcagataaaatgaaaccatcttactatgaacttcatccagctttcctcttcactaaaggaaagaatgccaagaatatttacaaaaatttatttaacaggattactgttttattccaaaagatttaaagaaaataccaaaacagatactaattgagcataaaatagcacccagccgggatggagttgagtatgtccaagcatccactttaaacacaaactcatgatttcttgaatctgtgtttgaaaatagat

SEQ ID NO: 135713 - DNA, 1061 bp, Homo sapiens
cagctgtgctctcttcacagtgtgtcaggtgtccttcttcccagcatgctttttcattattaaagttttaaagtccataaaagtagaatgggaaaatgaactcccatgggataatcccccaaatcccaaatcaccaacatttggctgtgttttctttatctatcctttgtttctttcttttttgcttttgcttttttgttgttgctactggaatgttttcaagcaaatcccttgtgtcatgtcattctacccccgaacacttgtttctgcaaaataaggacattcactgttataatcacaatgccattatcacatgtaacataattagtgattccttcatatcatcaatactctgcctgtattcgtatttccctacttgtctaaaaatgcctttttacagtttgttttttatcaggatccaaacgaactccacatgatctgtttggtgtttgtcttctctactgttctcctcctagcctccatttatcttgctgtgctttctgtgatgtctctttgctcttatgtctcttttaatttggtctttatttctaacattgttttccttcacattttactgagttttgccagttctcatttcgcatgttcttcttgtccagccatctcgcttctgagaacgtctattcctgatttgtgctgttttttcaaagcagcagttagttgtttccttaatttctttcagctcagtttgaaataattggttacagttttcaccggcttgtggtccctgtttcgtggtgtggactgtcctgttcgggttcaccttgttttctcttgtagtactgggtgtagtgtttctgtgttggccccgtggagggctcttccgtggagagagcatggtagccagggcggcctcctggcctcagtgaggacgaaggtactgggtacctgtctgcactctgtggctgtcctggccttcaggtgctgtgctggtggccctgccaggccctggacagcccaccctccttccactccgggcgtcccgccggctttgtttgagttctgctcccagccacgtgtccacagaagaggagctgcttttc

SEQ ID NO: 135714 - DNA, 1060 bp, Homo sapiens
actaataatagttctgtaatgtcagctgtctagtcagtttataaatttctggttgtttcataggtgtcataatttttttaagcagtttgtttgaattgggatccaaataaaatccacttcttgattgatatgtcttttgtgtctttttaaatgtatgtatatataatttttccttccacatctccctttttttccccctgaaattttgtcgctgaagacaccaagttgttttccatagtctggattttgctgacttcatctccttggtttcgttaaacatgtgtctgtgcttggtctatactgtagatttggtggctgggtgaagatgcttgatcagagtcatgtttgatttgcttgtttgttttcacaaggctgcttcatcgatggtattgtgttctagcaggaggcacaaaatgtctggttgtctctctttttgatgacgttagctgccgcttatgctcagtgtccacattcctcagggtgcagggaggtgatatagtcatgccatcttcccggttcatctatcagctggaacacgtctacaaagacaaacttccccatctcaaacaatttggttgctctgtggtataacttttacaggacaggcagagtaaatgcttgattggtttctttgtgttctagttttcagaatagagctggttgtctagcacccctcaacaatgaccaatttacttattttctaattattcttgaaatgaacataacaattatttttggctaggaccattcatttttgcaatgacctaagccctttacatgaaccaagagcagccccaggctattggggtgctgctgtttgcactgcattccagaaccccctccagagagaccaggacacagctctcagggaggggaagatctcttcacagccagccgcagagcagagtggtccacgccacccagagagttgactgggaacaagggctgtgttggagaaatcaaatcagattgccctaacgatggttttcaaggagtcggacactccttaacaatcatgcagaccaacttactcttacagacaaggaaaatgaggcccaga

SEQ ID NO: 135715 - DNA, 1033 bp, Homo sapiens
ttgtcttcatgttgaggagcaaggaggggttggtcttgctgcctgtggggtagcagaggcagaagaaaatctgagtataagtggactcatgcggttcaaaccctcgttgttcaagggtcagctataaatggcttctttttttttattttttcaaatggcaagagccagaataaatggctcctttaatgaataggtaccactgatacattaataactattcctttgtagacaagcatggctaagtagctaacaaaaactatttctcaatatcatgttgttttctgaaattaaaaagattgagtagccactatgctataggaaattttgaaaaaggcaaaagagctcacaattttaggtttttaataccatgattttacttattgactgttgtatttacggaaatgatttttgtagctcacatttttaaaaactgtaaacctaaaaatcgcctaaaccagtccttgtcttaatggacacagactgtggctttttcagacagtttttgctgcattggaccttggagcacactctctttgtggaactggagactctgaggcccagggagggccagccgccccaactaagagaggaaccgggggccatccccagtgtcctgattcctacttgactgctttccccactgccccagtagaattaatgaggttttcttgtacccattccagcagggagaggaccagtttcacgcataattcttcatgactgcccatagcattttaattgcctgttattgcgtcaaaatattgtcctcctgacagctaagataatgtaaatagaaagcaagaggagacagaaaattgaggaaatttgcaagaaaataagaatgcctttgaaataccttaaagactgacttaatatcatttgaataaccgtttgatctcttgcattgccaggtgtgattatttagtgggaggtagtgatttctttaagacagactctatttagaatgaagtttctctcagttttatgcagctttggaaagagctcaagatcctgcttgtccacattcccaccg

SEQ ID NO: 135716 - DNA, 1077 bp, Homo sapiens
tgccttggttgcaagctgaagttagattttaactagtacatagtcagtagcaaggtattttgagcaaggctctgctggcccagtgacttgccaggtagatacattgcttcctaacggcaggtgtttgagtacagctatatcatagctgtaggttataggcgaattgatagtgatgccaggatttgcattgttcctttttttttttttaagtatgtttatgtggaggggagggatacatgaaacaggatggcaacatggataattgctggagctggctcacaaaagtttattgtatggttctctctactcttgggtatgttcgaacatttccataatagagttaaattaaaaataatacaactggtttcacaacagtgtgaatctacttaataccagtgaactgcatgtttaaaaatggtgaagatggtaactgttttatgtgttttttaaacaatttttaaaaatggttaggatggtaaatattatgttacagatattttaccacaattaaaaaatacatagcttacctacaaagggggtaatcagaccctgtccagcagccacagaacctattgccgaagcctctcaagacacgttttcatggaataaaaggttaggagaaatcctaggctcctgctgtggtcctgaaagggaagttctaggcaaaatattagaaccagacctgtttcctagcttgttttctaagaggaatcctgaatagtgggatcctttcaaagtgttataaataaaagcgttcttttctagcattcaccagccacttatataatgctataatccttagtttcttcatctacaaatagggataataatatttataccttatagtagttacagagtttaagtgagataatgaatattttaaaatctagcaccatttctctctccacacttctgaagatcctccttcagaactaggtttgcctagatgacaggttggtaggtgcagcaagccaccatggcagtcgtgtacctatggaacaaacctacatgttctgcacttggttaaagtaaaattaaaaaaagaactaggtttgtaaagtacagttgatctttgaa

SEQ ID NO: 135717 - DNA, 1051 bp, Homo sapiens
caaacttctaaattaagaccaaaacacttctgatattaaacattgaagtaaatgtgagctatacatacatttaagaaagattaatagaaacaagataattatttacctgcttgttccatttcagggccttgggtggctggcagctatcccagcagcttagggtgccaggcagaaaccaaccctggacaggacgccatcccatcacagggcacactcacacacacccgctcagactgggacaatttagacataccagttcacctaacgtgcatgtctttgggatgtaggaggaaatcagagtgtacggagaagacccacacagacatggggagagcctgcagaccccacacagacagtggccccagctgggaatggattttttttcctgtcatcgatgttaatgaaatgtgttgaacaaaacattatttgaggacctgctgtatgttggtctcagttagtcatgatgagatgggtctgtggacccagtggatggatccactgtaaactagaccttggccagggctccatttattacctgctccccatgtgcccccactcggaacgggggcatcctgaagcctcaggtctctgagaatcagtgttaactctaagaagtggctctctgcagctgacgctgactctgcgtgagctgacagctggagcccacgtgttgactgtcctcccacagctgggtagcattcctgagggggagctgagcaggcgtctctgtgtctcccaccctctttcgtcctcagctgtgatactgttgctgtatggctaagatcaagaatacctgtattcatttctcccccttcccctagtattctttttggtacagcctttcaacatggtaaataagggtctgtaaggaaaaacttgaattttttaaaaaaaaaaaaacatgaataacaactgatgttaaactatggtgttatttatccagcagatttaggtaaggcacggtggtagactctagaaatacagagagcccttgttctcaggaatttacagtcaagctggggatttggaacatcctgcatatgaaaataaa

SEQ ID NO: 135718 - DNA, 1154 bp, Homo sapiens
tggttagcaaatatttattgtacctactctgtgtcaggcatgtttctaggccccaaggatataaacatgggcaggacagacattgtcccatctttgttaagcttttcatttcgggggtgggaggagaccaaacaagcacccctcaacaaattaataaattaacgccataatttgtagttatgcttagtgctaggaagggactacagagtggggtaaggtatgggagtgggggatactgttaaatagggtgatcaaagagggcttctctgaggagccaatatgaggcagagacttgacgaatgaggaggagaaagaccagtgaagagccggggggatcccaaggggtgactgctctggggatcctttctctagctggtggacgttcttatgccaccacttccatgattttcaggctttcttcacagttcacacttgcttccaggataggaggaatgtaaccagccagcctcgacaagtagcttgtgtctgttgcttgcatgcacaggggccatatttttcaaaaagaaggtcactacagggacagctgcttttagtgatgcaagccagagttttgactatttggcagaatgcttcttaagggccattattctatctgttgtttctcatgtgtcgatttggtgattctgcaaatctcaactttcagctctctaaagtctaatgggccttgtaacttgtcattttccctgcatggattgtctactgaggcaagatgtttggcgagaagtaaaagactttctaatggtcccataagactggagccaaaaagtatttgttgctaactctctcttgacaaaagtcagttcttagtccatctgttcaccatttgttaatttgcattggcttgaaacctgtttacaggtgacatgctattgtgaggacacttagaaactattttaggcattagggcaatcaacagactgttctcatgccaaaaaaaaaaaaaaagagcgagaggtgttcacaactgtcattataaatttataataaatcactcaaaatagtttcaaagagaaaagtggttactgtgtcctaagaatacaacatagaaatgatttcctatacttagtagcctatttcctgtgaaaattgactgctgccttttcacatcattgagctttttgggcttacattat

SEQ ID NO: 135719 - DNA, 1044 bp, Homo sapiens
ggagggagaaatgataaaacacgaagctcctgaaaagaaaggactggcctttcttcccctcttttaggtgcacgctggttttaaaaacctctttctcagcagtgctcttactattttggctctcagcagttagcttttctggagcggaatagctgagggcaagagtacctggtgtgtgatggcagtgttagaagctgaatttttcaaagaagcagagactccactagacttagagccactcccttgggtcagggccttggagagccaggcagcgctgtcacgaggggcaccgctgtctttgagacaacgtggctctggcaccagtgcacactcccctgaagagggggcagaggcccgaatcccctaacactggtcaggcttgtgccacctccaacagatggaccagtaacaccttttcacatccctccctgtctttgaaaaccaggacataagtcaccagtttgttgtcttctgcctttgggaaatcctcacattttctgtgtgggaagcacagccagcccatgtcactccacccttttctacctcctgccactctagtagcagttcacataccatagcctgtataccttgatttgcaatttttgggccatgctctgctcccctcccccgcccccacacacaccgacacttttttttgcaagggtaatacaaaatgcagctcacaggcctatttcagactttattaaaacatcatttcccctgccttgttcccagatttctgtgcttaatcatagaaagccagcttgttcaaatatacattattcttgcttggaaaactcttggcttgtcttcctccccacctccttccctattttgtaaccttgcttcaccgaggcccttcttattaaatatcataatttgctcattggagagttatttgtaaacttaattaactctctgtcagtgtttgagttaattttctccctttcgttttagcctccctggccatggtttttcatactctgtcctgtgtctgttaaagactttgtaaatagttttgaaatgccagttggtgatatatgg

SEQ ID NO: 135720 - DNA, 1467 bp, Homo sapiens
ttatgctctataaaagtttattatagaccattcaagctaaaacaatatagtttgaaagtatgccacatcaacttcacttaccagctactagcagtgtcagtataaaaagcaagatcttacaaccaaagtcaaaaggtgtaaagtgtggttatttttataccttagcatcacctccagttctaaccatgctggctgagactgagacataccctcccatagccactccttggccctcaagggacagggcctgcaggcatgtgctgtgaataaggcaccgttggcccttttagctctgacttacttttcatttggagaacttatgtctgaagttaaggttcagcatccatccatcaaggtttcacccacatccttttgccgcccccctttctatcctaaagtgtcctttagtgttggagaaatggctgtagatgcagaaaggctcttgtatcagtccattagttgatgaagaaagagctacttgtagggtgacaggagatgaaaagaaacttaaaacttgtagacactgtcctctgaaagaaaaaagggatttgttgttgttgttgttgtttgagatggagtcttgctctgtcacccaggctggagtgcagtggtgtgatctccactcactgcaacctccgctttgtgggttcaagtgattctcctgcctcagcctcccaagtagctgagattacaggcacctgccaccatgcctggctaatttttgtatttttagtagaggcgggatctcaccatattggccaggctgatcttgaactcctgaccttcagtgatctgcccgtcccagcctcccagtgtgctgggattacaggcatgagccactgcgcccagctgggaaatgtttgaaacattttgtttgaaaactgaattttccagttgagcaacacagtgtgcttggtggggaccgtaaagggtttcctgtagaagcttggaaagggcggcccttgaaggaagcttctatagaaatggagccatcatgtgggaccgtgcagtggtcacagtcgggtgggagggggagtagtaaattttgccgtctctctgcacatttgtccaactgatgagaaaggcctttgagagttggcctacatcaaatttgccttatgacagggatatctgtatcttacaggtgtacatggagctggcagccaaagaggtcaagcttgtgtctacagctttttgtgaacactcatcttcttccactgtgtctgtctgccagtggtgacgtgtctgcatttcgacaagatggtgtgtcactgcctcccccaaaacagggggccacccatttcctcattctcccattaatctctacgcatgggggtcatacctatgctaatcagtgattcttctacaaaaaaaatggaaactgaatttttgttaatttgtttctgtttttctaccttgaaaccaacttcccagcagcattaggtaactagatcaagtccaagctct

SEQ ID NO: 135721 - DNA, 1020 bp, Homo sapiens
gtttactaacaagttccttttgtttgggtgctatgtggtgtggcgtacatgtgtgtatgggctttttttgttgattgggaactagaatatatattttaggaatgattttggaagctcttttattatactgtgctgcctctttgaataattgttgttagaattgttggttgtttaactgtatgcagggttgtgccccctccagtaatccattgtcattttcctcgtttctgtggttttttttccccttaggtcttgagtaagagctaaagcttgagagtttttctggtgtgcagaattttttctttgaatttctctttgagggtgttttagtattctttggtttgaagtggaaccgtgggagctgctttgtgattcaggaaggtgatttatcatgggttactaaagaaagaacttgaaccttgaatgcatacatttagcctgtaaagcctttccccaaaactctggactgccagtgacagaaacccagctgggtctagatttagccaaaaaaaaaagcatggggccttcattggttcaaggaactaaaatgttcagggagttacttctctgtggctgaactcaggaggatcagggtgcttgggtgggtggcaggaacatcactctcctgccctctctaggactgctttcctttgttgtcctgatgctctccaagggataaaaaacatgactcagcagctgtggatatacatagttcttatacctggtgacctcccagtgtccatgtcaggctctgaaaaaggattctggcccaaacttgataggtgccctctgagatgattcactgcacccgtgggtgggatcctcagctcagagcacctgaaacacaggaaatggggttccttggagttgggagagagggagttcccggaagggatggatgcagggcagttggagaaatcacagatgtctgttgcagttttttaggccagacgtgggactgttccagctctacacagataggtgtttggaaaaggaagccatgttgatgtattccatggg

SEQ ID NO: 135722 - DNA, 1021 bp, Homo sapiens
gcaactcatctgttggaagaagtgggtcattactgccggagtttcctcgagtccagatcttgcggatggcatcccctggtgtcgttcagggtgatgctctgtcctctgtctttcctgtgcgctcacagctgggtctagaggcttgatctgattcaggttcagttgctttggcttcgggtgggggtgtgttcttctagagacgctcactgtctgctggcctctcagtgggaagttctgggctggtgcggctcagtgcctggagctatgcattcatcagggactgcaaattctctcgtgaaatgcttctataaaaagaagcttcccctcatcaactttcggttaccccgaggtacagtttatataggacaggcaggataaatgcttgattctttccctttatttaccagttttcagaataatgagtcgcctataaatatttgaatgaatggatgaataatacacctgtgaatgaactgacgggggtgtgggagttgggggttctatctgttgccctcaagggcgtggctgtgggccacaacctgacagcagaggtccagcctgaagccaggtgcctttctacacaatgaagtgcagcccatggccaagtctctgtctacaccaggtgctggcagcagcctctgtcacccatcaacccacatcagtcaaaggctagggtgatcagaagctgcattactaagaatctagcatctgggacaaggcagtatcatcactctccccaactgagatgtgaggaatccttgaaaccagcatcagagcagagaggagagccgcgcagtgactgcaggtgtggcctttggaacacggcgttgatctctctgcaggaaggggaatcaaggagtttctggcctaaaggttgggctggtggcctccagggtttcttcctgggcagcccaacaccctcctgggcccctcctgggaggcgctcctttccccagaggccaggccaggctgcccacaagctctctgacatctctgccctctcggtgtctccccaggtgca

SEQ ID NO: 135723 - DNA, 1022 bp, Homo sapiens
tcctccactcccctgcaaaggagctatggaggggggccaccccacaacacagcagccccagacatgctcagtggcctctgctgagtttctgccacctgtcggagtcatagctctttggagatgggaaggacagcgacccctctagttgcccagagaggggaaggggctgacccaggccacaccagtgccagggcggggaaggtggggctgggacgtgtttgatcccaaggaaggaagccagagtcttctctccaggcctggccaccctgggaagtccccacctgccgtccagccgcgggctcacgtggacccagtgtggggagcatcccctggggagtgtggagatgctccctgcgaggccgggagagtgggggtccgagaagacggcgcccacacgtagccctgaccgcgcgcccgtgcccgtgtccgtccagagtgtaactgcaaccagataggctccgtgcacgaccggtgcaacgagaccggcttctgcgagtgccgcgagggcgcggcgggccccaagtgcgacgactgcctccccacgcactactggcgccagggctgctaccgtgagtgcgcgccgtcccccgtgggcggggcctgcggaaaggggacggggcaggaccgaggcagtgggcggggcctagtgggacggggcaggggcggtggactgggcctagcaagacggggcagggccggggaagtgggtggggcctagtgggacggggaagaggcggtgggcggggcctcgcgagacggggcagggccggggcagtgggtggggcctagtgagagcggggcagggttgggatagttggcaggggcctggtgagatggggccgacccgggggcggtggacggggcctagcgagacggagctggcaggtgggcggggacaggatgctgctgaggtccggggccgggccgaggggcgggtccaagagctcggggcggggcctgatgcgacctgaggcacggtggtgcctggtgggaactacgagaaagaccgagctggggttggt

SEQ ID NO: 135724 - DNA, 4212 bp, Homo sapiens
tctactaaaaatacaaaaaattagccgggcgtggtggcgggtgcctgtagtcccagctactcgggaggttgaggcaggagaatggcgtgaacccgggaggtggaggttgcagtgagccaagatcgcgccactgcactccagcctggcaacagagtgagtctctgtctcaaaaaaaaaaaaaaaaaaaacaaaagttgaagttctccattataggttgtgaccaggtcttatttttaggaatgggactttatcattttttatttgaatttattttttcctttcatccttgtctgacgagtaatgaatcttgagaatatgttcatacaataatatgtattatttgttcagaaatgaaagctggaactctatgcttcccaagcagtgtctctttggggtgtaattatttctcccttctcattgtttcaaggaaaaccagcattggaatcagctgattcaggatgctcagaagcgtggtgccattattaagacctgtgacaaaaactatagacatgatgcagtgaagattctgaaactcaagcctgtgctgcagagaagtctcactcaccctcctaccatagccccagaggggtccagaccccagggtggtttgcccagcagcaagctagacagtggatttgccaagacatctgttgctgcttctctataccacacaccctctgactccaaggaaattactcttactgttacttcaaaggaccctgaaagacctcctgttcatgaccaacttcaggacccacgactgctgaagaggatgggcattgaggtcaaaggaggaatattcctttgggatccacaaccctcgagcccccagcatcctggagcaacacctcctacgggcgagccgggcttccctgtcgttcaccaggacctgagccatatacagcagcccgctgctgtagtggctgctctgagcagccacaaacctcccgtgcggggcgaacctccagctgccagtcccgaggcttccacgtgtcagagcaaatgtgatgacccggaagaggagctctgtcacaggagagaggccagggctttcagtgaaggggagcaggagaagtgtggttccgagacccatcacaccaggaggaactctaggtgggacaagaggacactggagcaggaggacagcagttccaagaaaagaaagcttttataggaaagcccagtgacatgggccagcagccacagcatattgtaaactgaagatgaccagctcgtgggaccatctagataagcttgttttttgtaaggagtttgtgtgctgttggaaaacatggaaaatgcatccttaacacctgagcctctggtcatcttcagtattttctgtcatttgcaaaagctttcagagggcattgtgtatccgtaataatgtccttgaagtcagagactggaaatgttgatctcttagtcttctatagacaaggaggtcagactggagtgaatgttgtaaaagttgaaatgtatatttgtatagcaaataacaaaatccttttaaaatttaatctagtagaccgcttttctttccccctgtttaaaatgttaatcagttttcaacagaacaaactttatattaccaaaaaaaaaaagatgggaggagggcgggtcctttcaaccattgttagagcaagacagataattatttaacagcctagcttggaataagctgagttagtgctggtgggtcaggtgtctctggctctattaaaaaaagcaaaaacccccccaaaaacctggagtctcctaggggacactttgggcagcacggttatgttaggtaaagtcttgctgacatggtgcatttttagatagagtgcattggcccagggtattatatttctgtgatgagttcatttacctgtttcagtatgcacatagttccctagctaaaattcctaatcttcttgagagagaagaatatggagtgaaagaataattcttgagctatcattcaaatgctcccagcatattgtgagccttgtgtgactggtgaggtacagacatttggttgccaaatgctagattagcgctgggtcagctgtggaagaatcgcctcagcttacagattgtcagacagatctaactagttttccagaaagcctgggaagctgtgtgttcaacatttcccaagggattctgatcaccaggcagcttgggaaccactggggcaggccaaatagaatattttgggcgggaaagaagcacccgatttaaaatgaagcgtaaccagaggagttcagaactgggaagagagtggtagacttcctgtgatcttcagaaatcatctacctggtaaaaatacatgctgtttagaatatctgataggtgtttccagctactattagaggtgatagtgcttttgtgggggaaaaaattggtcatggtgaatggagatcgaggaagctcgggacaagggaggggtgggctgcctgattttgtccagttttccaaatatccacgcagtgaactggagtatcctaaacatgagaatgtacagttgacagttgtaaaaactagggatctgtagtgaatgctgtgcagccccatatctcatttgggggtaggaaaatagctgaagattcatgtgcattatttgacatttcctttgtcatctgctttttaagcaaaaaagggttttgtgttagaaattctacttgagcagattataaagagctttaaaaaacaactttcggttgccaaaagtttgagcatttgatttcattacctgtgtctccctcactggtgtccagacggtcaactgaatactcctgaaacccagggagcaggtgacttcctggagtgctttgtccccagagtcagccactgcttcctctgtgggggtggagagtttgtctttggccatgcagtgtgcgacagttcaggacgggtagggatgggtcccattctgtctgggtcaagggctctatcagcttcttccatgtgcctttgggaagaaatctcgttactttaagtttgctttcctgttatcttgatgaagtgcccattttagcagacacttgtagtgctgaccacttagggaatgtacaaactcctaagcttctaaagggaggcatggcaaaaacgttggggtcaggatgtctctcacgctgctcatgttaatactattaacacatgatttgagaaataagttttctctaaaatgcatattttgccgccacacactgaacaatattatttccagtgaagtttgatgcctgttcttacgttgtgttcacctgttggttcaccactcagcagatctgattctgcaagaattaatggtagaactagatcatcctttctaacagacgagcctgtgtcctgtgacggcctttcacagcggaatgcagttgtacctcacattacttttgaaacttcactcgttccagttggtacaagtatttgccaaagccatttcctatgttcaccgtggcccctcctgatgtggctgtcagcgcagcgttgttgaacagggctattctttttacaaggtgtgaagtgtggctcttcgcttcgtctttgccatggcattaaaagaaagttccctgtcttctttcaatattagttatttcaaatgaatatgtgctacttaaaagcttgttttgtttctttgtatataatttgccttggatttattgtgcacagtttgttgagttgtatgtttttgtgaattatcaggagtaaatttgacaagtacatgtgaataacctcctgtaaatgaattttataacaaaaatgtactgaactattttttaaagttgtgcagattagcaattttttgctatagctttgacttttctatgctgtgaattaatagctgcgatttggcaaacagccctgttgtctttgttaaaccctaaattttaagaggaaatggcagaattaaaagcagaaacaagaagatggacatggattagaggttatgtattatgaagtaaactacaaggtactaacatcatttcgtctgccatttggtttgctttatgctgaaattacttggtggggatttgtgcaattcagatataaaaagtttcattatccagcccggccctccttcctagctccttttggaatcttctctgtacagtaatgaggtgcattgaggccagctgtgctgtttagttacagactgaagtttggtccaacagaaatatgtgctgatcattaggctggaattggggtggaggtgagatagga

SEQ ID NO: 135725 - DNA, 1116 bp, Homo sapiens
catggaaaaattagggtggtggtccatgcctgtagtcctagccacttaggaggctgagacggagctcaggtgttcaagttactgtgagctatgaatatgctggtgcactccagcctggacaagagtgaggctagactgtcaaaaaccaaaaaactaagccggacgcggtggctcacgcctgtaatcccagcactttgggaggccgaggcgggcggatcatgaggtcaggagatggagaccacagtgaaacccagtctctactaaaaatacaaaaaattagctgggcatggtggcgggcacctgtagtcccagctactcaggaggctgaggcaggagaatggcgtgaacccgggaggcagagcttgcagtgaactgagatcgcgccactgcactccagcctgggcgacagagtgagactccgtctcaaaaaaaaaaaaccaaaaaactagtttataaatatgtatacttaataattatcttcctttttccagtaaatatgtttctcttttgtaaatagaccagcagaagtagacactgtggatgcattccagggtcggcagaaggattgtgttattgttacgtgtgtcagagcaaatagcatccaaggttcaattgggtgagttactgtcattgttgctcttttatacttgtatacattgttgcttgtttatagttcaggattaggttcattatcactgttagagaacaccatttgcttttttaattttcttttgtgaaaacctgtgtaatactatgaaagtttctcttttaagttgtgaaatagacccactgttagatcttggtgcaatcttggcccactgcatcctccacctcctgggttcaagcgattcttctgcatcagcctcccgagtagctgggactacaggcatgtgctaccacgcccagctaatttttgtatttttctgtagagacagtgttttgccaggttgcccaggctggtctcaaactcctgagctcaagtgctccacccactttggcctcccaaaatgctgggattacaggcgtgagtcactgcgcccggccttggtgtcttttatattaacccatttcatagtgtgaatctgttcttttatttaataagattcaaataaataa

SEQ ID NO: 135726 - DNA, 1055 bp, Homo sapiens
ctggtgaattctatcaaatattaaaagaagaatgaacacaagtcattctcacatgcttccaataaatagaacactcagattcattttttgaagccagtattacactgataccaaagccaagggaaagtatcacaagaaaactacagatccaaatcctttatgactagatacaaaaatcctcaacaaaatagtgacaaactgaattcagcaggttattacaaggatttatacatcaagaccaagtgggatttatcccaggaatgcaagattgcttcaacatatgaaaatcaatatgatataccatattagaagaatgaggagacccacataatcagctcagtagatacaaaaaaaagttgcacggaacccaaaatgctttgatgatttaaaaaaaaaaaaagaatacaaaggaactttttttattaataaaaggcatttacaaaaaactcatagctaacgttatacttcatggtaagaatgaaagcctttcctctaagatcaggagagatgtttgaaactcttaatgctttttttcaacattgtactagaggttttagccagagcagttaagtaaggaaaataaataaaaagcatctttactggaaagaaaaaagtaaaactctctcttcataggtggcatgatcttatttctagaaaccctaacaaagccattcaaaggcactattagagataataagcttagcaggatacaagattaatatgtgaaagttgattatattttgatgcaactagcaatgaacaatctgaaaaggaagttgaaacaattccatttacaatagcatcaaaaagaataaaacacttcggaataaatagaaccaaagaagtataagacttgtacgctgaaaactgcaaaacgttgttgaaaggaattaaagaacacctaaataggccgggtgcagtggctcatgcctgtaatcccagcactttgggaggcccaggtgggtggatcacctgaggtcaggagttcaagaccagcctggccaacatggtaaaatcttgtctctactaattatacaaaaatcagttgggcatgg

SEQ ID NO: 135727 - DNA, 2004 bp, Homo sapiens
gcagttattccagttgggttaagtactgtgaaggctaagtataaattcagttgaatgaaaatgtgaaagggaggaaggaagtagtgacagaggttggatggtattgggttgtgaataagggcatgtgttcaggtggtctgtatatgacagcaaagaggagtggtgttgctagaagcagcaatgtcagaggagctggggattcttgtgagagagtaggggaggaatggtctaggggcagcatttgttggcacggatacaagtgccactctgtcatgaagtaggaggaaacacaaatcccacttctacatcatgggatggctgcagagcaggtggcgtcctcaggcgagaatcaggcgttagataagatacagaggtggaagtagggaacactcattgaagaggttacacatacagaggagttgttggccatgggattgtagtgctggagggactgcagcctaaaggttttaatgaggcctcttggaggagagcagaggattgcgagttaagccgcagagcatcatgaggatttcagggatggaagagatcgctagctgattgggttgtccatttagtaagtctcaaagttaggagaatgggtatttaaggctcgtaaagcaaggcgggtaaggtagcctcaggaatcaagggatggggcagtgcatcccctggtcttggtgcattttgggtccggtatggtcatgagggagcatgtgttttcaggaggggttgagagtgcaggatatgaggctgctgaggactacaaagaggacatgaacctgctccagggccccatgttgttcaactggggtcaagtgggacacatccttcacattgagtctgtgtggatggcagctgctcggttgtgtggtgtgtgttgtatgcagccagtggtgagggacaaggaagatcatacatgtaaagcattttctcagtgttcggaagatagttaatccttaattcatgttagctatctcttattcacatctttgttcttattaatactgctgttcttaatactgctctccctgtttcaacagatgaagaaagtggtgcctaaacttcagttgatttcaaactcttttctctctacaacttcatttttcactgggcatttcacatgtattcatatttaccatagtattttcacatttattcatatataccatattaatggtcattgtaacagcctcttggagtcactgctagctgaataaaagatgaagcctatctgcctgccctttactataatgggaaacaaactcagtggaacttaagttagcaattagcctgctattagttttgataacactgtgttttctttttccatcttgtttagctcatatataaatgttcaagaaataaaactggtgatggaaataattaagcttattaaagacaaaagaaaggatgttagttttcgaaacattggcataataactcattacaaggcccagaagacgatgattcagaaggatttggacaaagagttcgatagaaaagggtgaggcatttttataaatatttccaattttcttgttgaattagaatgagaggatatagaaggaaagaagaaaagggaaactcttaaggagtggtctgtgcaaattggtgatacggcacgaggaagctgggatgctgctggctttcatagacttgtgctgtgtggctcctgggtagacaggttacttcctggcagttggaatgtcaacattctccttggcagtggaattgactaagaaacttgccaggtctttaccttttagttccatgacttgttcatctgaattcttgttctagcaagactaaaagtaacatttcactttaaataaatgatttaacccttgtattgcctttatgtatagaatgaaaatcatgtttttgtttccttcttacctcagcagtaaaattaaagattaaatattggagatccataaccttaaaatcatcttaacttagaagcacacagactaccaaaatcgaatctagaaaacaatagaaaat

SEQ ID NO: 135728 - DNA, 1018 bp, Homo sapiens
ttgtagcatcaaaatagcatcagttgtctttcacaagatcatatctctttcattagcagtatatgagtagaaaagacctccacatatattcaagattcatggcattttggccaggtgtggtggctcattcctgttatcccagctactcaggaggccagagacatgagaatcgcttgaacctgggaggtgaaggatgcagtgagctgagatcacgccactgcactccagcctgggtgacagagcgagactgtgtctccaaaaaaaaaaaaaaaaaaaaaaaaaaaaaaaaaagattcatggcattttgaggctcagagtcagaaacaccttttttctctgaagctgtggttggtaatcttatgctacctgaacgttgccatatacgtattagatctcagtaattgtgtttataatagtgggaaagatataaatgaattcttggaaactgttgctttattttgcccctcacagaaagcacaggagtatggctacgaccagtcaatgatggctcgcttctgcagactgctggaagagaatgtagaacacaacatgatcagcaggctgcccattctacagctcactgttcagtacaggatgcatccagacatatgcctcttcccttctaattatgtttataacagaaacttaaaaacaaataggtgagttccccttattgtttgtgaccttattttgttgtagtttagctacttatgaagaatagacattttactgtcgtcttaggtcttgtcataaaaagcataaatcatgaagggttaataattttgtcctgttataatagccatcatgttgaatacagcaaagcacataaaaaagaaaaggggaaaaagtcacctatatttatactacccagaaataatcactggtaacattttggtatatccactttcagcagtcctttttttttttttttttttttttgaagacagggtctcattctgtcactcacacaggatgagtgcagtggcacacagtcctggctcactgcagcttcgacctc

SEQ ID NO: 135729 - DNA, 1007 bp, Homo sapiens
tacataacttccttttctgtttccccaaagaaaagattaaaaattaggttttgtgagctaacgcagataaacttttgaggatttagggaaaattggcatgtatctattaataattattttatgctttcacaaacctgtttaaaatcacacatataaataggttaagaagtaatgcctttcttccactcccatagtttgtgaaacaagtttattcaggctttgcacgtcttcagtgccagtatctttcacatcactcatgaagattccatcatcttagtgaagttttcagcacatttttacttcagggttatttaagataaagtactttttgaaacttttcttttttaattatactttaagttctagggtacatgttcacaacatgcaggtttgttacatatgtatacatgtgccatgttggtgtgctgcacccattaactcgtcatttacattaggtgtatctcctaatgctatccctccccctcccctttttgaaactttctgtgttgctgccatcggaaagtagatcccaaggcacaactgtggtaacatcaagacagtttatcccacttgtcacttaggtcactgtttttcagattgcagaatataacccattatttggtttgtgaaatccatttagcacagcttcggcgttcctaattcaaaaatttgaaatgcttcaccatctgaaacttcccaagtgctgactttatgcttaaagttcacgctcgaaggatatgctcattggagtattttggatttttggattagggatggtcaacacataagtcgagtctgtttccttcactggaaattaagtcctgtgagacttcatcttattcactctagtggtcttagcacttcaaattatagatgcttagtacatattagatggatgaatgaagaattttgtcttcaaaaggcttgtttacagtggcattcaatatgtctgtctgtgagggtgtacccccagaaataattgttaaaatctgtgttacatttccttt

SEQ ID NO: 135730 - DNA, 1045 bp, Homo sapiens
taaaagaaaaacttcagaaataaagagaagaatcctaccctcctcatttttgtttaaatatgtacaaattgaggaaaacatgaagttaaattaattttggagtacatttccatttttagaatttggtattctagtgttaatacaagaacatgtctgtgcccttcacatcatctgaaagtgaaggtacaggggaaaaaaagactcaattacaagctctgactttgggaagagaagaaccagactgtagtctactcttctctgttggttttttttaatctcatgaaagattctcctggaaatgcacattagaatcaggatccagtagatgttttgaagtaatctgaagaggttttgaaatttaatgaaatgtgtattttttactaataacatagattatttatacagataattgagcagtggcttcataaataatcctagagaacagatcattttcaaagcatttttgttgaagcttggaatgaatgcaggtggttatcgttagtggtttttgatttcggaattattcagaatgatagtgcagttctttgtatgacatttgagcgcaggtacatgatcatgttagagtgtggcccagaagcacacccgtcacccagtgaaaacccgtgtgtgtagggaagaactgctgcaggtaactttgttcacggagaataatgaagagcaaattctgtatcccatttctttaaatgatgcaggatttcattgaagggccttggcatatagtgaaaagagagattgttaatgggcctcaactttactgcctacttcaatgattgataaaaacaacaaaaattagaaaaaaaaaatccatttgtgctgtttaaattgttgtacaaataaaacaggctattttgagaaaataattacaaagttcatttccataaggtgccttttttgaccacctgtttctagtggtaattacagtgaaagtgagtatttttaacagatattgctaggcatttgtgtgtttattcgtctttttcagtatgtatatattgagtgccaccataattcaggcactgtttag

SEQ ID NO: 135731 - DNA, 1012 bp, Homo sapiens
cctacctacatatatctgactacaggaaggattgtaatctactttgaccaaatcaaaccctggataaaaatttttaatgtgcttaaatcatattctgtgtttcagccgcgaagcacacattctttctgctttgtgattatcttaaatgtttctgctgtttcctagatttgagggtttcccctaacttttactaaatatttttctgtcataaatctattttaataaatagtgagtgttttatagtaaacataggcctgtcatagtcaaggattgatgtacagctgaatattgatttaacctttgttctcttaggttcaaggacgcccacagaaaacacagagtatcatcatcttagagtcccatatcatctgctgcacgttgagcacaagtggtggtttactacttgagtctgctttccgtgggcaagggggtgtccccttcagctgtgtcattgttgatgaggtcagtgaacggtcagccatacaactttgactactactatgaggagtaagtcttagatgaattgtggctgctgaaatgttgaggaaatgtgttttttttttttgcatctgattttcacttgctattacctgtgtattcccttatgtagaaatatactccttaatgaccctccatagtgaaagtggattttccagtattgggggttagtcttgaggatgactgatggtttctaacaaaatctctgctgagtgactgtctcactcctgcttagaatatctctggtaaccttttgaagtagttttaatataattttggatagctttgagccacagtatgttcacctgatgtcttttattcctagttcactctttgagcaaacatttattgggtacgtactgtttgtcagaacgtagagtcagaagacaaaagagatggagcaggagataccagagaattgagtgatcaggagacccaagatccagttttcaccagaaggaaaggacaaaaagtggaaatgattaaatagttgaagaaaatgtcattgaattta

SEQ ID NO: 135732 - DNA, 1098 bp, Homo sapiens
tcccaaagtgccaggattacaggcatgagtccctgcacatggccttgcatttggcttataggctgtactgccttatattaaagctatactgagtttattagttgcctttcagttgcatgttgagcccagttcaaattaggttagacagaaagggaattagcttcagtatgggtggatccagagggtcacatgatatcatttctccactccataatttgtttttctgtgtgtcagccatttcttctgagaaaggtgagtgtcagcatctcagggcttccaccatctcagctttgaaaccccagagggagagaaagtctttctcttagcatccatatatccaaagaagcagttagtttagtccctgggtgagcaagcaggtctaatccctatttttaagaagatgggtgcatgattggccaggcctgtgttagatgcccatcactgtggccagaggaatggttggggtgtgatttacagcctcatttgaatcacctggaagttaagggtggcgtgatgctcccagtgctggaatgctaagcagacagctcacgtgcagcgcacagaacacagctgagtcttacgcagcagcatacagagtgtgtcaggactccagtggtaaagaggaaataagctgggtaaatacatttttcattggtgaaatacaggctcttttaaaattagaggtagtccattggaaggcatttaaaaatgcttagtttagttttaattgtgacatttgaatttttttccagaggcaagaattagatgaaaacatttccaaagtttctaaggaaaggcaggaacttgcttctaaaattaaagaggtaagtagttcacctgtagcattttcttgatttttttttttttctttttaaaatttaagtatgactgttcagacaagctatgggcttttatttatttattttggagacagagtctcactctgtctctcaggctggggtgcagtggcatgatctcagctcactgcaacctcagtctcccatgtggctgggattacaggcgtgcaccaccatgcctggctaatttttttttttttttttttttgaggtgaagtcttgctctgtcaccagactggag

SEQ ID NO: 135733 - DNA, 1070 bp, Homo sapiens
gtataagaagtttgtggtgtagtccctggtgtctggttaattggaagttcatgtttgctcccttctctgattattaacatatttacttagaaatatagatactatgtatagagacaggattgatcagcagtgtccttattagtccttaactgtgattcttatcaacaggaaactgtggagatataaatttagtacgactgggtccagaaaagtctattaatagtgaggttctaaagttcagtttggacagccaagtaaaccacagaatgagtaagtactgaatgtggtatatactagtgttttctctgttttgtttggtggaaaatgacttgggcactaaaggtaatttgaagcctccagaattagtctggctttgggaactaattttccttctcattgtgttgtatatgtgtgtgagtttgttagaattagaatagcatataattttttatttgttatttttattagaaaaagagttaccttctcatgttcaggcgatgcataaaagaaaggaatttctagattatcagctggatgagctttcccggcagcgagctctatgccgaggtggacgggaaatacaggtatctttgcatttcttgaataataactcaggtatacgaactagttaacaagttttttttgagacagagtcttgctctgtcttccaggctggagtgcagtagcacaatcctgactcactgcagcctcaccttcctgggttcaggtgatcctcctgcctcagcctcccgagtaggtgggattacaaggttgtgccggcacacctggctaattttctgtatttttaatggagatggggtttcaccatgttggccaggctagtctcgaactcccggcctcaagttgatctgcccacctcagcatcccaaagtgctgggattacaggcatgagccattgcgaccagcctaattaatgagtatttaatgccctttatttattggggaatggcatgattcatgtataaaaatgtgtactaagacactaaaaatgtgtctcagattaacacatttctttctgctttttttttttttgtccttttggttttaat

SEQ ID NO: 135734 - DNA, 2104 bp, Homo sapiens
ttcccctggcatacatgctttttccactgtatcacatgtgctaggaaataaatagtcttgggatgttttcactaaggagaaaattgactaaagaaggaaaaaaacagagtagtaaatagaagaaaagttgtggattagtaaatgcaatttattgtgattatctttgtaagaataaaaaataaaagtacagttgtatttgtaagtacttgaagcgttacagacactaattagtaattagtaagtaattagctttctttccagtagtgaacgtgctttttagattaaaggtcactttggtgtccttgtcttgtctgaccataaccaaagcttttgtctcatgcattgaaagaaatttggacaggtctttttcatgttcttcctttcaaattccactacagaaacagcaactcattctcaaaaatgtgttttttatatagattgcgtacttaagagatttcaatgaagatcaaaagaaagcaatagaaactgcatatgctatggtgaaacactcaccatcagttgccaaaatctgcttgattcatggaccacctggaacaggaaaatcaaaaactattgttggcctcctctatcgtctactgacagaggtaggtatgggtgagggcactgatgctgttaactagctgtatcattttactttacttgagttaactgacatgtaaataagtattaacatgccatttcctctttgatttgtatatattttttatattgtgtgtaactgtgtcagagaaaagggtggcagagggagggaaggttatgggaaataaaaagaggaaaaaaccactatcttatgtgaaacaaatcgtaaggactagaatgatggtcttcaggcttcacggtaggtcacgtagaatgctgtgaatgctgggctgcattttggttggattgtggttttttgttttttttttttgagacagtgtctcgctgtcatccaggttagggtacagtggcacgatcttgactcacagcaacctctgcctcccaggtcaagtgattctcctgcctcagcctcccgagtacctccctagtggctgggattacaggcgtacaccaccacccacagctaatttttgtatttttagtagagatggggtttcgccatgttggccaggctggtctcgagctcctgacctcaagtgatccgcccgcctcggcctcccgaagtgctgggattacaggcgtgagccactgtgcctggcttggattgagtattcattaaagtaagtggatgataaagtaaggctcagagcagttatgacaaatttttttgctggagtaattttaaatatcagtgttagatgtagatgcttttatttatttttaactttattacgagaactttcaaaaatacatggaagtaaagacaaactttaaagctatgtaatagagctcacccatattttttgtgtgtttgtttggtatgtatatgtggcaaattgtagaaccagaggaaggggcattcagacgaaaactccaatgccaaaatcaaacaaaaccgtgtcctcgtgtgtgcaccttccaatgcagctgttgatgaactcatgaaaaaaattatccttgaattcaaagaaaaatgtaaagacaagaagaatcctttaggtatgatacttttgtggattttaaatttgtttttgttttcagtgttaagtgtaggcaactttgaatgacaaaggaaagagcaggccagtcctggtaatagcttctacttgaatctgtggcttgtgagttcatttagcaagtatttcattgaacatttaccctgtgccagggcctgtgccaggtactgaggtttcatcagtgaagtcttcaaggagacacacggcctagtgaggaagtggagaggtcagtacagagtgataagttccacagtgaggctaaaatgtggggtgttccacacaccttagggggaccctgattcagttgtgtgagggttagagaagggcagttaggagttagccacaggcagtagagggttagggagtacttgagcagcagagattgccataaaaaaaaagaatcagggcaagagagcctcagatggttcttgaggttcccagagcattaggtggcggtgaaagatgag

SEQ ID NO: 135735 - DNA, 1050 bp, Homo sapiens
tttaccctctgctgagtactgtttactcccttacttcaagtctctgctcaaatatttcatcaggaagaccttctcggaccagcttatctgcctccatccccatcacttcctccctttgtgtgctttcttcagagcacttactaccacctgacatatttatttggttatctgcctccatcttctagaaaataagcctccggaggacagaacattactgggttcaggaagcagtccataaatatttactgggtaaattatgtaaataatatccaaaaatatgttaaaaatacctaattctgcatgacctttacaactaggcagcattattcagtgataactgaagttgctttttctctttcttgatgatagtgcgtaatgggaaaactgagtgttacctttccatccagactcaagagaactttccggccaatttaaacgaacttgtgaattgtattgtaatcagttctctggtaactacacaaaggaagttgaaagccatgtctctgttgggtagtcggaaccaactggctagagctgttctgaatccaaaccctatggacttctgtacaaaagatttactgactacaacatctgagagaattgtgagtgatgatgtatgatactagataatttcatgttaagatgttaaagcatcatattttttagctgctatgtattcctatatgtttacaacaaaaatgtgttcacggtgaacagtttagtgttagttttctttagtattgcaaagtatgtaatttaggttaagtcagctcacttcaggaaaaggtacagtacaataagcgtcgaaggttgctggaagagcaacattaaaatgttaggtcagcagcctacttaatgtgcattaggtgagaagtctcaggtttagtggtgttaaatttacatttgaatgattgatggagaattggccggtattgttggaaatgcaaagatgaagttgtcaactgaacatgtgaagctgtgtataaactctaggaagttaacagagaaatgcaaaaggaaactaactatttagaaactctagagctgtat

SEQ ID NO: 135736 - DNA, 1230 bp, Homo sapiens
aggccaggcacagtggctcacccctgtaatcccagcactttgggaggctgaggcgggcggatcacgaggtcaggagatcgagaccatcctggctaacacagtgaaaccccatctctactaaaaatacaaaaaaattagccgggcgtggtggcgggcgcctccagctatttgggaggctaaggcaggagaatggcgagaacctgggaggctgagcttgcagtgacccgagatcgcgccactgcactccagcctgggcaacacagcgagactccatctcaaaaaaaaaaaaaaaaaaaaaagcagaataaacctaaaggaaagaaaatttattagctacttttcaatattatagttttgtctattttggccttatagcagttttgaagaaaactatattctataattgatatttttaatatttgaagtttttgattggattagattaccattttaaagtatatgcagagtcctttagtgctgtgtatttttgaacttaatacaaggatttaatttcttttaagttaatcttatttaaaataattctattagagttatatgaattccgacttcttcttgtttcatagtttatctggaagaatgtgaactggctaaacagctttatccaaaggaaaacgatttggtgtttttagctcctgagagaataaatgaagagaagaaagatacagagagaaatgacatacaagatctccacgaatatcattctggttatgttcataaatttcgccgcacgtcagtcagtaagtaaataatgaggcattgacaggaaatgtcagatacagtctcatctaataatctacttctcaattgtgtatatcaagtgtatttgatagacatttaccgaacatgtttttgctatgttgattacatggccattcagagtctcttttctagtttttctagacttaactggaaaagaccttgtatttatttttgtaatgttctatccttttgttacatttctttatccatcattgtgtttgctataaaatggaccatttgcagaccatctgttgtttgttaaattacatttcatccttggttttgtggccaattactaatgagatgaccaaacataaaactcactgtaaggcagcttgaggaatctgcttacatcacttccatccgttgtatgtttctccctaggtaatttaataacaaaaatattagcctaaatttaatgaataccagatgtatgcagtgagacttgtc

SEQ ID NO: 135737 - DNA, 1508 bp, Homo sapiens
gagttgccttactgtagggtattctgggtgatacaaactgatcatgactatcatggtccagagtctgaccttactagcagataacacagattcagtattgttttgttcccctgtccatagcataacccttgtggagtcttggttggttaaccagtgcagaagcagttcaacaccaatagtctttgaggataagtttcttcagaggaactgaaagactatttgttgatttaaatacttaatgactaactgttacatttagacaaaaccctccttagggcccaaaaggtaatatatttgttagttttttaaaaagtgaaagctaatatgacttttttatactagtagtcttcctaaatttgggattgggaatagtcttatttctcagaagatccttaagggtacttctgagtttggagctttgacagactgggagatgggtatagagcattttataaactggcaggatgacatgttggtgagaaatccctaaggtctgccacaaatctaggtccttttggacttgtgagctagctgatctggttgggaagtagcattctaccggagctgtccagcagtacgttatgcactgctggaaatgctccacatctgcccacagcggagcagccacaggtggctgttgagcactgcaagtgtgactagtttgaagaacagaatttttattttttaacatttttattaaatgtaaataaccagatgtagctagtggctactgaattgggcaggacagttccagataattgtattaacctgccgtgaatcaatttttagtttttgtcacctagattctagcttctggattttactgttgcttaactttggaaaatgttactatttagcatcactttccagaatgttgctttcttaatttgcttttgtgctttgtataggtggcacaagaatggctcaactctccaaatagagagaatttctatcagttgcaagtacgaaaatttcctgccgattatataaaatactgggagtttgcaggtaagttttttcttacgcaacttggaatatatgatataataattggagatttctaattaagaggagatagcattatttgaatttagggggacacaaattttctaagctaaatttgtgacttcttagaatatgcttaaagtcttaatgaggatagttactggaacaattatgaatgtaaaatttatgatttttttccccactctgtagttagaatactacaggctgaattgtcagtgggggctgggaatgggagagagggtgagtggagggatttggtgggggtgttgcataatagtctttacagattctgagtaaatcttcctggcatctgtcttttcatttcatgattgatccgaaccacataccacttttatatactagttataaatacaccaaacattcagaactctttaaaataaaatgaataagtcctctttttacccccaacccccatccatcctcctctgtagatgtgcttaaaaaaaaatgaggctgggtgc

SEQ ID NO: 135738 - DNA, 3772 bp, Homo sapiens
agcttccagcccaacattttctaaagaaccaatgaaagtgcaagacagtgtattgatcaaagcagataacactatagaaggtgacaataatgagcaaaattatataaaggatgtgaaactagaggaccatctcttagctgggtcatgcttaaagcagagtagtaaaaacatttttactgaaagagctgaagatcaaattaaaataagtacaaggaagcagaagtctgtaaaagagatctcttcatatacaccaaaggactgtacttcaagaaatggtccagaaaggggatgtgacagaggaataatagtatcaacacgtttgttgactgattctagcactgatgctttggaaaaagtgtccacatcgaatgaagatttctctttaaaggatgatgctcttgctaaaacctcaaaacgaaaaactaaggtacagaaagatgaaatctgtgcaaagttatcacatgtaataaagaagcaacacaggaagagtactttggtcgataatactatcaatttagatgaaaatttgactgtatctaacattgagagtttctattcaaggaaagatacaggagttcagaaaggagatggtttcatacacaatctttctttagaccctagtggtgttctggatgataagaatggagaacaaaaatctcaaaacaatgtattgccaaaagagaaacaattaaagaatgaagaattagttattttctctttccatgaaaacaattgtaaaatacaggaatttcatgttgatggtaaagaattgatcccttttacagaaatgaccaatgcttcagagaagaaatcatctccctttaaagatcttatgactgtacctgaatcaagagatgaggagatgagtaatagtaccagtgtgatttattctaacttgacaagagaacaggcccctgacatcagtcctaaatctgacaccttaacggattctcagatagacagagaccttcacaaattatctttactagctcaagccagtgttattacgttcccatccgattcacctcagaactcatcgcagctgcaaaggaaagtaaaagaagataaaagatgtttcacagctaaccaaaataatgttggagatacctcccgtggacaggttattattatttcagattctgatgatgatgatgatgaaagaatcctgagtcttgagaaactcactaaacaggacaaaatatgccttgagagggaacatccagagcagcacgtttcaacagttaatagtaaggaggaaaagaatccagtaaaggaagaaaagacagagactctttttcagtttgaggaatctgattctcagtgttttgagtttgaaagttcatctgaagtgttttcagtttggcaagatcatccagacgataataattcagttcaagatggtgagaaaaaatgtttggctcctatagccaatactacaaatggtcagggttgtacagattatgtatctgaagttgttaaaaaaggagcagagggcattgaagaacacacaagaccacggagtatttctgttgaagaattttgtgaaattgaagtaaaaaagcctaagagaaaacgatctgaaaaaccaatggctgaagatcctgtgaggccttcatcttctgtcagaaatgagggccagtctgatactaataagagagatcttgtgggaaatgattttaaaagtattgatagaaggacttcaactcccaattcacgtattcagagagccactacggtttcacaaaagaagtcttcaaagctttgtacttgtacagaacccatcaggaaagttccagtttctaagacccctaagaaaactcattcagatgccaaaaaaggacagaatagaagttcaaattacctaagttgtagaacaactcctgctatagtgccgccaaagaaatttcgtcagtgtcctgagccaacttcaacagctgagaaacttggcctgaaaaagggtcctcgtaaggcatatgagttgtcccagcggtctttggattatgtagctcaattacgtgatcatggcaaaactgttggagtagttgatacccgaaaaaagactaaattaatttctcctcagaacctgtctgtcagaaataataagaaacttctgactagtcaagaacttcagatgcaaaggcagatcagacccaaatcacaaaaaaatagacgaagactttctgattgtgaaagtacagatgttaaaagagcagggtcacatacagcacagaattctgacatatttgtaccagaatctgataggtcagattataattgtacaggaggaactgaggtacttgccaacagtaacagaaaacagttaataaaatgcatgccttctgaaccagaaaccataaaagcaaaacatgggtctccagcaactgatgatgcttgccctttgaaccagtgtgattctgtagtgttaaatggaacagtaccaacaaatgaagtaattgtctccacttcagaagaccctctgggtggaggtgatccaacagcacgtcatatagagatggcagctttgaaagaaggagagcctgactccagcagtgatgcagaggaagataacttatttttaacccaaaatgatcctgaagatatggatttatgttcacaaatggagaatgacaattataaactcattgaactaattcatggaaaagatacagttgaggttgaagaagattctgtaagtcggcctcagttggaatctttgagtggcacaaagtgtaagtacaaagattgtcttgaaaccacaaaaaaccagggtgaatactgcccaaaacactctgaagtgaaagcagcagatgaagatgtatttcgtaaacctggcttgcctcctcctgcatctaaacctttgagacctaccactaagatttttagctcaaagagtacttcacgaattgctggtctttctaaatctttggaaacttcttcagcactttcaccgtctctaaaaaataagtcaaaggggatacagtcgattttgaaagtaccacagccagttcccctcatagctcagaagccagttggtgaaatgaagaattcgtgcaatgttcttcatcctcagtctccgaataattccaacaggcaaggttgcaaagttccatttggtgaaagcaaatattttccatcttcctctccagtaaacattcttttgtcatcacagtctgtctctgacaccttcgttaaagaggtcttaaaatggaaatatgaaatgtttttgaactttggtcagtgtgggccccctgcaagtctttgtcagtccatctcaagacctgtgcctgtcagatttcacaattatggagattattttaatgtttttttccctttgatggtattgaatacttttgaaacagtaagtatgtgtttcatttgtatgcctctccaaacttttcaagttacctctttaccttgctgagtgaaaatgagagtatagttcaaaaaatcagccaggcgtggttgcgggcacctgtaatcccagctactcgggaggctgaggcagagaattgcttaaacccaggaggcggaggttgcagtgagccgaggtcgcgccactgcactccaacctgggcggcagagtgagactctgtctcaaaagaaaaaacaaaaaaaagtatagttaaattaaaattgaccgtttcgatttagatactggttttagatttcatgttgaacagacatttgtgccagccactgttttagatactggcaatacagaggaaacacttttttttttttttttttttaggtggagttttgctcttgctgc

SEQ ID NO: 135739 - DNA, 1984 bp, Homo sapiens
gttattggaggatgggactacaaagttttggcaggggttgaggagctgaattagaaaaggttgtttctggtatggcaaacagggtgtgaaaagattgtgcttacctagactgttttcttgcccattaagtaatttgtttgccactaaatttttttttttttttacagacgtatcatagtattgcttgcaaaaaatcttgaaaatgtggctgcttttgaaaccctctgtgtgtctgaggactggtggcggcactgctttaaattatttgctccttggcttttagttgggttgctactcaccagataaagaatatgcttaattctcaatatattgtagtatgtttttctaactgtttagtaattcaacgattgtgccattgtatttcagatgatagtgtggatcctttctggccagcgttacactgttttatggtgattctggatcgccttggatctaaggtctggggtcaacttatggatcctattgtggcatttcaaaccattatcaacaacgcaagctacaatagagagatccgacatatacggaacagctctgtaaggttagttcagctaatgtcaggatttaaacatcatctctataagaaagtgtgttccagctagattacttaacaagaggtgtttcttcctttttttcccccttcgtttcagtaatttctatttattcttaatatttaaggaccaagttagaaccggagtcctatttggatgatatggtgacttgcagccagatcgtatacaattataatcctgaaaagaccaaaaaggtataaaacactttgaaaattcagatgctattttattgcctttatattgtgtagactattttgtataatttgttgagttgcagattttgtgatatgtagctgttctcaatctactgctatgtaaaagcccttctcattgaacagcagatgtattgtgtgttggggaagatggactctaactacagtatgcatactttggaaaattaacttataagtacatttagggaagatggaaagtttatggggacatacatggcatgactagaaatcaaaactagctagtggacagaaggtgagagtacataaaggtgttaccaatttgtctttttatgaaaactcaaaattcaatttatattttcactttcttgggagttaggtgtattacgattgtgatataattatatgccacaattataccattgtatagcataataatgatgtggtaaaccaaaataagagagttgagaaacgtatttttcttaacgacttgggtgttgaacctgtcataagtggtgcttatttatctgaacatcagcatttctttcattttaggattctggatggagaacagccatttgcccagattattgtcctaacatgtatgaagaaatggaaacattagccagtgtacttcagtcagatattggtcaagacatgcgtgttcataacagcacatttctatggttcatcccttttgtccagtccctcatggatcttaaggatttgggtgtggcttacatagcacaggttgttaatcatctgtactctgaagtcaaagaagtcctcaaccaaacagatgctgtgtgtgacaaagtcactgaattttttcttctaattttggtatcagtgattgaactgcatagaaataaaaaatgtttgcatttgctgtgggtaagttcccagcaatgggtggaagccgtcgtcaaatgtgccaagcttcctaccactgcgtttacacggagttctgagaaatcatctggaaattgctccaaaggaacagcaatgatatcttcactgtcattgcattccatgccatctaactctgtacaacttgcttatgtgcagctgattagaagtctccttaaagaaggttatcagcttgggcagcagtctctttgcaagcgattctgggataagctcaacttattccttagaggaaatttatctctaggttggcagttgactagtcaggaaacccat

SEQ ID NO: 135740 - DNA, 1013 bp, Homo sapiens
gccaccacgcccggcctcaaaatacttctataccatttccttgattccaaatcttaaggtcacgtgtcataaatggcagtgattttttttttctttcttagtggtatatggaatatggtacatcttaaaattgaaggcatcttatattggtgagatacaagttacatggtagttatgttagaaattgttttctaaccatcttgtactttcacacttgaattagtctagagttctattacttgggagcagttgtgtatgaatatctgagacttaaatgtttgagaaactaaatactatcttgcttcatcttcctgccttgttattcttttgcaaactaaaccaggcattagtatagtattatttcatcaattcaagataactctaaatgatcttacaggtatttgcatgttgctgaccattcttgaggaacaagccatggattccctgttgttgggctcagacaaacaaaatgattttatgcaatcgatacttcacactatggagagggaagcagatggtaataaactttacttgctgaatgttgttgaatatagtgatgatgatgcactttaaaaatgatagtgtcactgcaggaattggtgtatgttgtggagaaaagaatttttctggtttagtaatagattcagactttttattttgttttgttttgttttttgatacgaagtcatactcttgttgcccaggctggagtgcaatggtgcgatgtcagctcactgcaacctccacctcctgggttcaagaaattcccctgtctcagcctcccaagtagctgggactacaggcgtgcaccaccacgcccagctaatttttttgtatttttagtagagacggggtttcaccacgttggtcaggctggtcttgaactcttgatctcaggtgatctgcctgccttggcctcccaaagtgctgggattacaggcatgagacttttaaatcagaaaggacctttataatttaattcaataccttcctttcatagaagaagggaagtt

SEQ ID NO: 135741 - DNA, 1355 bp, Homo sapiens
gattagtttagagcaaatcttagatatcagagcatttcatccacaaaatatttcagtatgtatttctaaaagataaagacttaaaaaaaacgaaaaatattattatatatatattttttgagatggagtcttactcttgtcgcccaggctggagtgcagtggtaggatcttggctcactgcaacctttccccaccaggttcaaacaattctcctgcctcagcctcccaagtagctgggactacaggagtgcaccaccaagtccagctaatttttttgtatttttagtagagacaaggttttgccaagttggcgaggctggtcttgaactcctgacctcaggtgatctgcccgcctcagcctcccaaagtactgaaattacaggtgtgagccactgcacccagccagaaaaatactattattgcatctaaaagaataattacttaatgttgtcttgccagtcagtgtttgaatgaatggaaatgattgtctaaaactgtttattaggggttagtatgttcaaatcaggatcaaataaggtccacacattgcattaattaatatgtcacatgtcttttaaaatatgcagagaatcctgttttcttttctgtgttcttgctgtttgtagaccattgtttattgaattaagtaataaatatattctgcatttaggttcggcgttgggctatcttgactgcaagaaacttggggaaagtggacagagatgattattatgacttacaagaagttttactttgcctttttaaagtcattgagttggggcttttagagagtccagacatttatacttcttctgtcctagagaagggtaaactgattcttctgccctcacacatgtatgatactaccaactacaaaagctattggttaggtgagtattattcctacactaatataattggtattttcgtatagttctgttttttgagacagtctcactctgttgcccaggctggagtgcagtggcaccatctccactcaccgcaagctccacctcccaggttcaagcaattctcctgccttagcctcccgagtagctgtgattacaggcaaacgccaccacacctggctaattttttgtatttttagtagagacggggtttcaccatgttggccaggctggtcttgaactcctgacatcaagtgatctgcccaccctggcctcctaaagtgctgggattacaggcgtgagctaccgcgcccggccctgtagttcctatgagggtcctaaaagggaagtgttctctttggtgatctgatgaaacttactgaagataggattttatagttctcagttcttattctgtcattaagttgacttaactattacatatct

SEQ ID NO: 135742 - DNA, 1976 bp, Homo sapiens
ctggagtgtaatggcatgatctcagctcactgcaacctccacctcctgggttcaagcgattctcctgcctcagccttccgagtagctgggactacaggtgcccaccaccacgcccggctaattttttgtatttttagtagagacggggtttcaccgtgttagccaggatgttctcgatctcctgaccttgtgatccgcccgcctcggcctcccaaagtgctgggattacaggtgtgagccaccgcgcccggcaaaaaagggatctattctaataaggtcagaataatttctaagaacaccctgtgatcaacggatttagcctgtcaggtaaatattgttcctgcatttacaatataagcatttttatgcctcaatttggaaaaataaaaagcaaatttttatttatttacagaatagcccaaggagcctaatttagggaatcttgataaggtgataagatttatgtattttacttatttttttctttttagacgagttatgtgttgaagcactttgtcggatggaacaagccaattgctcctttcaggtgtttgataaacatccagggatctatttgtttttagtccatcccaatgaaatggtgagtgtgagtgttgggcgatagaagggtatattgtgcttttgtacctatagatagctataatagcggtttttggtgtggattttgtttaaaatgtttgctaaaatttttcttgctttaaaatttactacagttaagtagagggcgctctggggtcaaagaagaggggatctcagagggtaggggatacttaccgacaggtgatgcttgatcttaaaagacaaacgggaataacttgatgtcctttcagtatgttgaattgaactcaagaagacctcttctcttgactttctcacctgcttgacccactgcagacacatggagataccggttaaaacatttgaaaagttattttgctgatagattagaattaaaacaagggaaggtagggagggagactgggaaattctggtgctagagatgaagaaggacaaaatccagaacagtgagcaggaacagaagcagatagcattgaaacctgacatagccctttggctaaggtttgagatcttgtcaccttttgtggtaagacagtctgtgcttcaggtctcatgcctaatgccacctagaactgagtgactacattaagccagtagccaggaagggctactctgccaatgtaaggcaagaaaaattacgttttttaaaaaaagcatggtaatgggattgccagtcaagatgatggtgaatttcagtttcctctgggccaaacacataccaatgatattaaaaaaaagcaaaaggaggaaattaaaggggtataatcacattcctccaaaggaaaacttatttctgtggaccagcaatggaacagaaacatgaagtaataaatgagtggaaacctggcctgggtggcggtgggtagctcgggattcagcttgtgcaggacaacaggaattagaagtatactccaggcaaggcaaagaaccaaagccaaactctgcactccaaacaaggggcggatgggggtgcttctttgcctgtgaaagaaggttgccaaagtattaaaaaggttcactggctttttaaaagctgtttacatatggaggaagcaggtctggtcttgtaaccagtgcctgggcgaagcacttgcagccttggtgactgagtctgcctagcccttatgtaaccaaaggttgggagccctgagctgctgatagtagacctagttctggagcaggactctcaaggatggatagaaagcagcccaaatttatatttaggaaggggaggggtagtggtaggagggacacagaattcctccctgtcggatgagcttgcaaaccaaatccctgaaacacacgaggaaagcgcatgctctgacagaacaaagaccagcactgttggtcctttctctaggtttaactctagagga

SEQ ID NO: 135743 - DNA, 1106 bp, Homo sapiens
tgtagcttcagattcttgggctcaagtgatccttttgcttcagcctccagagaagctaggactgtaggcatgcaccacacctagctaatttttctattttttttttttttagtgacagggtcttgctttgctacccaggctggtctcgaactcctgacctgaaacagtcctcctacctcagccttccaaaatgctgggattacagctgtgagccactgtgcctagccaatatctcatactctgtgtactcacttttcataaaagtggccacatttgaatagttttctttaaatctaaaatacaagctctaatactttacatttcagaatttttgtacttaggaaaaggctttctaggtcgtcacattcagtgtattttgttgatgataagacataacgcacactgcccattttattttcctctaggttttatgggaattagaaaccttacgtctcataaatcactttgaaaaatccatgaaggcagaaattggagatgatgatgagttatatatagtagacaataatggagagatgccactgtttgacatcactgggcaagactttgaaaataagcttcgagttcctcttcttgaaatactgaaatatccttacttgcttctacatgaacgtgttagtgagtatcttgatggttcctcaagttatatcagttttattattttagtaccataagaatttaggcttatctatattgcaaatttgtttgctaaacatataattaggatatataattaggacttcattttttttccaacgttttttattttttgagttcaaacacaaaatacctatttttggggcacagttcaaacttatcttgttcagagggtaactgaagattgtttttatttttttttagagacagggtcttgctgtgtctcctaggccgaagtgcagtggcgcagtcatggcccactgcagcctctacctcctgggctcaagtaatactcctgcctgagccttgtgggtagctgggagtacaggcgtgtgccattgcgtccagctaattttatgttgtgtttattgtagagatgaagtttcactgttgcccaggctggtgttgaactcctgggctcaagcagtcct

SEQ ID NO: 135744 - DNA, 1231 bp, Homo sapiens
ctttgagggtgacatcactcctgatgagaatgctgagctaggtccattcagtttatgaaatgaacttaagtttgtagttggtaacttttttccccattccaaaatctgtactttgaaaatattggtaagtctgggtctctatatattttctatcggtactgtgttgttttgagccttctctgtagcacaactttatgttgccttatgatacttattccttatacaatgcttttatttttctgtatttttcgtatgtcaaaaatagaaggatttttttagtttagtgaatcagtgattgataagccagccagcagaagatttgggttttagtgacacattttaaattgaaaccagggtcacaagttgaaagtgtacctattcttgacacacagtaggtctgaagttggttttcttcttgatgtcatcttttctggctgtaggtacagaatgagcacatgttgttggtgtacgccaggtggtgcttccaccattgacttcctaaagcgctatgcttccaacactccgtccggtgaatttcaaacagccgacgaagacctctgctactgcttggagtgtgtggctgagtaccacaaagcaagagatgaattgccattcttgcatgaggtaaaatatattagatgggcaatatttttcagagcttgatagctgggaagagagtaagtttgaactccgttggaagtattcagagaaatgatgatacgatttcaactttgtgggtttttttttttgtttttgttttgtttttgttgttgttagagatggagtctcactctgtcactcaggctggagtgcagtggagtgattatacatatatcattttacacattcgagtatattcttaggacaaattcctgaaagtggaagtgctgtctcatgattttccatgggccacatgggttttcatagtttgttttgctatgttttggagacaaggtctttgctctgttgcccaggctggaagtgcagtggtgcgatcacggttcactgcagcctcaaccttctggactcaagccatcctcccacctcatcctcctgagtagctgggactacaggcatgtgccaccatgctctgctaatttttaaaatttttttgtagagacgaggtcttattattttgcccaggctggtcctgaactcctgagctcaagtgatccttccggtttggccccccagtgttggaattacaggcatgagccaccatgcctggccg

SEQ ID NO: 135745 - DNA, 1031 bp, Homo sapiens
aggactttgtccgtcctccccaacttctggggatctaaggatgtgcccagcaatttgcacgacccaagtgaaacgggggtgactgccttgagggaaaagagctccacaaggagaaggccgagtgtggtatttgataagtgacacagctgaggatcctaggattgatgttacctgcgcgggctaataacttgggggatttttggctcggtgcctagctgtccccgtgagtggggacagccccttgtggaactgggagtcagaattgcagttctgctgtttcctggaagtccacagccaagttgtctaacctatctgggcttcctcatcagccagcagtatctgtctgtaataggatcgataccaggctcagatgggatatagagtataaatgccacttaccaatttcgttttttgttttttaatttcagaaatgttcttttggggccagagtctgggcatatatgaatgcaaatccgtgtttgttcacaactaagcccagctgagacgatcacttttctgtaggccatttgtccaggtaataatttttttttttagcaggagttcagagcaccaaggtaagtgcaatgatggaaacatgtgcagagtcctaaagggacagagaagaaggtcatcagagatagactggaagagaggacgggtcggacaggccccccccccagacgtgatgacactcaggaagagcttgcacactggttgttctcaaatccagctttctcttcgaatcttagtggagttctttaaaagggaaacaattttatccataggatcttttctacttttttttttaagttcctgaggtaagtctgatgtgtattcacagttaagtaccgggcagaggtaggagggtgggtttccaaggccagtggaagagcttccataaaggcagggaataccagtcaccatgaatggttttaggaagagcaagtcaagggaggtaagtgtggaggaaagagatgatgtggaagctggatcatcgcgggccttgtgtgtgttgagctcagcaatttgaa

SEQ ID NO: 135746 - DNA, 1039 bp, Homo sapiens
gttcccagctacttgggaggctgaggtgggagggggaggctgaggtgggaggattgcttgatcctgggagttccaggcttcagtgagtgtgatcgcaccactgcacttcagctggggtgacagagcgagaccctatctcaaaaaaaaaaaaaaaaaaggatacagatttctgggcctcatttcagacctacgtaccaattcctagtctctagaccgagtccagaacctggattttcactaacgagcttgcaggcctgtgctctctcatgcagtctgcacggcactggtatttctcctggacctgccatttgggtgatatcgtaccctgggctgtgatgaaatgcgtctttgcgttcagcagacatcactacccgagtttgaatccttatgaattccaaggcctcgggcaagtctcttaatgtctttatgccttggtttcctcaattgaaaaacaagttaaaaacagtgcctacctcgtaggatttttgcaaggattgaagaagtgaatgtgggtaaaccaattggaaccagaccttacacacagcaataacaagagcagttcatattcattaccagcctcctgtatgcctcgaccttgataagaggccttgtacagacagataactgcacaattaaatttcttttctgtagagatcatcgactacctttatgagacgactctacctttgctgaaggaaaagttagaaaaaatgatggagaaaaaaggcactaaaatccagactcctgcagcacccaagcaagttttcccatttcgagacatcttttattatgaagacgatagtgaaggagaggacatagaaaaagaaagcgaaggccaggcgccatgcatggctcacgcctgtaattccagtactttgggaggccaaggccggtggatcatctgaggtcaggagttcgagaccggcctgaccaacatggtgaagacctgtcactattaaaaatgcaaaaattagccgggtgtggtagtgcacacctgtaatttcaactacttgggaggctgaggcaggagaattgcttg

SEQ ID NO: 135747 - DNA, 1980 bp, Homo sapiens
aagaggatgactaatggtcggcgtatctactatggcatgaatgccctgcgggccaaggtcagccttattgaaaggtatgaaaaatagaaacggatgcctcttaactgtttctgtctctagccaaagagaagttgttaacccagcagagtctgcagtgagattgccaaggtccaaatccctgttccagcactttccgcatgtattgtgggcatatgacctacccttctaagtctcagtttactcatcttaactcatctactgaggatgacgataatcgtacctagctcttagtgctttcaggaggataaaagaaaataacgtgtgaaacatactgtatactccgtgtattttagtctttgaagcatttcatatggatataaattatttacgcccgttggaaaatgggggtaaatgactcaggcagagccctcctgtgctccagcatgagcttgttggtgtcacccttgcttgtctttggttttgtctttgagttccttgtccatgcagggtcccccctaaagtgttgaagggtgacgaggaaaagggagacatgggcccgtttcgtgatgcgtgtgagactagtggacctggcccatgtcgactgaggaacaggaaagagcagcagaagcctgtgggttctggccttgctgtccgccttcattccctctgcctcacacgtgagccctgcctaaggctcactgtgggtttcctgatcctctttcctaggggtggatcggggggtggttatgcccccgcccagtcttccctgctagagaggcagcatagattaccagatccaagaagggcatctcaagtcaagcaggcctgggttccagtgtcggccccacctattagtcatgcaatctggagcccatgactgtgtctcttggcaccatttccctgtctgtagattggggggggagggttactgtaaatgaatttgcgcactttaaggtcttaacttggctcggcgtggtgcctgacgcccataatcccaacactgggaggccaaggcaggaggagcccaggagtttgagaccagcctgagcaacatgtcaagactccatccctacaaaaaatctaaaaaattagccgggcatggtgccacgtgcttatggttccagcttcttgagaggctgaggtgggagagttgcctgagtccaggtggtcgaggctgcagtgagccacgatcacgccactgcagtccagccagggtgacagagcgagaccctgtatcaaaaaaaagaccttcacagtgtctgtcacatagtacagatgtcctcttactgtgtgtctatgttgaatgatgaggtggtgttttttactgtgagaaagcaacatggtttgttgagagaaacaaagggctcagaaagaggaaagaggtcttttcagcccatctctgtagcccaccaactgactgacctggattaaccttgggctgggatgctgagctcactgtgcatgtgtaacgagggagctggaatgcggcgaaagcgcacataccttccagctctcagcactccacgcgtccatgaagatggctatcatgattatttttgcttgaaaatttaatttttattttttctcacaggttgtatgaaataaatgtggaagatactaatgaaatagactgggaagatcttgctagtgccatagggtaagaccatttgtttaatattaaactaattaaaatatagagatgacttaataaatacaataactccctatcatcttacagggctgataatgatgctgcatttggaattttgtataagtggtggttaaaattcagtgtatttgctaggaaaccaatttgttagtgcagaggaaactgtaattttaggagcagtgtatacgtaaaggctctgagctgctaggtagatcaggttttcatgacactaaatacatcactagttggatatgtttttcatttttcttccctttttttagtgtcacatagatcatcacgcctcaggtgtt

SEQ ID NO: 135748 - DNA, 1051 bp, Homo sapiens
aacaaggtagcaatctgttggcagcattagaaaaaaaggggccacgcgcagtggctcatgcgtgtaatcccaacactttgggaggctgaggcaggcagatcacttgagggcaggagttcaagaccagcctggccaatgtggcaaaaccctgtctctaccaaaaatacaaaaattagccaagtgtggtggctcacagccaccagtagtcccagctactcaggaggctgaggcaggagaatcgcttgaacccaggaagtggaggttgcagtgagctgagatcgccccattgcactccagcctgggcaacagagcgaggctctgtctcaaaaaaataaaaaatatatagagagaaaaaagatagaaaactaacatacagagagaaatcacaagtgtagtgatcagtagcagctccacccttctaatgtgctttctgcttctgcggttcctcagatgaagcgaggtaggcatgctcctggctgcgtcagtcacatagagacagtttcagtcctgcttctgccacacattctttgctggatatagcttttccaagacctggagagtcgcggagctggatgtccagctgcagcgaactcctcaaaccagtggttctgcatgctcatgacccccctaccttgcacatgaagggcactcagtggctcttgaataataaataggagtaaaatccagagtagacatattttgtgttaaaagcaaactcctagatcatactgtttatataccttacaactccaggggaataaactccaaagaacagggaatgttggaggaaccagagctctttttacctctatttttagctaaaagaaggaagagtgagggccgggcacggtggctcatacctgtaatcccagcactttgggaggctgaggcaggtggattacaaggtcaggagttcaagaccagactggccaacatagtgaaaccccacctctactaaaaatacaaaaaattagccggcgggatggcgggcatctgtaatcccagctactcgggaggctgaggcaggagaattgcttgaacccaagaggcg

SEQ ID NO: 135749 - DNA, 1078 bp, Homo sapiens
agtgattgctccggctgctgttcagttgagccaggcctctggtctccacttcagtgattgattgataggatgaccaccagtgagacgccaacaggaagtgaagagggctgtgaccgggttccctgacagcctgccccattcagctttccccacgattgctgcgtactgggatgagaataccatttttaatctgatagttcgtttaaacttgtaaaacattttccctttctcctaggtatagcgaaggagatactgagaagttaaagatgtaccattctctccttgggaatgactggaagacgattggtgagatggtggcccgaagtagcctctccgtggccctcaagttctcacagatcagcagtcgtaagtggcagcccccagtgcccacctcgctgaagaaataagccctgacaggcctggttcagccataaccgatccaatgcccggaaatcaccgtagacctgtcttccgcaagagctttgtttcttaagctgttctctatactaatttgtttggtttcctcgtgtgtttagtgaagccatgtgacctttacccactaggctggtttttaccacacttcagtaactgtccgtgcaaatataactgccaagtggaccaggaccccaataaactggtggtgggagagcctgggcggagggtcacttccccgcagtggcacgggacacgttgggagggaggcaggcacgcagttcgtgcccgtcaggcggggacttttctcagaaccagtgttggtgacctcctgtctgtgtctcctctttcctaaaaggtttcctttcagaagacagtcctgaccgggttttctgtttagcacaggggctcacacactccggccacacagctagtgccttgcagccagttcttcaagtttccaagaactagaggaaaatcttaaattgtttttttttttaattttgtgaactctagctatctttttttcttttttggaaatctcttgatttttaaatattcatccaaattgttattgaggggaaaatgtaacattctgtggccagaccaaaagcacagccaaacagctgccagtgtgacgctcctt

SEQ ID NO: 135750 - DNA, 1068 bp, Homo sapiens
cacttgagcccaggagttcaaggttgcagtggactttgatcatgccactgcactccagcctgggtgaaaaagcaagaccctatctctaaagaatgcataaataaatttgaaaactattttttaaaaagatagattaaacaggaaaggtcactttggaataggatgacccgggaagacattgacagaagaggtgtggcttgggctgaaccctgaaggaaaggccaaatctgcaagtgcgggcaggagggcgaatgtcaggtgttgggactgttgggccgaggtactgtcattgctgatgaaaaaccaagtcataggtttgcttttgtcattattaacaatacacactttctccctgttccttcccaattctaggtgtcgctattaaatttggcaagttttctgtaaaggaaaataagcagttagagaaaaatgtggaagactttctagccctgacaggcattgagagtgcagacaagctgctgtacacggacagatatcctgaggaaaaatctgtgatcaccaacttaaaaaggagatactcgtttagattacacattggtaagtttagaaacaatcaccctttgaccatccacagccttccagccataaacaagataacccatggtaagtgttagcacggtacctggcccattgcctgcaggcggcgcacattaactgctgtgatggctgatgatattcttttttttttttttgagacggagtcttgttctgttgcccaggctggagtgcagtggtgcaatcttggctcactgcaacctccacctctggggttcaagtgattttcctgcctcagcctcctgagtagctgggactacaggtgcccaccaccacgcccagctaattttttgtatttttagtagagacggggtttcaccttgttagccaggatggtctcgaactcctgacctcgtgatccgcctgcctcggcctcccaaagtgctgggattacaggcgtgagccaccgcgcccagccctgatggtattcttattgccagtctgtactttctgggatttggaatgtgttcatgtctcccaagtttagggtga

SEQ ID NO: 135751 - DNA, 1034 bp, Homo sapiens
attcaagttccagtaaaaagtttgaaaatcacagactgagtcaactccaagatctcatcttgctttaatattctagtagcctaagtgagagccattttaagaaaagtttaaggccaggcgtggtggctcatgcctgtaatcccagcactttgggaggccaaggtgggtgagtcacttgaggccaggagttcgagaccagcctagccaacatggcgaaaccctgtctctactaaaaatacaaaagttagccgggcgtggtggcgcgtacctgtagtcccagctactctggaggctgaggcaggagaatcgcttgaaccgggaggcagaagttgcagtgagctgagatcgcaccattgcactccagcctggcgacagagcaagcctctgtctcacgaaaaaaaagaaggaaaaattttaaagttatgaggtcaagtgatgtgttaatgttagtcaacccaattttctaaccccttaggttagaacctgcaaatgaagaacacaatgtggaaacagctgaagattccgaaataagatacttatctgcagattcaggagatgccgatgattcagatgcggatttgggttctgccgtgaaacagcttcaggagttcattcctaacatcaaggacagggccaccagcacaatcaagcggatgtaccgggacgacttggaacggtttaaggaatttaaagcacaaggtgagcttgtggggccttagtgtttgttgaacttcctgtatgcagagctagcacctaactttcttttatggatgattcagatttatagatcgacaagaagcattctttctcctccttcacctctatctcctaccagaattgtccaagctgtaaaattagcaaaataaagtgcacttgcttttcctcttcttgcccagtttctggtaaaggtggccaggaagaatggggctaaagagaccagataattaattcccactaagaagagaagggacgagaggttaattggttgagacactggaaatgatacaacagttatataaaattaaaatgctgtc

SEQ ID NO: 135752 - DNA, 1118 bp, Homo sapiens
ccaggctgtgcccgacgtggggaagcgcgcccaaaccagcccgcgggccggctccccggcgacctcaaggatgccagaggccaggagctccggcccggacctcacgcgatggaggaagcagcagcagcctgtgcgccgcacggtcagccaggtctgcccgcccccgcggcggcccctgaccgtggcggacatccgttccggcatggagaacgagcggctgggggtcgtgcgggactccatgtttcagaaccctctcatcgtcaaggtgagcaccccacgcccaccgcgctttcgctgtcgccggctccgggcacctgcgccgccgggggtccccacccgcagcgccctggccccgcggcccggggtccgagcgcagcgtgggaagctccagctctggtccagacaggcctggacccccatgcaggtcgcgtcgcctctctcagcctcggtttccccatcctcacagtgggatgataatggcaccactaaagggactgattgggaagattgaatagggtaatttctgcgggacctcgggacagcgcctgacatggggtaaggctgcaatgggtgctgctgtggtttcccacagagtgaacccacagggtgacagataggtcgcacacgcccagtctaagtcgtggctgccagccctcccagggtaaaggccgcctctccggttccgctgcacgcctggggtacgtctatgcagcggtggctccgtgtctgtcctggaagcatcacgtcgaatgttcatttccgttcgatcatactaatttcttacccaaattacaaccctaagagaaaaaaagcataatctttggcctaggaggctccgcagacaagaatgagggagctgcggtttcgggctggatcactttcccttccattacacttccctcctccccacctttagcctcgcttcccgctgatgggaaaccaacactgctgtggcggccacaccttcccgggggccactggagaagtcaggctgaggcttgggggtcagggagcaagcctcgaggcgaatttatcttgcgccgctggagggcagtgcgcctttaaaaatgcgccccgcgtcccaggtgcgggagtggaaggcgcaggtggtaaccgtg

SEQ ID NO: 135753 - DNA, 1062 bp, Homo sapiens
agctttgtttccctggtgcaccaacttccaaggattttgtttggtttggttttgttttcctcagcatgaactaatctaagatttaaaacaaaattgattgagtacaccagaaattaagctcacagtgggccagggccccatcacagactctatgctctcattgtggcactaaatacagcatttcagggaagcaaataaatatgctttataaagaaaacagctgtatttttccacccagtcactcaaaggcacgtcagggttcgggcaagaaactgacagacatgggtcaatgaacaggaaggtcaacatgagtagcacacaggagggagaatggccaccaaaaggattgtggaaaacacataatgagccaaaaagagggatttttgatcttttatatgaaccaaacaatacatatttgggagaccagtgaactcagaagcatacaagataaatttctttgtgtggatcgaaatcttttgtgtttgtccagaagaatgaaagtggaggctcagaactctttgatttcaaggtatgtgtggcattagtgagaggacacaccgctgccaggtggctggttgtttgtaaccaatagcacagcgtctaagctgtgccgtggcgtcagagaagcagccccagggagccaaagctcggatgccacagcctcccacaaagatggggcacccaaaaaggcaacgagagaggtgatctttcggccacagcatttctgttgagggaattagaaaatttactggcagctttattagttaattttactggacaatagtgaatttggccgtgtcaccacattaaaatgccatcataatattcccattatgtagaatcgcatttatattttccatctgcttcccaggagatctttaagagccaagatattggctttttttttcctttttatgcatttaagactgctaatgaacccatcagccaaagagcaaatatttattgaacacctacaatgtgcaagggaccggaggaaacacaagaggttgaagactttgtgtccaagaagttgtagtctgatcagagagaaccagactttgc

SEQ ID NO: 135754 - DNA, 1013 bp, Homo sapiens
cacgtgcacctacggccagaagttgactgcacaaggctgaaaccaatgcagccaagacatccatggctgttaaaaaaagagttaggaggccgggtgtggtggctcacgcctgtaatcgcagcactttgggaggcagaggcaggcagatcatgaggtcaggagatggagaccatcctggctaacacggtgaaatctgtctcctaaaattacaaaaattagccggcatggcctcgggtgcctgtagtcccagctactcaggaggctgaggcaggagaatcacttgaaccagggaggcagaagttgcagtgggctgagatcgtgccactgcactccagcctgggcgacagagcaagactccatctcaaaacaaaaaaaaaagagttaggaagagggagcagccctggcctggcctggtccagaaagacctgtggaattgctggagggctgagaagaggagggacaggtgtagacaatggctagacaaggtgagaaattggctgccatgagcttgggtgcatttttaggggaagtctggaggaagcacactaccaagaaggcggcagagggaggttcctgggaaagggatgctgggatcaggtgaggaccgctcaaggagccttcactttgggtgtcaccacttgaaagtttaaagaagagactcgggataaagacgcatagataccgggtttcccacggatgttggatttcaggttattccaaacgtgcgcatctgccggccagggagccaggatggctgggggcaaaacctccatcaaggctgagcagagcggcctcccccttttcaaaggaaaggcatcccctcctcctctcccaaacacggctcccttcttctccccacctccctaatcagagagagcaaattgttatcagattagcgccagcaatgaaaagcacagtcccgctcaccctcgcagttagttagcatttagatagactgggactggggcccacacaataggcatcaaagcccagctcagggcggcgggagggat

SEQ ID NO: 135755 - DNA, 1051 bp, Homo sapiens
ggggtctcaccaagttgttgctcaggctggtcttgaactcctgagctcaagtgatccacctgcctcagcctcccaaagtgctgggattacaggcacctggccccaggcagatctttaaaaagacccatgactggcccctactgggacagcaactcagggcaatccttcttatgtgtgcaggagctgactgagccccctaaaccggtcacccccacccctgaagatgaggaagatgaggccaaggtttgcgtattctctggatgaagccctcggcctgggtccagttgtgtgatcctgaggactcgctcccacgcatgcccgccacactcagagccctaggaactgacaggcggccgcatcttaagacggggacgggggtgggggggcggggggagaaaggattaaaatcgagatttcgctattatttttctctgataaaagtgcagcgaggaatagctcgactgtgtcactgcctagtttttcttttgtgttttttgcttcctgcttcaatatcttcctccagctgctcatgtctccttttcttttctcctcactttgatctattcgttttccccagaaatggggtttataaatcattgtaatgcagccttgggaaagatggtgcttagtgcagggagaaatacatcgccgctaacagccccggcagggagaaaaactctcgccttgttgctggaatctggcgacaggttactgatggtatttgctttttatgtctgcacgcgtgccatcggggcagggccgtggggagcgttccgcacgccaccttggtaatatttcaagtctcctccggcagtcgaaaacaaactgctcctgcctgctctcaaggaggcagagagagaaagggaagggagacgcgaaggcggggaaggagcataaagacgcgtgcctgtgattctctggatcccaccccagataaaatcagctcctaaaacacccctttccctccctgaaaccctctgcacatttggattgacttaattaatctggtgtcccagatcgtcaggaccgactctcccaggcacagttagga

SEQ ID NO: 135756 - DNA, 1059 bp, Homo sapiens
ccttaaatcagaacataaagagggaccccgttatcccggagccaggggcgcttgcacagatccgggcccctggacgggcctgagatgcgcagaagtgcagcttacggtcgcagcgacaagcttttgatttcttcttcaccgacaggcctctccacctttgtctccctggcgggggaggggggggggtgtgtatggaaggctcagctcatccccactttcccgcatcttcttttctccacatatggaatttcgactgaattttcccatcgttgctgcatctgtccacttcatcttgcctgtgtgggctaggtttcatcctaacagtgatcagcagaagaaaatgtttattcctcttcataggtcaggtccgcacaggacagagtgaaatggagacagtgagttggggaattagcattgggtagctcagcactgtccggtggaactttctggagggagctctccctcctgtgtccagtagggtcactacaagccgcatggctagtgagacttaattataattaatttaaatctaaatagcacttgcggctggcaggtgtcgtgttaggcggcacagatgtagccaggcaagctggaaaattcaaaggagacgcttctgttggtgataccttgttatacctggaaccactgtttccagcaggctaacactaaaacactgaggcatgtgcaaggaaataaaagggtgaaaaaagcatgaaatggttgaacccttttgaagtcacactcttcctccaagtacactcaggggtgaggatagtcgcagacttgataaccagaccagatcgtgggagaaaatttccttcggggtaaaaatgaaaagatagtctgggtaaattgtgacttgcccttctggtggcagcccagtctacagccctgaaactatttttttttttttttttgagacagagtctcgctctgttgcccaggctggagtgcagtggcgttatcttggctcactgcaagctccgcctcccaggttcatgccattctcctgcctcagcctcccgagtagctgggactacaggcgcccgccaccacgcc

SEQ ID NO: 135757 - DNA, 1048 bp, Homo sapiens
tgtggttttccaagcctctgttctgtttggctttctgttggacagtcatacacttacgaacgcctcgggacatcattcatttattcactcactcactcgttcacccaaacacgtaattataaaactgcgactccggatcccttcatcccaggaaggagcgtgactcaagtgaaatgggataaatgtgggggctggtggggcgcagggatgcggctagttcacattgctcaagtatgcagggatcaaaggccaccgttggaatgttccaagacctttgaagcttgcaacaaaggggtttctaagaaagttcagcccttaggaccagggggggaatgcacagatggagctgctgggggttggtggcagggccactcagttcgggtggcggcggtagagaatgattagggaattaccaagttattgaccaacaggcacacagggccaaaggttgagaagaaggcaggcaaaatggtgcgcgtgactcagggcaggttgtttggggggtatcagaaatgcctggaggaagttttctctgaaatagtcaaaattggatccgacggcttatgtctttccaactgatctactaatcatatttcttcaaattttatatccctgacccttgtaaaaggattgcattgaaggcgtgttttaagctgcattttaataagtcaataagaaagctcaaaattatttaaagcttcttaaagaggattatatttgatttcttgtgggaattctggggtgtggaagagaaagaggctcagtccttctgaggttgtttaacatgaaggaaaatgcatcatttcagacaaaaacttttaactgttttgttgttccaatagagatgatttaggacaaggagactttcattatctgctggctgcattaaccgagcctgaggtcttccagcgagaagaaactgcattttaaactttccagcaaatgtgaggccctcctttgcagtttattccctaacctttaaaatgagagttttctgatattctgaaaagggcagttggattccccaggtatctggaagagcccagcc

SEQ ID NO: 135758 - DNA, 1032 bp, Homo sapiens
ctgccattgcttaactgtactttttgcaagacagtgaatttcataagagcagggctgtgtgtctgatctgttcaccctagaacttccagcacagagggcttagcgctgagtgggtacaaaataaatatttgtggaatgaaagtatgagcaaacctcccattgggattttttttttttgtagtctaaagcttccacatgtttcagcagttattgattcccaggcaaccacactaaaaagcagagattgaggcacacacctgctccttgctccctgcctgagggtggcagccagctcctgagtctgtctgtcattcccctgccagctgaaactctgcccacctgcacctgccttgagggaggcagagtctctcccagagaagtcacattttaattaacttccccggcagtcactggagaggccggatcattttcataaacaaatgagaggccagagctttgtctgtaactcagagagcatagtatggaaggaattcaaaacaagccaccctgcagggtccccatgcacccgcctgaaactcagagccccatcactcttgaggaacattggggtctgggatttgagatggaaaagaagcggaagaaaaatgatcaactgttgtgtaaagaagagccaatggtctcaaagtaggctgtatgaactgcatgtctgtgtacccctaaaattcaaaacctaactttggatgggatggcgttagcaggtgggtcttttaggagatgattagatcatgaaagcagagcccttgtgatggaatttgtgcccttaaatgaagaggaagaaagctaactctatctctgctctctgccacgtgaagatacaacaagaaggcggccatctgcaaaccaagaagagagccctcaccaagacactgggtctgttggtgtctagatcttggacttcccagcctccagaactttgagaaataaatgtctattgttgaagccacccagtcaatgataatttgctatggcagcctaagctgactaagacatagtattttacccactcattta

SEQ ID NO: 135759 - DNA, 1042 bp, Homo sapiens
acctctgaggtgccagattatgtaaaaccaattaagctcctgctttgtttgtttgtttgttttttcagacagagtcttgctctgtcacccaggctggagtgtagtggcacaatctctgctcactacaacctccacctccgtggctcaagcgattcttctgcctcagccccaccgagtagctgtgattacaggtgcctgccatcacgcctggctaatttttgcatttttagtagaaacagagtttcaccatattgaccaggctggtctcaaactcctgacctcaggtgatccacccgcctcagcctcccaaagtgctgggattgcaggcatgagccactgtgcccggccaagctcctgctttcatccctgtagcaagtcagctcgtcggcatactgatccatgtagaatggggggtatctgtatttacagaggaagtgtcaactccatcagggcctctgaatcattcttcccattgccctatttccgcatgtgacacattccattcctgcacttggtgccctacacagtgacgtaagatgattcttattccgatgcaaggaagcgacaggattcttaaaatacatcactggtgcagagacccttgggaggggccgtagatctggcatctgtccttcctgggttcggatacacctttgtgggggtcggcccatcttcattttaactggacaagccttgtggagaggcagaggcggcagggtggacaggctagaagcccgcttggggggtgtagcagagagttaactttccagccagctatgatttgtaagagagcttaaaggtgggaaagaaaatccttttcttagattcagcagctttcactaatcagctgcatctctgggtgtcactgcttggctggctgctgagatatatttttttccctccatctcctgttctattagggagccaggggcccaggagacccgaagcagggttagtcttccacgaacagaggagtctgatcccagcgttcagagcacaaaagcttgtaaatcaaactgttagcttaatagcttgggccatt

SEQ ID NO: 135760 - DNA, 1046 bp, Homo sapiens
tttttaaactgtattttatttttttaagatggagtctcactctgttgcccaggctggagtgcagtggcacaattttggctcactgcatccacctcctgggttcaagcaattcttctgcctcagcctcctgagtagctgggattacagacatccgccaccacgcccggctaatttttgtatttttagtagagacagggttttgccatgttggccaggctggtctcgaactcctggcctccagtgatccgcccaccttggcctcccaaagtgccgggattacaggcatgagccaccacgcccggcccaagcctgggtgctttcgtgagttatcccatttcatgtcaataactctcaataaccccacatggtagagatgagctgccctgtctctgaggcaaggaggctaaggctcggaagcttaaagtcacgtgcccaaggttaatagctagcatgtggccaggtggggacttggactctggctggctgcctccaagcctcaggccctgaaagagctgataaacactaaagacttgcaactgaggtcgggggccagtgcagggctaaatgcgggcccgggaaggaaagtgcagggcggtcaggaatgagggattttatgagtgtccagagtgtcgtggccgggcctgctccggctgatttaagccctggcaataaaccaaacttcccactgccccaaaagcctctagaccttgataaaacctcgggcatcttttaaattgcagtttggccccaaggctaaaaaggaaagaggcggctgatcccggattcaggcttactgcgttaaaagtgggaggctgaggctgagtccagcaggagggctgggtctgtctgtgggctgggcagccatgcagagtggctccaggtcccagcctgcctcatgcccgccccaggtctgcatctgtgaagtggggatggcaacagagaggaccaagtgcaatcatgcgtgtgaagcgcgtggcacaggcctggctaggggacggtcatggagcaacaaagcctctgggagggacgaggccctggaagctgct

SEQ ID NO: 135761 - DNA, 1051 bp, Homo sapiens
acttcctaggctcaggtgatcccccacctcagcctcccaagtagttgggactacaggtgcacaccaccatgcccggctaattttttttatgttttgtagagatggggttttaccatattgcctaggctggtcttgaactcctgggctcaagagatctgcccgccttggcctcccaaagtgttaggatcacaggcatgagccactatgcccagcccttaaataccttgtttcaccttgcgtgcaatccgccagataccttcaaatcacttggaaggagacagggtacaactactgaagaaagtaaaacacttcttccacttagagtttaagctgagcaaagcagagatcttcagggtgcctgaatcttggatgcattcctaagggctgtgttgcctcatccccagactcctgacccactcatctgtccatccgtccatccatctgtccattcattcatctatccaaccatctatctatccatccatctatgcatgcatgcatgcatccatccatccacccatccatccatccatccatccatccatccatccatccatccatccatcctcagccatctgtccatctgtttgttcatccaaccatccagccaagatttgtttggtgtctactgggtgcctctaaaagtagagttaccccaagacatttgaaggcctcctgtctgcggacatttccctagaaccatgcccacaatatggcattaacatctttgctatctagctgaggacacttagctctaatagtcctatttgtgacttgtcaggcttagcctcgtcaaccacagaaaggttctgctccttcttaaaagataccagaaaaaaatccttcctggtcattattccaataagataaaaggggaataacaacaccaaacctcgttgcagtacactccaccccgatgggccgaggacaccaaacatctgagtgtgtccccagcttccctggcagtaactcagaagttgttcaacagcctatattaatgagcaataaagtactgacgggcactgcatggacggctcagcaaaggacttaa

SEQ ID NO: 135762 - DNA, 1050 bp, Homo sapiens
tcatccaactgggctattttttaaagtgactctttttaaaaacagctttattgagatataattcacataccataaacctcaccaattttagcctgttcttaggattgtacaacccacctccacaccctaagtttagaacatttcatcacccccaaaagaaactttatagccattagcagtcactcctattcctcttccctagcctctggcaaccactaatctatttcctgttggtgtggctttccctattttggactcttcatataaatggaattatacaatgtgaggtcttttgtgactggctgctttcattcccttagcatcatgttttcaaggttcatccacgttatagcacagaggaccgcttcattcctttccagggaatagtattcctttgtatggatggaccacatttttgttacccattcatcagttgatggaccttgggttgtttccacttttgactattatgagtaatgcttctagaacattcatgtacagtttttgtgtggatgtatgttttcatttctcttgggtgtatacctaagagtagaatttctgggtgatacgggagctctatgtttagccttttggagaactgccaaagtgtttccaacttggctgtaccatttttgattcccaccagcacgtatgggtgttccaatttctccatatcctcaccaacacttgttgttgtctgtcatttttattctagccgttgtagggggagtgaagtcccatctcattgtgattttgatttgtgtttccgtgatggctcatgatgttgttgagcatcttttcatgtgtttatttgtttatctcctttggagaaatgtctgttcctatcttttgccttttttttttttttttttttgcaagacagagtctcactctgacgcgcaggctggagtgcagtggcgcgatctcggctcactgcaacctccgcctcccgggttcatgccattcttctgcctcggcctcccgagtagctgggactacagatgcccgccaccacacccagctaatttttttgtatttttagtagagatc

SEQ ID NO: 135763 - DNA, 1043 bp, Homo sapiens
tgcaagggagacagattcaaagagtgggagcctcttcagttaagattttgtgcaatcggtatctcagcctgccctttcttctcaagaaatggtggtgggtgaagaccccgcctcgcctcctggtgtccactgtgtctgttacatcacctccaagtgctacaaaatccatcccattaacagcacaacatcctcctgcctcagcatttctcctttgggataacctaagggcggcacagggtggaaagggtttgggctcacgtgctcattcctgcatctgggcttctatccatctgttaattcgtgaaatgcatgtttattgaacacaactctgtgtcagatgtgggggatatggcagtaaaccagagagactcggctctaccctcgtggagcttttattctagagggagagcagacatccagcagtaactacacagctatttcattacaatggacagaaggctggggagtgcgcagtgagaacaaattgggtgggtcctggggaagagatgcatacagggggtctcgaaggatgggttgggattccagggcaaaggggggtagcgtggctgctggccctggggtccaagagagctcaactttgtgaggggatgcggcggccaggtagagggtgggcagggcaggtcctgtttggatttgcaggagcagccaaaggctctgcagtgggttcaggataaagcaggacccatgcctaggacagccacagggtgcttgtcgagaatccaggccagggttgaccaccccggagtggttagctaagcccacggcgctgcaggttagggtgaagaaaggtgacagaagaagaaaaatgtggggagagaggatgaaatattaaaagggggtagagggaagataaggaggggcttgtagggaaagtctctgtgctcggggccacgtggaatccccctcggactgtgtttatcatttcacagacgagggaacagaggcctagggcagagtgtggttcagggctgcccccatagggaattggtgacccccaacctctggactcttaagttctggat

SEQ ID NO: 135764 - DNA, 1037 bp, Homo sapiens
ggcccctgcagcacagtctgcagccgacaccctgctttggccgtgggaaaacattaaaatggagaaaaacccaaaaaggtgtacagcgggacagcaagacttcccagaaagtttaaaatctctctgggtcttcgagtggaacctggaagccccgggtggcagtggattgatgtccagttcttgtcagaggaggcttgtgaaaaataactgcgcctttgcctgaataccacgtccccaagaatcagaggggccacagcccttctcctccatgggaggccctggagcctgatagaaatcagtggtgtggggcactgtagagactagccagctcccgacggaaggggtctgtgtcttgtattgatcccatcagtgcccggcactcccttcacccaggtgctgacgtgccggggttgagctggcaccccgggatgtgatgtaagaacgccctgcgcgtcagcctggaacgggcttgattgctgcccttaactgtgttctgaagtttcacagcttggcttcagcctatcagcgcatacattggcatgaattttgtgaattagggtgttaaaaactggaattgaatttgtacaaaaagagaatatatttatcactaattattttcttaatgtaggaatgtaccgttaaaaaggaccaaaagtttttggtctgggtcaaaaaatacgaatgtgttctcaggctcgtggtccctcttattttcttctggaaacacgaggttgcatttacatgcattgctccctctttcatgtccactgaaaactcactctctcagggctaattgatttactgttggctttttattatttgcctttgaagtcaaaaggcaccagtatcccaagctttttttccctatcgaatcctgtcttgtcttcaagaaaggtctgggggtctttgtattgtgacccaggccacagctgcccgccccccgcccccgacccaccccgccctgcccctgcattgtgttttctgggaggtttgaaagaggccccctggagcatattgatttcccaataaatgtaaga

SEQ ID NO: 135765 - DNA, 1052 bp, Homo sapiens
ttgtttcagatcttcttttcctgcagaggttggcttgaatgtgtcttcctgtatgttgcaatagaaaacaccattgtatgactgtcaccctgtcctctggagtgtgattagaaacaggtattattgctttagctcgtttataatgggtttctacaagctttcacagtcaggttaacaacacactattagtcttatttctaattcttgggttttaaaggcattgttacatttattttgaccacagtttcagttcagtttattctctgattacagcaaagaaaatgctctaaatgtagtagcagaacgtaacatatgtctttgtgagaactccatgacactatagtatcctaagacattgccgttttggtattgaaggagttgccagcaaggaagtgtggatttattggtaattgttttattgttgttgctttggttaaaatcctgtcttaagaaacattgttttactcttcagttttcataatcattcttcttatgtatgattgaacatctacaaatttcctcctctgatcttccgatcaaatggtaaaattgccatcttttcagaacagttatcaggattcgacatcggaaattgattttcaacctttggcattttctgagtgacttagggtagggagagacctccctctaacacccgggtttgtgtgggctgcagaaagctgctggtctaatcctagatgcagacattgaccaggctgtgccctgggtttgggttttgtagggtcagaaatatgtttaagagttttttccgttcataaagagctatctggctgtcatcccagccttcactgtggaaccctggagggctgcgtggaacttgctggactctgctcccgcagggctgagtcctgaagccctcaggagcccatgaggaggccagttgctttaagctgcttaggggttactgggaagctgccgtgagctttcactgcttcatgttgttgagtgtgacggtgggtttttccctgtcctttggcaaaccgctgtatcatacacctcatttgccatcagagcatgagggtgtatagttc

SEQ ID NO: 135766 - DNA, 1158 bp, Homo sapiens
ggtcttatttccattgtttggcctctgtgagattcaaacgctgtgtgtacatgatttgcaaacatagaagtgatgttattgatcagaccaggccttagttcacatgacaatatgccacatatctgaggatgactcctgtctcctccccttttctctttttcgtgctgttaataataacactagtcagcatttactgagtactttcctaacaggctgtgtgctgaatagagtgttagctcattaatcgttgtaagtgaataacgtgggacttagagaaataagtaccttggccgaacttccagaatcagttctacagcctgtatgaggttgtgccaggacccctgctcagaggggcttgtttctggtgtgcctgtctcaggctgtacgaaggcccagctgcattttggtctgtactgttgcagcctgtcctctggatggctcggctccacccatcctatctgcccaggttcttttcaaagtctggttcgtgaaagtatccagacttacaatggaaactgcccagcaagaagtatggggcaatcacgtctgttagtgcaggggatgataatggcagggatggcggctccactgatggatgctcagcagtggccaggcactggcccccatgatggatggccattgtggtcctcacttcaatcatgatgttatccctgttttacagaggaggaaactgcccatgatggcaccactgtccactgggcagagccgcgattcgaacccagacctctggtttcaggttgaaacttgccaactgaatccctgtccatttgcatatgtgacagttatgccaccctaccttctaacagcaagacctgacatctgtcccagttcaagctcaccttgccagcgtaggcccatccctttggtctcctagactgttgttattttgtcagccagtgtattagctgttcctgcagatgtggtagacatgcctcatgatttcatccagttcacccacagtgtcaaacaggacaggcccagagggctgcgctctggggtgtggggctgggattctgcctcaagctggtccttctcagtcagtattttcagtgtgtaatcataacagttccaagcacaactcactgctgccatgttcaccctgtattctccatcttaacagtaattcataaggctttc

SEQ ID NO: 135767 - DNA, 1019 bp, Homo sapiens
tcacagtgaccctgagcttcctccacacctgggtcacctgcagacagcgggaaccacagggcgtgctttcagtcatgcagtcagggctgacaacaaagaacaggaacccagccagcctctcccgggacgatgctggagacgggcacattcactgctggagctgcccaagcactggaattagtagatgtggctggcctagcacaaaccgctaggtccagatgcggccgtgtgcaacaggagagtaccagctcttcattagctcgtccttgctcagagctcttctagttcatatcatttgagagatcaagaaagaacatgacagtcccccaggtctccccttctgcacgcaggatagttttagtcatcccaaacccctcctgtattacagccgactacctcctctcctcttctaatctaactctactttcattaagttgctttctgcaacaggaaggtgtgtatcccggacccctccacactcttcttcatgatgtcagagcctttccatcttgttataacctgtacgaaatgacttcaagtctttttcagatatctccacgttggtcccaatgttatagctacggtccaaaatgcagagtaatttgttaactacttaatagtcaaaatgagggatacagttgagaaccagcatcccagagcgacagcatgtgacactttgtgcatgtcagttttaagtgctcgtggcggtggcagcagcatctcttttgagggcttacgtgtgttctctgctgagctgagtcctccatgcacattatctcactgaggcctcatccagtccctgtgaccaaggcaggatccgcagtggccagtgtagaactcggagcccggtcatgtgattctgagtcttagagatcctgaagcccaaactctcagccaagggccgtgtccgctttctcgcctgccccgtctggaagctgctggtttctagaatctgtattgggtgaaatagcaagtatatgaacacaaggagataactactcgtgtaaccaaagaaatgg

SEQ ID NO: 135768 - DNA, 1063 bp, Homo sapiens
tagagatggaaattagagatgaaggccagagctggaaatattagacctaagcagttcctatttgaaggcacaaagaaaaacgagaaagaacagtactgaggaagagccatagaccatgaacccaattcctaggaaatttatgaaagagagaggtgttgacttaatattcagaccctttgttggataagttggctcctgggatcaccatacattagatgtagacttcacagttcacgttgagtaataagcagtgtatggctgaagggggtttgtaatcactggtactttttatcatgggatgtcttggccagagactgaccatgtctaatgagacttactccatgctggagtatgcacagggtttttttgttagttgcctgctattttgagaagagtgccaggctggcttaccaatatcggaacactgtagcatcctttctttttataaatagaaatgctttaaaaaccattcatttgacaaatatttatcaaatcgggcactattctgagtgcttggaatgcatgcgagatcaaaacaaaaatccttgctttgtgaagccaacatgttagtggggtgcaggggcagcagacagtgaacataataaacataacagattagtccatttaaaggtgacaagagctatggaataagtagaaggagatgggggaggtgaaggggtgacatagcagagtgcatttttaatggggtcagagtgagcctcattgtgtaggtgatacttgagcaaaaacctgaagtgggatgagccccgtggctctctaaaggaagggcattctgggcagtgggagctggtgcagacgagctcgaggaaggcagtgtgggtggaaagggggtgctggccaaggcagaatcacgtaggactttgggtcttggtcggaatgaagggggagcagaagtgtgggatctgacttaggtttgaaagagatcacctggctgctgtgtgagaatagactctagcgggggcaagtgtgaaagctgggagcctggctgaggagcaattgtggtcaccagaaaatatagatgaaaaaatgggttagtcagcaa

SEQ ID NO: 135769 - DNA, 1096 bp, Homo sapiens
tggtgattttttttttttttttttttaagaaaagctgagtaagtttgggctttcatgatataactggttaacttagaaagctaaattaaccatcctacgttgtaggtgtcatgttggtgaagacctggcttgctgagccaagtttaacttgaattcagaggaaaaagaaaaactaaactaaattgactgtgttactaattatcacatagatatacacaacccgagagagtattttatgtgtgattcatgtcagtagtaagaagaataaagtagatgctggatacaacttttaaatctgttatgcgtaagaaataacgtgtgtcttaattgctgtcctcaatttgagcagttctctagcatgtgaactaatgccaggcatgtaaatgtgggttcagtagctaggcctttcgttcagatagccagacacctcattacagtgcccctctccttcacccagcgtgattgaagcccatggtaaatgtccctttggcacatacatttttgggcttctgtgaacagaaagaaagcgagtgaagcatctgtaaaatgtatatttcatatttaggtatataaaacatatatagctatgtctgggtgtgtgaatgttcacctacctacaaagagaataaatttgatctttcaactttactgggaagcactcagaaggttctagggaccatgggggtaaaactcagcttggcaataaagtgattaaaacaaaacccttccattttgcttaaaaataccttggaagttggcaatatcaaggtgcaggctttcacaaaaacctcccacctttgctattactttttataataaaaatagtccagcctatttatcttagactcatctgttgcttcttgataggtgtgaaatcttcatcatcaaagtatacacacacccaaccatgtttttcctacaagcgtttttgtcctgtgaaatatacctgtaaacttatcccaacaaaggagccgttgctggcattgcgagatcttaaaataagttcagagccccctgctcatcctttctgatggcctgtgttttccaagatcagtaggatgttagagacaaaggtgcattgcgtgcggatggatgg

SEQ ID NO: 135770 - DNA, 2018 bp, Homo sapiens
cctgtattctaatccagctacctgaagagatgggggtagggggttactagatccttgctgctctctgaggccagaaagcaaaatcctaagtaaatactttgcacttcactcccacagcgaatgccttgaggggagatgttccagaacacacctcaaggccagcttgttaggcgttgctcatggttgtgggcggggggtgataatccatgaatgtgttcctcaagtggtttttcagataaaatgtaaatcaataaaacatgctagaagagttcagagttctttacattacacaactgataattactgtttaagttcctaggctaacctgtggattcttttagcaaagggtgttgtgactccctcatcaatgggttctgtagaatttgcccctaaatcagaatttttaaccacaagaggactgcagtaggtccctgagccccctgaagttgtatgcaggactgtgtgtgtgtgtgtgtgtgtgtgtgtgtgtgtgtgtgtgtgtgtgtgtgtgtgtgtacacgtactgggcatatacgtgtatgcccgaatgtgcatgtactgtgggcgggtgaactctcagagtttgcattaaattatcaaacatatccaggaccccagaaaggttcagaaactcagtgttaaaccatattcttttctttgttaaaggatgttgcagctcggggcttagatctccctcaagtcacgtggattgttcaggtaattttttagttgttaaggtgtaagctttaggcaggaatatatgatcatgagtagatgcattggctttaagtagaataattattattatcctcttgggtgttgccctggtaaccaggcagcaaaccagccttatctgttcaattcccctgacatctttccttaacccagcccacctcaccactgcagcaaaacagccagaatgtgcgttcacgagagggaggtggcaggctctcctgcttctagactaattcgtgtcacaaaccaaaatttcaacaacctgaaaataatgggaattacctcggtccctgggaggcctcattgtgtccagaaggagatggctcagctgtccgagagccgtgtccgtgtacgttgacctgcagggagcaattaagttcctgacagcatcttacacatacctctagccttagacgctttgccagagggtacaggtgttagcactagagtctggtggttttagttttgttttttcttttcattagtctacagaatggtatttttaagcccttttgtgtcggggctgggggacatgccctgttgacgtgagtcatggtttattcacattttagtgggattgcatgcctgtcactggccaggatgtctgatctgctcactgcagatgatcactttagaactggaggcattgtgtcttctttcctgctggccacagagtgaactgaagataaggcaatgacaattttaatgtatgggaggccagacatacagaattgatcatttagagcttatattgtgaatattgattcatttaatatgcctagcctcccatacattatattgaccttggccctcatctctctgatatgtgtagcatcaaagggaaaacatagggaagaatgagtggatggtcaattagctttaatgatgacaaagttattgccaaagaaaacatacaatgctttgcattatccattgtaatgagtgatagagtctgctcttttctctgagttggcagtgctctccgtgcaagcagaagcatgtccctacctgcagggaacctgcccctcacctgcccgcattctgtagaatggccgtcattctgaaggactgagtggggctgctgcaggctggtggggaccagctcctggggcctgctcctggtggcctggcatcagaggtagaccctgcccacagagcagggagccccttcatccttacaccctccagtgtcctctggacacctcaccctgtggccttgtctaccaaggaagtaggccaaggtcatgtggtcatcctggagaaatttacccccacctgcctac

SEQ ID NO: 135771 - DNA, 1574 bp, Homo sapiens
tgtttgcatttctatcccagtgtctagcacagagcaggcatgcagtaggcgcttggttttgtagatcaaattgggggcgctagacagggcccaagaaacttgatgttaagagctaccagtgtgtgtgtttttctaaagacagagattaatagacttgctcactgggaataagtttttcattcatctggtgttatctgagaagtgaatgttctggactgtgaatattgaaatagaaagcagtaggaacctttggggtggagtttgggttattataggaacagaatattttatctttgacccataacatgctggatttatccctcagaaattgttgagtctcctagtatgcaaacactttacagacatgagtgagttgtaagccttaaagaaaactccaggtatctgaagttctgttgtttgtatttttagtagctctgcgtggaagaaaagattattctttctgaaatagttaatataattctcaggtcaaaagcatacaatcactttccttgttctgtctggctgatgatacctgcaggcacgtggtatcagctagacaaagaatgccattgtcttggcaaagcacagtacctcccagccctctgcgccctgccagtcccaggtgccacatggaaagagaactctccctcgcccacagcctgatttctctaaagccctcagtctttgttcattttctagtccaggtcactccagcatgccgatattctggggactctctttgctgtgtagtgaagatgactggagaagagctgggtggggttcatttctctcggttgctgggccagaacaggagggccggttcccagtcgtgggaagttcttcgcttcctctcggtgttcctggctcttctgccatgcttgtttgctctagctgatgcttctagcatatgagagctgcggggcgagtgggacacacacgctgtaatagatcatgcctgggtcgggggagatgctgccactctgcgtccttttaagcagcctgttgcttgccaggctatccgaacactctccaggagcctccttggtgttaatgaggaacgagggccacttcaggacgagacagatggagaactggcttcttttgataaagaagaatcgtgctgttaatcgttacatggggattttcccccctttatactgtgccttttgccattttaatttatcatcccgagatccttttaacaaggccagaatgaatgtctttatgaaaatttggaaatagcagtgtgctcacacagaagttcacaattacgctgtttccttcatggttaaaaagtcccccaccccattttccttcttgctaggaacagttaagggtgcatgtgtgtgtttcatttcattttcattataaacatctcaaaagcagggacctttttagtttcatgcagctcgcaagtcctgataatgtggctttgtgtaatgtggctgttcaatgaaggtgtggctatggtaagatggagtctaggcagagcatagctgggggcaaaagaaatcagtgtgtgaaagacgaggagtcctcacacattcacaatgtaatttcgtgtcttctggaaa

SEQ ID NO: 135772 - DNA, 1007 bp, Homo sapiens
gtgcctgccctggtagtgtctcacaaaaatgcaccctcaaagcgcctgctacttggctgtagcctcaagtccggtcctgtaagtacagggtcatcttagaagatgtaaagaatccgcttcttcctctttcctggcaaacctctctgtgcctgaaaatagctctagcagtaggagatggagagagctagggagatgtaagcctaccttgctggagtttgtctctgagttgtaaggctctatttttccttgtttttgtaggaaagaacagcagtgtttcaggaattttcacattccagaagaggcgtccttctttgcacggtacgtatcctcctgtgttccatgtgaaggctgatacatttctgtgatggctgtgtaatctttcgtctcttgacagtttgtcctgtggtcagtcctacagggcccaggaacactaggggccccttggtggggctggcctctttgcacctctttcttgttacctgacagggctgcagatagccagccaccaccgtgcagaagacttggcaatttgctcactaatagtggcagctgttggtctgaaaatgtgtgaatcttggagatttctatccaccaaaaacttgtaaattacagctatcgggagtaattagagctgagaaagtctttccacaacaaaatgactctgattgcctctgcttaccttttcttaaaggaaaatcggtgcatttgggccgattttatttgctgctgtctccgactatcatttgtcctgtgatttcagggcctgctccctcagcctcaggctctgcagtccgggatagctgcctcctccagcacaacactgaccttttaaactcatgcctcttgtgctcttttgagattaaaaactcaaaccttcagtgttctctacccccaggctggggattcactttaccgtagttgttgctatctccaaagattaaaatgccttctctgttccatcttggatgatgtaacttaatccccagctggttattggagaagtccct

SEQ ID NO: 135773 - DNA, 1047 bp, Homo sapiens
tgtggtccctcacagttccctatgttctaatttttgagggatgattcacgaagaagggattctgtggtcaagaaagtttgagaaatgccccacatccctcccttggatattctcagggcacattaacacaataaaggccctgagagggctgcttatagcaaaaacgcttttgtgaaacctttgaaatccaagatttgccataacttacttgaccaaagaacccttttgggaggtgggggtgggcgcagtatctgttgctatcttttggacgctgttccataggtgagtgtttatagaatggctatggaaagatacgttggtagatctccctgcaacacacacgttggcactagggcggatcagtgctgggacttggtgatacccatggggtaacatacgtagtcctaacatacatgggtgggtgctgtatgggggtacgcttttgtgaccagtttcatggtgtgtttgttgtctgctttgcccttcttacttttatccaaggtgtaacgcggctagctgatatcagtttgcatgatccagtcagtatttctgtcctggacaagagccatgaccagttgaacccaaaggacaaagcggtccaggaggtctgtcctccaccagctggcgacaagctggacagctttgcaataccagagagtctcaagcagcatgtgactgtggttcccagcaaactgaggcttgtctgcctagcggccttcatccttcagaaatgcaaggtgggactgtgggctagagccgacttgattcagggaagaaaggcctgctttcttgtgttaagccattgggagcaatgagttgagacaccaaaaatcagaggttttccaacttatgtctgcattccggatgcagactttgatatacatcctttcagtcaggttttaggattatggtaaaaactcagaggtcaatgatagccatgatgttcagcttgaaatgttctcgatacctttcctgggactgatattaggaacatcacaggtggcgggaacagctggatgtgaggcagacgtaggggcttgtgctcat

SEQ ID NO: 135774 - DNA, 1861 bp, Homo sapiens
tagaagtgttgtctttaccctctttgcccaaactgacaggttgcagaaccagtctaagaacaaggtatattagattctgtgtataggattttttttcttcttaaatcttaacttgaggtccaagtttggatcctaatcacattaaattgtctttaaaaaaaaaaaaagggggatcctgttcatcatctataacttttaaaatttttacagctagctctacaaagctttgacactgtccagaaactgcttaaggtaaggcaaaccatgagttccatttcatcttgcttgctgactttgaggaaggatttaatatactacagtctattctttattttcaaagagataagaattatttccttttgcctggatatctctgctctctctaggcagtttataggtttttactgatctaaacctaccaatttctagcttagctgaattatcagtgactcctggtgcataaagtcctgcaatttgttcatcatagtcactagcaagccacatacagaaattcacaggtacagcctgatggtgatccagtagaaagcaacttagctgcaagtaggatttgtttaagaaaggagagtgaaggcttcagaatcaaagccagccagctcaccaaattggatcatgaattgatccatcctttcttttattaggggtggagagtagggaagggtgttgcttgggtttttatcttaaccccaaaaatggcagtagacttactgacatgtgttttcagttcaggctctgtgggaaaagaaaggcaagctacttgaatgatttaagaagctcacatttctctctcactgtggtagaagctagttatatacctataattcaagttactgctgatagtgaacatgggtgtagcaatgcctaggaattgtgtctgcacaataacaccttatacaatgagaagcaccagttttctcccatgccttgtttaaggaaagggaatttggaatcaatgtctgatgttagtaaagggggctttgcactgactgtggtctgctgtctttctgtagcctttcacctggattgtgcctggagtgttaatgggaggagagaagagaaaatcagaaaaggccaggtaggaagaggtttgttggttgttgtttccttcttgaatgtgtcctgccttcctattcagtaaggctgggtccttctaaacctgctgagagctttgtctcaggctctgcttcctagtcccggtgcacagggacagattgagtcagtggggagcggtcacctctagacggtgctgttttttaaaatattaaacctacaaacaggtttccttctgatgttgctagtaacagtgctgtcaacttcttaactcccacctacccaatgctctatagcatccctggtttagtatacatccacctgcatgccactcatttttgtggacattaagagtttggggttttgttgtttgcttttacaaaaacaagatcattcacttatataatgctttgtaacttgctttttacaaccgaatatgtttgttcctttattaggatttgtaatgggtgtcagttgaaaatcgttgcaacaagtaaatctcaaattgtcttcattcttttgaaaacatttttattgtattatagcttaataatcagtactcaataatgatgcatgtagtctataactgaggagtaaatatgaaacctgaaacctcaaagcattggttaggattagactcagctgtgaataacaacaataataacaaataacagtggcacaaacaatatacaagttttatttttctttcacatttaagaaatctgacagagccagtccaaggctggcctggtgctccagtgtcggggaccaagctctttctgtctttttgtgc

SEQ ID NO: 135775 - DNA, 1089 bp, Homo sapiens
tcccttggagttcattgtaaaatgatttgacctgtaaaaagcttatctggagggcacagcaaatttaaggcacccaacagatccttaaattactttggtgatggcgtgagaacggactgcttttctgtgttcacactcttcagttattttggctctgattttttttttaacatcatatccatcctccctcacttacttgtgccctgtgaggaattgatttttctttcttcttctctatgtagtaacaccttttgaaatgtcagaatctcctaacgtcacacagcggcacgttgctgctgttgtactagcatatttaccattcctagcctgcgttcagtgtagtctcacaaagtcgatgttgagtacagacaactctggtttgaattccaaatccttttcttcttttgggtaaatgtttcttatgcaaaacacgaaaaccatacttgtaattgaatttgctgttaactctgtgcttagctttggcagtaacgttgttttgttcattcattcagtgtctttgagcactttgaatgtgcaaggcaccattggcttaggggcctttttcggattactttggtttcttctgttttttttattaatactttttagatataatgtaccatatatgttttaaaaatttcaaagagtaccaaaaatatatatagcgaaaagtaaagtcatctattcccactttcccttagtggcacagtttgcttctcaagatgccatggtggttattaccagtctcttgtatatcctcctggggaaattctctgcatatcaagcaaatttgaggatgtgtaattcctcttaccaattttgtgaagttttttgtttttctgttttgcttggtttgatacatgagtggttgctttgttatgcaggatgttctgtgccttgctttggtttctttgatgtgttttgggctccttaattagcaccatattgggctaccttgttctttttgatgactgcctagcatttcattgtatgtatgtatgtaccgtgaattactgactcattctcttattggttggtggaatttatattatgttcagtattttgctacaaacaaggccacttaaatac

SEQ ID NO: 135776 - DNA, 1030 bp, Homo sapiens
ggaataaagggtgaccaagatgataaaggatctaaagttgtgtcctgtttgaaatattgagtccaaagaagaaagaaaagagagttatgtgatatatgaaggaatgttatgtgttaagaggaagtaagcttgttctgtgttgctgcagaaagtatacctcagactattaggtagatgttcaaggatgcagatcttgcataaatgtcagagacagcttcctgattcctagaatgggtcatgaacagaatgggctgcctcatgggatgcaggaggtgtgcagggagaggctgccagtccacctgcccgggactgtcaggaagtccatgtatggcgggagtggcctttaagagtttttgtgctccaggagtcctgggtctgtaaatcaggtgaagtctgcacatttcatactgtcttgcaaatgattcaacaaacctgaaacttgatttcatctctttctttaatctgaaaattcataaacttgagattttgtaaaaaataaatttgtaagatggaatatgtccgtttttactttattaatattagatatttgaagttgtatttaattacttaggtaaaagaatccttagggaacaaagaactgttgttattggtaggttagtctgaagctgacagtcatggctaaagaaagccgacatgtaaaaccaagtcattatttcaagcaaagaggaaaataacatattctgagagaacccaaaactccagaataacaagcactggctactcaagggatgcttttatattcatttgtaaatcagaaaagaaggccaaagaaaatagaggaattggatgttccttctcctaggggaagtttggacatcatgcatttaagcacattcctgtaatggaaataagaagcaacaggcaagagatccctagtgctgtgtagcctgtaatccgcaatcaggcagagactcggggactcagagactcgaaaggcaagggaggtaggaagtaattgtggtagaggtgatggatggagcagcattctcatttggaatgggaacagggc

SEQ ID NO: 135777 - DNA, 1002 bp, Homo sapiens
ctctcaaaacctttgaagaggcagctgctcagctcctggaatcttcagttcaaaacctttttaagcaggtagatttaatagacctagtacgctggaagattttaaaagataaacatatccctcaatttttacaagaagctttggaaaaaaagattgaaagcagtggagtcacctatttttggcgttttaagcttttcctcctgaggattttatatcagtcaatgcagaaaaccccttcagaagccttgtggaaacccacccatgaggactcaaaaatcttactagtggattcgcctgggatgggcaatgctgacgatgaacagcaggaagaaggcacttcttccaaacaggtggtgaagcaaggcctgcaggagaggagcaaggaaggagatgtagaggagcccactgatgactcgctccccacgactggagatgctggaggccgtgagccaatggaagagaaactcctggaaatccaagggaaaatcgaagctgtggagatgcacttgaccagggaacacatgaagcgagtcttaggagaagtgtatctgcacacctggatcacagaaaacactagcatccccacccgcggactctgtaactttttaatgtctgatgaagagtatgatgacagaactgcacgggtaggtgtttattaacaaaaactctgaaattgtaaagcctgctttcttcatgagaaagaaatgacctaaattgagttcctgaagctcaacttttgctttgacattttttaggtaatttatttgcttgaggtgcagggtaataaataggaagcgtggattaatgcagaggatgcattcatagcatataaagaatattttgattcttcttcacactggccttgttagatatgcaaagtttgcaggatgagctttccagactggattagctcagaggctgcatttagctgagtagtatgtgatgggcaatcatggctgtagaaatatggtgcccatgctccctgcccttcctcttttgcaa

SEQ ID NO: 135778 - DNA, 1014 bp, Homo sapiens
taagaactttttgtcccaagaactaatatttgctgctttggaaggactatcactcccattgagaatgtgtgagtcagaataacacagttgagagttcagcttgccgagatcagggctactgagaacaaatagcaatccttccttatgtaaaattgagatatatctgggccgggcacagtggtcatgcctgtgaccccagcactttgggaggccagggtgtgaggatcgcttgagcccaggagttcaaggccagcctgagcaacatggtgagaccctgtctctacataaagtaaaaaaaaaaaaaaaaaaaaaaaattatcctggtgtggtggcacaggcctgtagtcctagctacttgggaggctgatgggggagccatgttctcaccactgcactctagccggggcaacagcgagaccctgtcttaaaaaggaaaaagaaaaaatagaggtatgtatgggaggaattctgagtagtttttgtcactgtatcattatcaggatgtttggcctgtctagaatagcagagtgagtttggtcatctttgctgttagggaccatatgttagaattcttaagactgaaaagaaaaaaggccaaaaattaatgggatttaaatttgtagaggatatacagaagaggtaagatagctggcttaccaacttctgagctagtaagacaccctttgaaacgtaagtgaactaattttagtgaattaatccaaaatcttgtggattcatccataagaggttaagcagaaatggattcgaaactagaagggcgctatcactagtaagagaagacaactcttgagggttgtgtatcccagcctccaaattacatatccagtgaagttttaaaaaaaaaaaaagaattggattcaagttttcttttcagacttttatttttaaacagtataatctttttttttttttttttttttttactgagatggagtctcactgtgtcaacccaggctgatgtgcagtggcgcaatctcggctcactgcaacctc

SEQ ID NO: 135779 - DNA, 1072 bp, Homo sapiens
tggccatgggtctttgggccatcagaatagacatttgtacagttctgcaaagagagcagtattccacataatattttgcctatagagattatgctttttcttcttaaagtcaaaacattataaataatagctaaatactttgtcttctaacagaactctgaaatccttgtttcagaagcaactaaaacaaggcaagtaataagattttggttttcagaacagttttctccttagtggttacagtttaccctgttatcacagagtacctgaataaatttattttatttagctagttgacacaggttgaaactctagttcttttatttttcagacagtataatcaggatttgtggaaatgcaaatctcctgtcttctgtaaaatattgctcttttctttttttctttattttttaattttccctttgtgtttgtaggctttttcttcaggaaatcctgcacttacactaaactttgctgactactttgtcttactaggtgctgattggacatatctcaaagaagatgaacaaacagactttccctgagcactgtagtttgtgtaaagagatcttgccattcacagatcgcaaacaggcagtctgttccaatggccacatttggctccggtaagccattttaaaagtttctacttctgctcatttttcagttttgtgtagcacaaactactgtatgtgacagaatagcaactttatgccagttatctgttgcccttgccaatttgttggagaaaagctgctattataaagcctgatgtggacttttttcatcagtgtcactcaagcaagttggcctttaaagacagttttttactgcttaatatataggagttttcttgttttatttgttcattttcctaattgaacaaattatggctcctcttcctagcctcactctaagaccttggtgtgtcctcatgttactggacctgtgggctgcatttggcacaattactccctccttgaagcactttcatcacctgccttccgggacacagcactccctggtttttgtcctgtctctgactcttcattctcagttgtctttgctgatg

SEQ ID NO: 135780 - DNA, 1032 bp, Homo sapiens
gaggatctcccaaatttttttgtatgtctctctaggagtaaacatggcaacagtttttctagaacgtggactcactgcagggactggacccaatggcattgttaagaccctaaaatctagccaccacctgcctcccccaggtttccacacacccagttggaaggcctttccctgcccttgtccctgtctcacacccatggaggttaagctacagagctggggaaacaggagattttgagttaatggcagcctcacaaatagtgcttctgaatttctctgagggtcagcatacctcatgggagtgtgttgctcagtgcaaccttggaaaagtgggaatggcaccagacgtttttcaggtgcctcttgcaattcaaacttacatcctctataccgtcctaaaatttgcctgatcttatttggtagatttcaagttgctttcagctgtgaccgtaataactgtttcaggaactggagaaatagtggaagtgctattgccgcgctgcatgtaaagcacaggagcaaagattcgatacaattagaccctttaagctacaacgtggttgcatttggggagtctgatacccacataggtatcacattttctctgcctggggttaatttgttcttattattctaggtaagaaattgatagcttgttatgcttggtactcattctgaaatccctgtgtgtccaccaggcagacttcaagcaatctctacctactattatatctgccaaaactaccaattatttttcaatgtcagaagttattagagccactggcaaagctcatggttgaatatgacatttttctgcttttccctctaagaagtttttgagaatgttaatgttgaagtatgcaggctggacctaccagcaagtttaacacgttaattaggttaaaaagaatattaaaaggcaataattaaatatttcaattattttgtaattataatggtatcaaataagatgcaaaagaagttgatgcttattggtgcttaagagaattacaatactggttttatgagcat

SEQ ID NO: 135781 - DNA, 1192 bp, Homo sapiens
cgtgaacctgggaggcggaggttgcagtgagccgaggttgcgccaccgcactccagcctgggcgacagagcgagactccgtctcaaaaaaaaaagaagttaaagcaagaagagagagaggaagtctcagtaatatattggctgattcccttggggttagtaagtggcagggtccatgggtaccagtgaaaaaaggaccaaccagtaaaatccaaattaaacagcaaagctctccgccgacggagctcctggctctgagttacaatttcccaccaggaggcctccagggtggttttgaacatcccctgggtttgaggctggcttttgtgagctgtctacacttgtgtttagtggccctgggctgggtccctatggcctgggcaggacgagcggctcccctggtgctctcctggtgcgcctggggctcactcacgtgctgcagcaccttgcgcggcaacttctcggagtgggcgatccattctttcattaagtctaggatgagggggatgaggctgaccacgccgccgtagtggttccgggcctcgtcacagctgaggtggttcaccacatcatgagggtatctgcaggacggcagggggccaggtgaacccatgctcccgggacttgccatgccgtggcaagcagctgccacacctcaggcacagcagagtcacctggggaggctttagaactggacacacagcacgctgaggcgctctgtccccagagattctggcagaccaggcctggggtgccacaagccccaggtaattctggtgtgaaagacaggagatgcaaaccactgccccatggtccgtagaaacctgggttaggggtgaggaactggctggctcatccctctggctcttctcaccctggtatctacagagcttccccaggctctggcccactgtgctgcaggctcccgggctgtcaggatgaggagccctcagtgccagtgctgctgcccctgggaggcggctctggtgtccacttctttgcatgtcagtgaggatctctgtgggcttctgggggcaactgctctgggctctacacccccttctccacctgcctggtgctaacacccgtgagacacctggtgtcctgccatgtctacgatggttgtaaagaaaaggttttgttgaatccgagtcattccaataaatgagtggagactgggatttcctgcccgg

SEQ ID NO: 135782 - DNA, 1050 bp, Homo sapiens
tggtactgaattgtcagatgtggagtattagtgacaccacacatttaattcagctttgtccaaaggaaagcttaaaacccaatacagtctagtttcctggttccgttttagaaaaggaaaacgtgaacaaacttagaaagggaaggaaatcccatcagtgaatcctgaaactggttttaagtgctttccttctcctcatgcccaagagatctgtgccatagaacaagataccaggcacttaaagccttttcctgaattggaaaggaaaagaggcccaagtgcaaaagaaaaaacattttagaaacggacagcttataaaaataaagggaagaaaggaggcagcatggagagaggcctgtgctagaagctccatggacgtgtctgcacagggtcctcagctcatccatgcggcctgggtgtccttttactcagctttataacaaatgtggctccaagctcaggtgcctttgagttctaggaggctgtgggttttattcaactacggttgggagaatgagacctggagtcatgttgaaggtgcccaacctaaaaatgtaggctttcatgttgcaaagaactccagagtcagtagttaggtttggtttggttttggacatgataaacctgccaagagtcaacaggtcacttgatcatgctgcagtgggtagttctaaggatggaaaggtgacagtattactctcgagaggcaattcagtcctgggcaaaggtattagtacaataagcgttaagggcagagtctaccttgaaaccaattaagcagcttggtattcataaatattgggattggatggcctccatccagaaatcactatgggtgagcatacctgtctcagctgtttggccaatgtgcataacctactcggatccccacctgacactaaccagagtcagcacaggccccgaggagcccgaagtctgctgctgtgcagcatggaattcctttaaaaaggtgcactacagttttagcggggagggggataggaagacgcagagcaaatgagctccggagtccctgcaggtgaataaaca

SEQ ID NO: 135783 - DNA, 2263 bp, Homo sapiens
tgaaccccggaggcggaggtttcagtgggccgagatcacgccactgcactccagcccggtcaacagagcaagactctgtctccaaaaaaaagaaaaggaaaagaaaacctttcccagatgatcccaccatacttctcatcacccctgttggccaggcctgtcctgtgcccatccctagcctagtcattgcctcaacccagtcaggatttgctcctgaacctggagctagggttgctcttgttccatccaaaggaggaggaagagtgagtggtggggaatcaggtgggaacagttggtaggggtagctgtaaggattagtgagagtgcacggatgttcctggttcaatgctttgcatgattatccatgaataagtcctgttgtttatgacgaaggccagatagatgcgttcatccaccctgtgctgaagtcgagccatttagcacagctggaacagccgcattatccgagagccagttctgagtttcaatcagttgcgttctataacaaggaagcattgggcttaccagacagcatcaaggcagggcgccttcgtgaaagctcatctccttgctgtttatggtttattatcttttttaaaaaacaaatatatggcaagttttgtgttttgtatattttaccacggtaaacatacacacacaaatgtaacacaggcttaaaaaaataccctttccgccttctttctgagcattagtgtgtacttgctctgggtttcaagctgttccaatctgtcggcagcaggccatctgccttagcacgatcaacaaaccttgtcagggcatccagtctgcaaaggctgctttgcttgagcagacctgctccattggcattccattctgtagcctcacctgcgctattgtcaggagggggagaaaaggagaaaggaaagcaagtgacctgcggtaccactggactgaaatgataactggatagtggcgtattttcacttggtgttttgtatatgtatatgttcgcatagttgattgtactattcacacagtcttgtagtctgctttttaatctttttactgacaccatatcattttttaaaaagacttagaaatataggatgtattttaatttacttaactgttcccctgacattagacttaaacgatgtttccaggtttttgctcttataaatatgctgtgatgattatttttgtgcaaaatctctatttatgtttcacatgatttgcttggggatagatttcaaggaagggttactaggataatactaccagcttactttccataaagttgtactagtttatatttctgttatcagtatactaaaatgccttctcagtccttcttacattgtcttttcaaaatggatacagcatgtttattttttataagtactaattccagtcttttttttttttttttttcaggaagtagaaatgatgaaagccgcctatcggaaagagctagaaaaaaacagaagccatgttctccagcagactcagaggcttgatacctcccaaaaacggattttggaactggaatctcacctggccaagaaagaccaccttcttttggaacagaagaaatatctagaggatgtcaaactccaggcaaggtaactttcatcaggaaaggcttttgtgtttttattaagtggaacttcctatattctggctggtctgtatctttcagaggacagctgcaggccgcagagagcaggtatgaggctcagaaaaggataacccaggtgtttgaattggagatcttagatttatatggcaggttggagaaagatggcctcctgaaaaaacttgaagaagaaaaagcagaagcagctgaagcagcagaagaaaggtaggaacaaagaactgattcatgaccttgggactaagctgccaattccagcataaggactgtgtcacgtggtgtgggaagcagttactgctgactagacaggctgcaacactcagctcactccgtgtcagagacccactctgacgttcctttcctcaaaacgcccagtgatctcttcgtgttcgtgttcctggccttgagtccctccatatggccacaggaagtgttcacacttaagattgccacctactatccctagttgtgatttaggtttctcttgatgagatctcttgagtccagtattataaaacagagagtgggctagcggagttcagtgtcagtgtgagtgagtgtcagtgtaattccacatcctccgaatgtggacagtccaatcaccagctccttttttcctccccggct

SEQ ID NO: 135784 - DNA, 1011 bp, Homo sapiens
cgtgattcctccttctttgggaatcactgcacttcatacatcattttgtcaagaacggtgagttttccctagggctttatgccactgggccttggtggtatacctgtccaccttctccaggtgttctgtgggtggtcagtttgatggactgcatttgtgctgtcccctttgcaaagcacagttctgaagtgtgtttctgtctatttttgttgtccttgggtaccatcctccccacctgccattatgtcagggactgtgaacccatgggactggtttattttgccttaacattgaaatagtgtgctcctagctgattccctgtttaatgacgtctatgtgctagttttatgtcgtcggatttttcactttgctcatgttttttggttagctctcaaacagtgagtcggtccagcagcagatggagttcttgaacaggcagctgttggttcttggggaggtcaacgagctctatttggaacaactgcagaacaagcactcagataccacaaaggtatgccagggctcgggagccagaccttagtggggaaagcgtttcagacccagacagtatgtctcccgcatggcatagagaatggcttgatgacttatttcctaaaagacggagcggcagtcccactactccgtggtccagctatacaagcactttccagccaccatgtgagcttgtttctcctattgggttgctttgaagttaactcacactgaaagcacctaatggtagttggtagagagtaggtgtaaagtgtttcctttctcttccctaggctgcctttcaaagagggagagagaaaaagaaggatgggggaccaattctgtttaacatacctctcaggaccatggatatagagtgctgtacataccatttttttttttccttttaatgttggatttctgcagatggtagttcagtcctggcaacaaggccagcattgggatgatcttacattaattagtgcctcaccagtggtgtcgaggcagaagttttaagtc

SEQ ID NO: 135785 - DNA, 1900 bp, Homo sapiens
ttgctgagcgcccagcacactgcaagcattcagtaaatgctcatcgtttcagtgaacttagtaccatgtttgagagattttattccagtgttggtagtcagacttttgaaagtattggaagcaaactgatccctgagaagatttatttaagcaacttaagatccatttgcttaatgtaaaatttggaaaaccttgacctaaggccaagtaagacagtagtgagctctaagagttttggtctgtagttagttacattttcagggtagcttatgactattcagatgaaatgttcgcagtgtgtgttaaattgcctgtgttggaagacagctaaaatgatgacatttctggtctctgctagaaagatcagttgaagttacaagagaaggacatccagatgtggaaggttagtctgcagaaagaacaagctagatacaatcagctccaggagcagcgtgacactatggtaaccaagctccacagccagatcagacagctgcagcatgaccgagaggaattctacaaccagagccaggaattacaggtataaactgcagcaccaggcaaagccaactgcgagaatgccggagagcagtggggagggaggcagtcagtttccctgggtgtccttgacttgttcagctttactaagctgaatgcttttctctctgaaatcatggcagaaattcttcatggcaggtgaatcttacttaggacagaggttccccaactttgttggttcatatagtagctcccttagtgtctcagtcatttttttttctgcagccaaaaggaaacagttaacagttctgctcattaagtagatctgaataacttagtgagtacgaatgtcctaagaacttagtagctgttcacagataatacacataaattaatttttaaaaaaataattgcaattactaatgcctcgtgtgcacctattgggcactgcatggtatctcagaccttgaaatcagagtggacagtgacaccctcatttcctgttccacactggttttccttgtggtgctttgtatcactgcacccaaaaaaacccggcttcacaaagacgtcatccacagacacagcatcatttccagccagttagtaattcacagagtgtccaacagatggcgctgcgtctccctcgaaaattcagaatctttctgcagcatccctgtgagtttgctgtgtagcctcagggctctttggtgcacagtttgggaactgaggatctaaggtctctttttttcttttgttaaacagtaaggaactcagaaatcaaccataacttactttttaaaactaagacatcaaattctgagggcccaagaaagtagagccgttgagctaaggcattcccagtcctctgtgggctggtggctaggtaggcctgtgatctggcctgttggtgttcctcaaacttcatgtccacgtctctttgggcagacgaagctggaggactgcaggaacatgattgcggagctgcggatagaactgaagaaggccaacaacaaggtgtgtcacactgagctgctgctcagtcaggtttcccaaaaggtaagaagaaatgaggcagacctgaatctgctgaaacaccatttgctaacattcttccttcagacaggttaaagaaatagattacttgagtgtctgtgtcatgggttcccaacaggaagtggttctgctgcccccatagtccctgacatttggcaatgtctggagacattttaggttcatgtttttggtgctgctggtatccagtgggtaggagccagggtgctgccaaatatcctacaatgcacaggcagccccctgcaacaaagaagtatccatcctaaaccctgctctatgtgtatcccatggaactctttcttcataccttgtttacataaatgtcaaa

SEQ ID NO: 135786 - DNA, 1022 bp, Homo sapiens
tcttttgtttcctctcttcctctcagctgcaatatctagagaactttctgagatcaccacagcagaggcagagcctgtggttcctcgaggaggctttgactctcccttttaccgagacagtctcccaggttctcagcggaagacccactcggcagcctccagttctcagggcgccagcgtgaaccctgagcctttacactcctccctggacaagcttgggcctgacacaccaaagcaagcctttactcccatagacctgccctgcggcagtgctgatgaaagccctgcgggagacagggaatgccagacttctttggagaccagtatcttcactcccagtccttgtaaaattccacctccgacgagagtgggctttggaagcgggcagcctcccccgtatgatcatctttttgaggtggcattgccaaagacagcccatcattttgtcatcaggaagactgaggagctgttaaagaaagcaaaaggaaacacagaggaagatggtgtgccctctacctccccaatggaagtgctggacagactgatacagcagggagcagacgcgcacagcaaggagctgaacaagtaagggactggggcactctcttctgtgttaaatggtccattttattgtgaagtacagaaagtgtaagagaggaacaagaatcattcttcacactcccaccttgaggcagctggttctctgctgtttgtcagatgtccttctaggctgttgcatcttcatatatgtgaccatgtgtgacctctgtgcacctaaattgggatgattccttagcagtccatttcaaaatgagtctttttatataggccattttatgcctctgttctatgaggacactcaaatgctttcatatgtgccctctgcaagctgtaggctgaaaatgaggttatggtatttcaaagaatataagaatatttgtcacagtgtttccctctctagctacagattattattattattttctattttggtatcatagttcattaggtggagataaaat

SEQ ID NO: 135787 - DNA, 1092 bp, Homo sapiens
tataaagaaagctgctgggcgtggtcccagcactttgggaggccgaggcaggcagatcatctgaggttgggagttcgtgaccagcctgaccaatgtggagaaaccccgtctgtactaaaaatacaaaaattagccaggcgtggtggtgcatttctgtaatcccagctactctggaggctgaggcaggagaatcgcttgaacccaggaggcggaggttgcagtgagccgagattgtgccattgcactccagcctgggcaacaagagcgaaactccacctcaaaaaaaaagaaaagaaaacatcccaacaatttgagaatcactgcactcggctgacctttaaactactttacaatatgctcgagaacatgtgcaacatttttcgtcttgtgatataaatgatacttatcttttcaggaagagagaatggattctgcaagaccatgtctacacagacaacaccatcttctgaatgacagaggatcaggtaaaatttctgcgttactacaggccttgcttgcctcttctaattgggttatatgtgtttaagaaaagaaagttaaatggaaacaaggaaattctgggatatccaaaatactgaggcctaaacataatgaaacgagtagtgaattctaaacaccaacctaataatatcaaaaacagtttttaagctattgcagtgaagtacctgtattctgacttgactatatctcttttcagagacattaagaactgagaattttatttgctatgggattatttttggtacttttagttatattatttttaatatttcagtcttttgtagtatccccaggacagagccatgtccagccttctctgttcagcatgaagagttattacagacatattctatacagtgtaagcagttttacacttacagggattacactgtatttctttgacttcagttgtctttgtttctcttcagaagagccacctggcagcaaaggttctgtcactctaagtgatcttccagggtttttaggtgatctggcctctgaagaagatagtattgaaaaagataaagaagaaggtaatgtatgtgggattgctatgagttgataaaacct

SEQ ID NO: 135788 - DNA, 1430 bp, Homo sapiens
ctaaccccctgtgttcttctcttccattttagggtgtgctacttctaccccttactccacgtctcggctgatgttgttaaatatgccagggcagctacctcagactctgagttccccatcgacacggctgataactgaaccaccacaagtatggtgtcaactagtgtgcctgctctctcctctgctttctggtgaagctgaccctttgggtcagatttagtatgtggttgggaaaatttcacactgctcatttcaggagtcacttttaaggatccatgatattagcaaagaaagttactgttgcctcttagattcatcttgaagtcttgatttacaaaatgcaacttgtttcttgatacgcttttaataagatgcctttttctagatgaaaaagctaaatttaagctgaacactggccatggatataaacctcgtggatgacttagcattcctttgccactgctgatgtactttattaacttcccaggctactctttggagcccatctatggtttgtggtatgaccactcctccaacttctcctggaaatgtcccacctgatctgtcacacccttacagtaaagtctttggtacaactggtatgtatgtcttaggttggatttgattagttggttttggcctgcctttaatggcaggaggagctctcttttagatctaagggaccacttgctgttgtaaacttgtttttgacacttattgcaaatccctggggctttcagaatgtgtaaagtgaacctaaaaacaaaaaagagagagactgatctagatccccagaaagttaactctagcagctttatttatagtaatagttataggctgaaaaaaaatcggcagtttttctaatagttgggctcagtgttcatatatgttctgcccttgtctctaagcaggtggaaaaggaactcctctgggaaccccagcaacctctcctcctccagccccactctgtcattcggatgactacgtgcacatttcactcccccaggccacagtcacaccccccaggaaggtgcgatccagctcgtctgctatccctctgcccaggcacagtgactcacttgcaagcctcactttgagaagcctaattatgccagatagaattctgacctaaaatgcaatgggtttgaatcagaataattgaaaatggactaacaagctgctctcaaggtgtgatctgccgacccctgggtggttccaaaactctgctttggcagaactcttgtggggaacccagcaggtcaaacctactctcttgattttttttttttttttttttttggagacagggtcttgctctgtcgcccagggtggagtgcagtggcacgatcatggctcactgcagccttgacctcccagactcatgcaatcctcctgcatcagcctcgctagtagctgggactacaggcatg

SEQ ID NO: 135789 - DNA, 1249 bp, Homo sapiens
gctccccttgtctacctgctgctcatctcctgttccagaagtaccagatgctataagttcctcatgattttaaggattctgtagtataatcagttgactcttcactttgagacagtggcagcttaggattctgcttttgtggatttgcagtgtcagttaccacctgcctgtctgttttttagtttcaaaaacttatggttctattccctctctcctgttctcctccttgtgggtttatatttaaaaacaaagaagtctttactgtagacagtgggattccaggaggttgtacagttgagtgcatatgttcaaccaactatattaacttggaaggctcctcagtcagcttatagagagcctcactcaccttggctgggcagattgtttggctttggaagaaggttttaacagtaaagacagacaccaacattaagaggagaaaagagagctagaacaaaaccataatgatagagcagaagaaaatatctaccatagccacagagataagatgtttgtgcatatgtaagcatcaggatgccacagaaaaagaccattttgagactaaaagaactcttcaaaattaaaaatgatagccaaaataaacatttcagtaaaagaattgggagatacttttctgagatataggtaaatagaaagcagaaccaaaggatagagcttggtaatatgagcagaacagagatttagaatgatcagttcaggaagtcccagcatccaattaaaaaaaatttttttttaaagaagagccgggtgcagtggctcacgcctgtaatcctagcactttgggaggcggacgggggaggatctcttgaggtcaggagttcgagaccagcctggccaacatggtgaaacctcctctctactaaaactgcaaaaaattagtcgggcatggtggtgggtgcctgtaatcccagctacttgggaggctgaggcaggagaatcgtttgaacccaggaggcagaggttgcagtgagccgagatcgtgctactgcacgccagcctgggtgacagagcgagaatccatctcagaaaaagagagagaagaaaactttggtggaggaagaaattgtgaaagaaataatacaacaaaaaaaaaatcctaggattgaaggatatgagtttccagattgaaggggcttacctggtgcccagctaaatcaataaaaaagaatgccaccaggtctcaatattgtaaaagtttatagtaccagggattaacctttcagagaaa

SEQ ID NO: 135790 - DNA, 1102 bp, Homo sapiens
gcttgtttgtttgctacttagtatactgtttagataggctgcatttataccttttgtatttaacggcagacagggaaattttgaaaagaaattcagttttcttcctcgccactccaatccctaggcagccactaatctgttttctgtcttaatagatttgcctattctggacattttgtataaatgggatcatataatatgtggtcttttgtgactggcttctttcactcagtataatgttctcaaggttccatctgtgttataacatgtatcagtacttcattccttttaattgtcaactaatattccatcatttggatgttccacaaacattcagccctttataatttgtcaacccaactcttctagccaatgatggagcatgtgcgaattcatccggaattagtgactggatccaaggaccatgaactggaccctcgaaggtatagaaactagtgtcaaaattttaaagaatctttcgagagattgaaaatgtgatctaggaggtaatccctgttgaggtatatttgggaatatagatgttctacttacagaatcagtccacttggaagcactcatacagctaaaatttgtgtgagtttaaaacatactcttcacaggcggaggactaataacatttagcagagtggagaaagttgcagcacaagtgcctgtcccccagaaaggcttacacctcagtagtgccagtgatggggcgatgcaggaggtgaagcatatggctaaaaacaaggggactgcagaaaaacaatttagcatatatataaatctggctttgcaaaatggagaaaggacttcagggagtcctatattaagtatttggagtccctgaggtcctttctccattctgcaaagccagttgactataccatcctccccagggccctacagaggcccccaggtatgttctctggaaaaaccgaacctttgagtcccttgattgaaggattccaggcacagtggagagtggaactgagggtaagactgagcgagggagataaaggaaatttacagactgagctgtgggaggcccagctccttccctctgcttgtctctgcctggtagccaggcttattatgctcc

SEQ ID NO: 135791 - DNA, 1098 bp, Homo sapiens
gtgtataggaagggtgtagggaagacgggaggtgcttggtctgctgtctttgtacatggacagctctgtgactcatgccgaggctcagtggttgctgtttagtgtattctgtcactgtctgcctcacctctgtcgtaggaattgtaaaataaggtagggatttttgtcttacagctctacattggttcataagtagggtcttgatacaaattgtagactgtcgaaagttaagtattgttctcaagtagggaaagttttctgagtttgatttttcattttcagtgtttttgtgtatacttcatactgttccttttttagaagtccactgtatatgaatttgaacccaaagtcaaatggttaagtgttcagatcattgaggtccccaagctaaatatcaccatcataaaatgtaaattctgggatacaaaagtaaatctcaaattttattaaacatttttcacgatagtaattgtattgcattttagtagtcagattttagaagtttggaattttaatataggaaaaatactttgtgggcactaccggctgctaggttactcctgtggtcactatgtcacatgtgtagtatcatctcaactggcacacagcgtcattggtaacatttttggacaaagcagaattcaggaaagtttctggtagatggttttctggaaggaaccttgtacctgggattcatagcttggcaagcctcaaagatccttactcttcaattactaaaaattgttggccgcctttagcaattattcttattttgaaacaaaaaaaaccccagcttttaatagcatttttcttttttcatggggtactcttgtttatacttttgtcctcatttttaagacatttttggccaggtgtggtggctcacacccgtaatcccagcactttgggaggccaaggtgggaggatcacatgaggtcaggagttcgagaccagcctggccaacatggtaaaaccccatctctacgaaaaatacaaaaattagccaggcatggtggtgtgcgcctataatctcagctactcgggaggctgaggcaggagaatcacttgaacccaggagatggaggttgcagtgggcca

SEQ ID NO: 135792 - DNA, 1064 bp, Homo sapiens
gtatgatccctcttttctggagggccagcctgcctgcagcactgttcacaggcttgcaggtgccactgaagagaccagtggagtttaatgtctggaatgtgttccacgtggaaatataattactctgtcatctggaacaagcgattttaattgttagagagttcctcagtccactagtttgactttggccatggtcgtacatttaagaacttggttcaagttttttccatgtttagggtaattaggtgtccatagtatatgaggctcagctttcatactctattcaactctggaatggctgccaaagaagctgattaaatcttaccagttctgagcagggtgtttttgcctcttgtgtgccaggtgccaggataggccctaggtgtcccagatggttcctgtcctcatggagtttaccatctagtgatcagattgtacctaaatatagtttgaaggacccatattttaaaagcaaacaaaaatgtatttatatatactcatttagcatggatatttaatacaagttaatttggacagaaagtagggtaaaagggggaagaaaatagaaaaatgatagctgttcacaaacattttatgtctcttttgtagtaaacttaagtcatgctgcctgaaggcagaattaggctttgcacatttatttaagaaatactggccaggtgcagtggctcacgtctgtaatactagcaccttgggaggccttggtgggaggattgcgtgaggctaggagtttgggaacagcctgggcaacatagtgagaccccatctttaaaactaaaagaaaccgattagtcgggcctggtggagtgcatctgtattcctagctactcgggaggctgaggtgggaggatcacttgagcctaggagtttgaggttgcagtgagctatgatggctccactgtactctagcctaagagtgagaccctgtctctaaaaaagaaagagagaaagaaagaaaaagaaaagattttaacttctagtcattcaatcaagaagtgccagacagcatggtagctgcttgaaatacagtactgagtaagctgcgg

SEQ ID NO: 135793 - DNA, 1384 bp, Homo sapiens
tctcttctaccctttatgtcccatcatcaccaaaaaaattcatacagacatgggattttggatatggcttcaggtaatttatggacgcagcttgaaacccagctgatcattttagatagattactgctctaaaaatggacttaggctttattaaaaaacttttttttttttttaactagtagtcaggaaaggcccaagtcagaaggtggccttatgtactgtctgggttataaattactttgttaaatttctgtagtgtacccaggtatgtaacctgctacgtgcttgtcaggcttggcattcggtctgtgctggtacctttagcacctggcagaattccactgggccttttccccaaggtttatgcactctatatatttttttccttttgaacctcaaaggaggtatattaatgaatgaatgttttttaccttcatccttctttttcctagaccagtggttctgaacctttagtggacgtcagaattacctagaaggccccacccccaaagtatccaattccgagatctagtgaaaggcctgagaatttacatttctaacaaatacccaggctcctgctcgtggtgccaggaccacattttgagaaccactgccctagactatcaaactatacccttcttccctagaatacttctattttggtcctataaacctgaaacctaaagatatctcacagtttgcttgtatctcttttaggagaagctctgcgtagtgtctttttgaaatatacatggtatctgtttggcctgtattatcttagtaaataatgttgttcatgttaatagaaagtcaaaacgtaagcattatttattgaagagatacgccttaccaaaattaagctctggccttacacttaagttactagaagattcttcacctttgggataggctataagctttagcaaaccatccatcaaggcccctgatggcagaaattctgaatggagaatctggcaagttggagctctcctgccccagtttgtccttgagagggactccaactactaagacctattcaatcacacatgactacacatgttggcaggttttaccatcagctgttttactctcacatagtaagtagttatttcctacccttttttccttccttctaggcactgataggaagagagaatgggagcaagtatcttaccctttttagatgcatttgtgctgaaggcgtcttggttcacttgatagaatattaccctaagaagtcacctgagagttcctgagccagagcggaacattaacttaacagtgtaacatttctgctctatctaactgtacctgataataaaatagtctatccatgcctggacctgtgtctgaattgtccttgaatttttatggataaaaaatt

SEQ ID NO: 135794 - DNA, 2510 bp, Homo sapiens
gattacaggtgtgagccactgcgtgtggcatggccctatttttaaaaatttttagagacaagatctctctatgttgcccaggctggtcttgaactcctgggctcaagcaatcctgtctcagcctcccaaactgctgggattacaggcatgagccacagtgcctgaccaggtaaacctatttttaatattttgacgctgggcacggtggctcacgcctgtaatcctagcactttgggaggctgaggtaggtggatcacctgaggtcagcagttcgaaaccagcctggccaacatggtgaaaccccatctctcctaaaaataccaaaattatccaggcatgtagcctgtagtcccagctacttgggaggctgaggcaggagaatcgcttgaacttgggaggcagaggctgcagtgagccgagctcgtgccattgcactccagcctgggtggcagagggagactctgtctcaaaataaataaataataataatattttgctttttcgcaacgggtttgccgccagaacacaggtgtcgtgaaaactacccctaaaagccaaaatgggaaaggaaaagactcatatcaacattgtcgtcattggacacgtagattcgggcaagtccaccactactggccatctgatctataaatgcggtggcatcgacaaaagaaccattgaaaaatttgagaaggaggctgctgagatgggaaagggctccttcaagtatgcctgggtcttggataaactgaaagctgagcgtgaacgtggtatcaccattgatatctccttgtggaaatttgagaccagcaagtactatgtgactatcattgatgccccaggacacagagacttcatcaaaaacatgattacagggacatctcaggctgactgtgctgtcctgattgttgctgctggtgttggtgaatttgaagctggtatctccaagaatgggcagacccgagagcatgcccttctggcttacacactgggtgtgaaacaactaattgtcggtgttaacaaaatggattccactgagccaccctacagccagaagagatatgaggaaattgttaaggaagtcagcacttacattaagaaaattggctacaaccccgacacagtagcatttgtgccaatttctggttggaatggtgacaacatgctggagccaagtgctaacatgccttggttcaagggatggaaagtcacccgtaaggatggcaatgccagtggaaccacgctgcttgaggctctggactgcatcctaccaccaactcgcccaactgacaagcccttgcgcctgcctctccaggatgtctacaaaattggtggtattggtactgttcctgttggccgagtggagactggtgttctcaaacccggtatggtggtcacctttgctccagtcaacgttacaacggaagtaaaatctgtcgaaatgcaccatgaagctttgagtgaagctcttcctggggacaatgtgggcttcaaggtcaagaatgtgtctgtcaaggatgttcgtcgtggcaacgttgctggtgacagcaaaaatgacccaccaatggaagcagctggcttcactgctcaggtgattatcctgaaccatccaggccaaataagcgccggctatgcccctgtattggattgccacatggctcacattgcatgcaagtttgctgagctgaaggaaaagattgatcgccgttctggtaaaaagctggaagatggccctaaattcttgaagtctggtgatgctgccattgttgatatggttcctggcaagcccatgtgtgttgagagcttctcagactatccacctttgggtcgctttgctgttcgtgatatgagacagacagttgcggtgggtgtcatcaaagcagtggacaagaaggctgctggagctggcaaggtcaccaagtctgcccagaaagctcagaaggctaaatgaatattatccctaatacctgccaccccactcttaatcagtggtggaagaacggtctcagaactgtttgtttcaattggccatttaagtttagtagtaaaagactggttaatgataacaatgcatcgtaaaaccttcagaaggaaaggagaatgttttgtggaccactttggttttcttttttgcgtgtggcagttttaagttattagtttttaaaatcagtactttttaatggaaacaacttgaccaaaaatttgtcacagaagtttgagacccattaaaaaagttaaatgagaaaaaaaaataataataataataataataataatattttgagaaactgccatactgtttccacagtggctgcaccatttacattcctctttttatgttttacacatctgctgtttggtgaaattttctacagagtagcttttaactctgagcgctgtacttcctttgaccctggacttcacgcccaaacatcagtaaactgtcacagaaggtagtaataatgtgtattcctggaagccatttctacatgggatgatcagtgataactatt

SEQ ID NO: 135795 - DNA, 1195 bp, Homo sapiens
aatattattattattattattattattatttttttttctcatttaacttttttaatgggtctcaaacttctgtgacaaatttttggtcaagttgtttccattaaaaagtactgattttaaaaactaataacttaaaactgccacacgcaaaaaagaaaaccaaagtggtccacaaaacattctcctttccttctgaaggttttacgatgcattgttatcattaaccagtcttttactactaaacttaaatggccaattgaaacaaacagttctgagaccgttcttccaccactgattaagagtggggtggcaggtattagggataatattcatttagccttctgagctttctgggcagacttggtgaccttgccagctccagcagccttcttgtccactgctttgatgacacccaccgcaactgtctgtctcatatcacgaacagcaaagcgacccaaaggtggatagtctgagaagctctcaacacacatgggcttgccaggaaccatatcaacaatggcagcatcaccagacttcaagaatttagggccatcttccagctttttaccagaacggcgatcaatcttttccttcagctcagcaaacttgcatgcaatgtgagccatgtggcaatccaatacaggggcatagccggcgcttatttggcctggatggttcaggataatcacctgagcagtgaagccagctgcttccattggtgggtcatttttgctgtcaccagcaacgttgccacgacgaacatccttgacagacacattcttgaccttgaagcccacattgtccccaggaagagcttcactcaaagcttcatggtgcatttcgacagattttacttccgttgtaacgttgactggagcaaaggtgaccaccataccgggtttgagaacaccagtctccactcggccaacaggaacagtaccaataccaccaattttgtagacatcctggagaggcaggcgcaagggcttgtcagttgggcgagttggtggtaggatgcagtccagagcctcaagcagcgtggttccactggcattgccatccttacgggtgactttccatcccttgaaccaaggcatgttagcacttggctccagcatgttgtcaccattccaaccagaaattggcacaaatgctactgtgtcggggttgtagccaattttcttaatgtaagtgc

SEQ ID NO: 135796 - DNA, 1001 bp, Homo sapiens
gtaattgccaggaacagcctttttctccccaggggacagaggggaagggactgtgggggagacccctaggagcttttttttttttttttttgagacggagtctggctccgtcgcccaggctggagtgcagtggcgcgatctcggctcactgtaacctccgcctcccgggttcaagcagttctcctgcctcagcctcctgagtagctgggattatagacacccaccaccacgcccggctaatttttgtttttttttttttagtagagttggggtttcaccatgttggccaggctggtctcgaactcctgacctcaggtgatccacccagctcggcctcccaaagtgctgggattacaggtgtgagccactgcgcccggctcctaggggcttttttttcattccatccacaaatgtgagccacagcctgggcactggtgccaggaatgcaactctgcagccccacagggtgtgttgcactgccgtatcctcattacccggggtagaaaactgaggcacggggagatgaagctctgttgacttacctgagagggatagactgttatgttgttaggattagaggtagtgatggttgacatcttattctctgccacgtacggctctaggtgccttacttagagtccgtcctctttagaaccctaccaggtaggaactgtcagagtctgtattttacgggggaaggaacttgttcgaggtcacacagcaagtggggcagctggaggatgctatgtgtaagttctttacatgtaccagaacttgaagtgtctctttagagaagttttccctgattgccctaactaaagtggccactggcaattatctgcctcctcatcctgttaattccaatctgaaaatgttttaaaatgtttattctgacaaaggcttatacatataaaacatttaagaaaaaaggaaaaaaaaatttactgtctctcgtcctcttgaccctaagactgtcaactccatgagagtggggacttctt

SEQ ID NO: 135797 - DNA, 1003 bp, Homo sapiens
ggccactaccggtccccgcattttggtggtagtggtcccccgggcccagctgtcttttcttttatgtctttgtcttgtgtctttatttctgcagtctcgtctccacacacagggagaaaaacccaccgaccctgtggggctggtccctacaaagataagggtgatagtatctcccctcaagtgttgccagaaggaccaactaatgccccacaccgagcaggcacttgatggatgatggcatttacttagaaggaaggagacgattctcattttttccaccagataaaaactaagatacatgggtttaaaaaatgggccttttgggaattaagggcccagaatgaaacatgagcctcctggcctttcctggatcaccgtcaggcttttattgagagaggagcagctccccactggctgcttggcttgtcattgcttcactctgtctcctttggccttgccacagatctacgcagaccccaccaagaggctggagctgtacttccggcccaaggacccatactgccacccagtgtgcgccaaccgcttcagtaccagcagcctgctgctccgcatcaggaagagaacgaggcggcagaaaggggtgctgggcactgaggcccactccgaggtcacatttgacatggagatccttggcatcatctccaccatttacaaatttcagggtaactgaaatctgctcttgcaatgtctggttatttcagggctggccatcctagctgcctgcaggagctgtgtgggtcatctgcaccagtggagggggccaggatatgcccaggggctgtggggacacagcagggcacaggccccatccaggaggcagcctttcttccctccagccaacagttccccagagactgcaggttcattgctgcccaatcttcagcattcttaagctagaaatctcctaatttttaatgaaaccattgtgtgggaccaaataaaactggtcagtagacctccagtctttcccccaccacagtgt

SEQ ID NO: 135798 - DNA, 1021 bp, Homo sapiens
tggtagaaatgcaccaggtcagaacctgcatttagcaagatcccagcagattcatatgcatgttactaggttggtgcaaaggtaattgcaggttttacagttaaaagtaacattcatctaagaagcactgacctggactccatcctcacctatcatgtagctccccacctccccaaaataattttcatgtaagtgacttagactgcatggagccaactttgcagaggcatttgggaagggtgtgttttcctgccaccctcaccctgcagcctccaccacatggcccactcagcacctccctaagcagatgtgggtgtcggtgtgtggcagctgcccattcctggactcaatgtctgccatctgcccacctctctttctagggatgtctgacttccagtacttggctgtgcatacggaagcaggcggcaagcatacgtcaatgtatgacaaggtgctcatgctccggcccgagaaggaggcctttttccaccaggagctgccgctctacatccccccacccatcttctcccggctggacgccccggtggactacttctaccgaccagagacccagcaccggtaaggcccccctccatgcagcctcggttctctatcctgaaaatgggatggtccgggcacggaggctcacacactgggcgtggtggtgcacacctgtaattccagctactcgggaggctgaggctggagaatcacttgaacccaggaggcggaggttgcagtgagccaagatcgcgtcactgcactccagcccgggtgacagagtgagactttgtctcccaaaaaaaaaaaaaaaaaaaaaaagaaaatgggatgacagtagtactacccaacagacgtattgggattgaatttaaaaagtgtgtgcagttctcagcacagggctgagtacagaacagggccttagtaagcggtggcctgtgtgatcgccaggttggcctcagtcctgaggacagtgcaaagaacgtgactgtgggacatgtgggttcctgctgagaaatgt

SEQ ID NO: 135799 - DNA, 1026 bp, Homo sapiens
gcttcggtctctgtcatagccccggtgcccagaacagagcctggcctgtgagaggtactcagcaagtgtccatgggccccacacagatttaggggagcaagattactgccaacagatgagcaaaatgaaagggcctttttttctttttctttttgaaaggcggagtcttgctctgtccacccaggctggagtgcagtggcgcgatcttggctcactgcaacctctgcttcctgggttaaaacaattctcctacctcagcctcctgagtagttgggactgcaggcgcccaccagtacgcccagcttatttttgtatttttagcagaaatgaggtttcaccatattggccaggctggtctcgaactcctggcctccagtgatccgcccacctcagcctcccaaggtgctgggattacaggtgtgagccacagtgtccagcccgaaaaggactttgaaaactgggccagaggtgatggtgtttgttgaataattgttccatagcatgttttaagcttccaaaaatgcagccctcaagagaatgggcttgggcctagtgtagtggctcacacctgtaattccagtgatttgagaggctaaagtaggaggatcacttgaggccaaaagtttgagaccagcctgggcaatatagcaagactctgtctctacaaaaaaaactaaaaaagttagctgggcatggtggcgtgcacctgtatagccctagctactcgggaggctgaggtggaaagattggttgagcccaggattttgaggctgcagtgaatatgatcacaccactgcactccagcctgggtgacagaacaaaaccctgtctcaataaacaaaacaaaaaacaaacagaaaaaagagcggactctgtggactgatgggacccatgcccaggtgcctcccttgctctgtgagaaaggcaggtgcaagaccagattctgtggaatagaaataaatggtggtgtgataacagaagcctagaaaagtctggaagatttggggctcagagcagttttctttg

SEQ ID NO: 135800 - DNA, 1010 bp, Homo sapiens
gccccggagtcacccgtgggcggcacggggggggccccggagtcacccgtgggcggcacggggggggccccggagtcacccgtgggcggcacggggggggccccggagtcacccgtgggcggcacggggggggccccggagtcacccgtgggcggcacggggggggccccggagtcacccgtgggcggcacgggggcggtctcggagtcacccgtggggggcacgggagtggcctcggagtcccctgtggggggcacaggggtggcctcctggtcggtcactgtgggcagcgccagataggtgagggtccagtagcgcaggaagttggttctcaggctccgcttcatggagctgctgcccatcttcttggtgatctccaggtagccgctgttttccgtagtgtagggttcccagtgtgtgggcacagccgagtcgcccatgttggggtccctgcagagtgagaagaggctgtgcaggggctggggactcccagggggctgaagccctgctctccacctgcacgcctgagccatccccgccctctgagctggccctgggcaccatgcccctcactgcatactgggcactggctgtgcacgtgcatgggcttggggctctgccagtaactctcatcctcaaacacacatggattccgatgcagggggaggttaagtgacttgcccaaagtccctccactggcaaatgagggaacaaggcctcgtggtgggaggcccttctcggctgtggccctccgccctgcactcaacccacgtcttaccctgttttggcaaagttggtccagtaggcgatcatggccttagagactgtcctgtcttggggccggtagcccgtgggggtggcgaagggcttcccgaaaacgtactgaatgtcatctgcatggtcggcccccacccatttggggtagacgggcatccgagagggatgggaaaacaggtaggcgtaggtcttggcactcctggaggggagagaccacccaagtaggcagggtg

SEQ ID NO: 135801 - DNA, 1050 bp, Homo sapiens
tgggcagccagcactgcagtatgggcaggacggggtgaccctctgccagctcaggccaagccggggggttctggagtcagtccctgtttaaacaagagtcatcaggttttgtgaggacctcagcagagtctgtcctcaggcaggagtcattgagaggggtccttggagttctggagctgtattggaggggatctgaggtctgtggctcaagacagtccttgtatgggctctcaagcggtaggggtatcctgcagggcccccaggagcatccctgatcacccctctgcccctccccaccagagctgaagatccctgaaaacgccaacgtcttctatgccatgaactctaccgccaactatgactttgtcctcaagaagcggaccttcaccaagggagtgaaggtcaagcacggagccagctccaccctccctcgcatgaagcagaaaggactcaagattgccaagggcatcttctgagggcatcctcccagggtctggctggctggtagccaagcacttatggaccagagtggcccaggccagctgggcgccttcctcccacctgccagcccagggtaccccagactccagtttcatcctgaacctctcccgctgctgggattgacgcctgccattggtcaggctgacctggcctcccgtggaccactcgctgccttaggtgccttctgctctctggaaccagaggactagctgacttttgccaaggagcagtgccaacgggcatggcatggtgccctgcctgcccccgggcgccacctctgtacacttccctgacaccttcccaggtgtgggtcactgccacctgtgcccatgggcaccccagagcacccactgtgaccactgcagttctctcatgcccacaggcactggcctgtgaccttcgcaggggtcccggcccctcccaccactctagcctttctcaggctgcaccaaagattccatcatcagggccaactgagagtgagggagtctcacccaccgcttaccccagccctcccctgggagcagagagagaaaccctcttcatgga

SEQ ID NO: 135802 - DNA, 1013 bp, Homo sapiens
gcagcggggacatcgctgacgcgctcagcgtgcactcggccggctcctctagctccgacgtggaggagatcaacatcagcttcgtcccggagtctcctgatggccaggaaaagaaggtgactgcctgcccttctccccaatatcctttcccatctccccactccaaatccatgcatggggccaggaagccctggatcctgaacacagcttctagaaggttccccatctggcagctggcctggggtgcccccacagggcagtgggatctgctgatcttaccgtctccctcagttctgggaatcagcctcacagtcatccccggagacctccggcatcagctcagcctccagcagcacctcgtcctcctcagcctccaccacgcccgtggctgccacacgcacccacaagcgctctgtctcagggctctgcaactccagctccgcgctgccgctctacaaccagcaggtgggcgactgctgtatcatccgcgtcagcctggacgtggacaatggcaacatgtacaagagcatcctggtaagccggcgggggtggcctgggtgcctccctccactggcggcaaatgcaccctgaacacagtgcaccatccctgccctcccggggtctaccttgtagttggcggggaaggacagatgtcagccaggtacagaaatgaagaaggtagtgatcagggacaaggctggcctgagggcagagggggaggaaaggagcagccgtgcaaagcccccaggagctgaaggggcggtgctgtaggggaggtgaggtcagggaagtatccagggcctggccacataggccctgagccctgccaggacctcgactttctcggggaggaagacaggagcaatgatggctggcttctctgtctggtgtgggctggtaccagagccgcaggggtgttggttaggaggccgctgtggcaaccaggctgggagccctggaaggggccagcagggtcagagtctagacaggatttggagacagcagatgggaat

SEQ ID NO: 135803 - DNA, 1112 bp, Homo sapiens
tgcggctcctgcccccacaccggcccagtctgtccccgggaggccaggctcctgacgctacctctgtctgctctacacacccaaggagagggcagcctgcctaccccagggacaggagctgcaggggatgccaggggccaggtggccagacctgggaggcagatttggaggccccatgtggcttccctaccctgccccgagaagagacactgaccagagaaccctgtagaattcttcccatggcaccccattagctgtggcggataccccagatgactgaggagaactttcagtgactaatggattcacgaggcctcagagggagtcaagtgtcactgcctggtgcccctggcatacccggtcagtgaaatggcatctagggcccccctcctgcgtggacacacacagagttccctacaggggagcatcgcagggggctcctgggacacctgtccctctccctccgtggcacagctccactgggggccctggcatgcacgagaagcccagaggacggtaccctgatcagtgaccaaacgggtaaaggcagatggggcagagcctctggctaggacagaagagcctgttctgagtccctggggggcccagggcaagtcactgcccatctcagggccatagtttcctcatctagaaaatggaggaatgccagccctggggtgctgaccttatggaaggttcaagggagaaaggagtgtgcagccataacaggactgtagcgcagagtctctgaggccctgcgaggcaggtggagtttttttatttgtttagagaaggagtctcgctctgtctcccaggctggagtgcaatggcgtgatctcggctcactgcaatccccacctcctgggttcaagggattctcctgcctcagcttcccaagtagctgggattataggtgtgcaccaccaacccaggtaatttttgtattttttagtagagatggggtttcactgtgttggccaggctggtcttaaactcctgacctcaagtgatccacctgccttggccttccaaaatgctgggattacaggcgtgagccaccgcaccatgcagcaggcggagttctcatccgcactttccagagggggaggcag

SEQ ID NO: 135804 - DNA, 1787 bp, Homo sapiens
cggggcaggtggccttcagatggacaggggccggctcaggagcccagcctggctcaggggagcccaggcctctgactctgctgccacccacctgtccccagtgccatctcctccatcctgggcacctggctggaccagtactcggaggatttctgtcaacctccggactttccctgcctcaagcagctggtggcctacgtgcagctcaacatgccaggctcagacctggagcgccgtgcccaccttctcctggcccagctggagcactcggaacccattgaggcagagcctgagggtgaggaggactggggtgggtgccagagggtgaatgaggaggggtcggtgctgggccacacgaagaggaggctccagggtctggtgctgggtcaggggcccagatgagcctcagaccacacaggcagggaccacaggcaggagagtggcctggtacacgttttgtgggttcggggagagaggcttctctggaagccggggctgttctgtgtctttggaaaggcacaggaaaggctggcatgttgttgaacttttctcctcttgcagctctgtcaccagtgccagctctaaaaccaactccagagctcgagctagctctaacaccagctcgagcacccagcccagtgccggctccagccccggagccagagccagctccaacaccagctccaggttcagagctagaagtagctccagcaccagctccggagctccagcaggctccagagccagctgtgggactagaatcggctccagcgccagctctggaactagagccagctccagaacaggatccagctccctcacaaactctagagctggagccagctccagcaccagttccatcattacagccttcctggccttcacctgtggttgcagagaacgggctgagtgaggagaagcctcacctcttggtgttccctccagatctggtggcagagcagtttacactgatggatgcggtgagcagctcagcttggcagggcaggggtgggcctgccttctggcagcatctgctgtcccagacctaccatttgctgatccagagctgatgttctggtcaaatcccagctctgctgctacacaccaagtaaccaggtcgttccttaaccccaagtcctcagtttacctctggacagtagagatgaggtcacccctatcctccagagtgactgtgcagattctagatggaacagacaggaagctcagcaggcctggcctgtgggagcggagggtgctcaccaaggtgcatccatgggtcacccccatctgttcaggaggctcaccagcctcagcactcattaggcacttggtgtgtcctggagcctatggcagacactggacaaagcccttagttgtagcgcccacagcagatgtgcgtctggatggggagcagactgaggcggggggatggggggtgggcaggcgtgagccgcctgttggagctggggcttggtgaggctgcgcgaggcggtgctcctcttcttcccaccagcgttctgtcccgggtcacttgtgtgctgggcaccctgcatggacacgggataaaacccagagatccccacaaggctcaagctgcatcctcagcttccccagcaccagcccagactgctggggcaggaccaggtgacatttagcctcctccccaggaactgttcaagaaggtggtgccctaccactgcctgggctccatctggtcccagcgggacaagaagggcaaggagcacctggcgcccaccatccgcgccactgtcacccagttcaacagt

SEQ ID NO: 135805 - DNA, 1012 bp, Homo sapiens
gcagctcgggctttgtgtgctgggagggtccggcggagcgctcacagtggccgtgcaggttccctctctccgtccctgaggaactgagggagaggcagagctgagccccacccctgcctgggggtcttgtcttccctctctctggccctggcgctccttgcccagcctcagcactgagatccagacctcgactgctatttagaaatcaaaggggaagcttctggctgggtcaggaaaaccaggatcctggcaggagaggaggccactgccggaaactgaacacaatgaccatttaccaagggcccaagggagggggcggggaagtccctgtccctcctgccaacaccccccgtcctggggctggtttcctggtgtctatgtggcctgccagagctgacgctgcgcacttggtccctgtcctctctggaaaccaccagacagtttctgccttcccccgcatccctgtttccctacctagcttccacccggtgcttccctctgggctgccagatctcctcacatctgggcttccgcttatcttcccgattctaagccaagccaccaatgacccagcttggcctgcacagttcttgctttctggaggtgacctggtccgtgcccccatctctggacaggctgttgctttggccagacaaaaagtgcaggttgtgggccaccccctcacttcatctgccttagaccaaccctacagagtaggtgccaacaccaccttctaggaagctagggggtcagagaagggaagtctctgacctaaacacccgtgcagccagcaagggccgcagccaggatttaagcatgggctgtgttctctgtggcacctactgtgtgcaggagccaccaggagtcagaggaagcccaggcagcccagaagccctgaggtcaggtgagcagtagggaagcttatggctcagaggaaggcaaaagtgctttgggccacaggacgctggggagagctacctggaggaagcaagcccagaactggaccccacag

SEQ ID NO: 135806 - DNA, 1095 bp, Homo sapiens
tctatgtgtgtgtgtgtgtgcctgtgtctctgtctctatgtgtctctgtgggtctgtgtgtgtgtctgtgtctctgtctctatgtatgtgtctctgtgtgtgtgtgtctgtgtctctgtctctatgtgtgtgtctgtgtgtgcatctctgtgtatctttgtgtctgtgtgtgtgtgtgtctgtgtctctgtctctctgtgtgtctctgtgtgtgcatctctgtgtatctttgtgtctctgtgtgtgtgtgtgtgtctgtgtctctgtctctatgtgtgtgtctctgtgtgtgcatctctgtgtatctttgtgtctctgtgtgtgtgtgtgtgtctgtgtctctgtctctatgtgtgtgtctctgtgtgcatctctgtgtatctttgtgtgtctgtgtgtgtgtgtgtgtgtctgtgtctctgtctctctgtgtgtgtctctgtgtgtgcatctctgtgtatctttgtgtctctgtgtgtgtgtgtgtgtctgtgtctctgtctctatgtgtgtgtctctgtgtgtgcatctctgtgtatctttgtgtctgtctgtgtgtgtgtgtctcatgtacagccagagcagtgatcaggcttcccagaagttgggaggtgagtcccaaaggtaggggaacaaggcaggaagaggaactttgtaaaaacagacaccggccagagggactggctaagtaacgccctcccccgccctggctcctgtagatgatatagtcagatgggagggagccaggccagccgcgttggggggtttagtgtgatgaattctttactcttcaccactccagcctccttggggccacccctcgccccagcacccaggaccttcaaggccagaatagtggtgattcctctatgtcctcatgagtcacttgtccttctgggctataaaacgggtgggcgcttgttcccaggcccatcactcagcgaaggagataaagagagcagaggagataaagtcagtggcaggcagcttctggactttcagtttccggaggcattgggagcttggccccagaagaaagggatgggaggaggagcttagggccgagggcagtgtctcggtcacctctttgtggcc

SEQ ID NO: 135807 - DNA, 1061 bp, Homo sapiens
taggccaaaggtgatttttatgtgttgtgtttttccctggtctatcgctggcacttgaatagtgcccggcacctagtaggtgttcagtaaattcgcgtggtctggctgtgtgaatatagttgtgccccgggccctctctgtggtctgcagacagtgcaggctacaaactctgttactgatcctcatctccttcagtagagaaatggacattgtttagaaactctatggcagttgacattgctgcaacatttcacctgcattttacagaagtatcagctggccttgaattcaaaataagaactctggttcttccctgcagaggatgccaccttggggtgccatttttttgacacggagcatgtgccaggccctatcttgagtgcttcccatccagtgtttcatttcagcatgcagtctttttgaggcagagatgttccctgttgatgggctagaaccaaggctcagcaagggaaaggaacctgcctggctcacccagctccacccagccaggaagtgacaggatgagggtttggcccaagactcctgacactgtaggccccagctcccagccactgcttggatccttacagttagacgttgggttcctcctggagctggacctgggggcaggcagggttggggaggggagctgcggtgcccttggcagggctgggtcctgctgggctcaaagccaatgggagcggctggggcagggcctggattcttggatcctcagcttcttggcaacctgcgtgactcagtgggctggtaataggggccggcgggcaggcagccagtgcaggggagccctgcggtgggtgaatcagccagttgctgaattactgtcctgcctggggtggtgccaagccccaactgccaaaataagcacagcccctctttgcctttctctccccactccagggtggcccaccttccacatgccttggcaggtgtgtcctgtggctctgctgctcctgggagtccccgggtctccctagcctggagcaggggaaaggtcctccccactggggtgtgtagccttccacaagtcattctgcggc

SEQ ID NO: 135808 - DNA, 1048 bp, Homo sapiens
ctcccagggcagccaagccagggtgaggaagtggagaggaaagggaacgggaagcattgtggcatccccctaagaatgacaagccccagaaaaaagggagtgttcccgtggcaacccagagcagttgcttggcaactgctggcccccaaaatacttgcctgcaggaaggctccgggctggggctttccgatgggctttccgatggctcacttccaacccccaccagcgcacacccacccctggcccaaaaagaagactctgaggctgaaagagaaaatgcagagaccagggtccaggaccttcattagagcctggggaggaaggggcctgacctgctgagtttcctcagatacttctcatggccctccaccctgacacaggacccagtagactctgcccctggatccttcctgagggacaccccagtccactcccccctccccatctccccactctgccagccacccggcatcaagccagtcccctagcaacagaggccgcttcctggatacctgagtgagagttgacagtggcagaatgtcagaaaacgcaaggtcagaaagcacagcgatggctcggtgccagccagagtgtgtggggccatggggtaccacgtgtggtaccgtgtgctttgccgccctgcagccgtgggctccctggcctggggctggatggcatgccaggttgtggttgggctgggtacagcccttggaacaggggactgtggttctgggccaactttgataccgactgactatgtgaccttagtgtgtcccttctcgctggcctcagtttccccattggtggcccatctacccctctgcctgtgtgtttaccgttcagtgcataaacattgccctgtgaattatgtcacctactggggccttggggcaggagagtgaggggaccaggaccaggccgccactgcccttcctcctcacatgtcggcatccacctcggccatcaggcccctggtcctcaggtgaggcaggtggctttggagcaggacacctgggtccaaattccagctcagcgcttattgctgggc

SEQ ID NO: 135809 - DNA, 1001 bp, Homo sapiens
acccaaagacctgcagccaccagtgcttcactagcgtgcagaccagccctgtcccgcctccctgtcagtcaggcgaattcaaccggaaaagggacgtggaaaggccactgtgaactgcagagggctgtgcacacagtagcacacaggatctcacagtaacgcggcatgggaacagtgagacagggggaggggaggcgcagttacaaaggcagggcccggcaggcttgccacgttctgcagccgtgcctttgcggggcaggctctgaagcctcagcccgactcagagtgcctgaaccctgccgcgccagtcccccgtttattgcatattgcccttaacgtagcatttctaataccctggtgtgaaggcgccctagaccccttttctctggtcacaggggtcctgggtcctttgatgtctcccaaccacatgtagccaattcctcactcaggcccccagagtgagcctttgaaatggaacaggtctaggctccctcggtttcctgcaccccaaagtgagccgcactctcaggggactagccacctccttcttaagagggtttggggcagtttataataaagggggcgtgtgctcaaccctagctagggtgattttttttgttttgtttttgttttttttgagaccgagtttcgctcttgtcacccaggctggagttcagtggcgtgatcttggctcactgcaacctctggctcccaggttcaagcgattctcctgcctcagactcccaagtagctgggattacaggtgcccgccacacccagttaatttttgtatttttagtagagacggggtttcaccgtgttggccaggcttgtctcaaactcctggcctcaagtgatccacctgcctcgacctcccaaagtgctgggattacaggtgtgagccactgtgcccggccactaaggtggtttttacctgcacatccagcctgcctgtgtccccagtgtctgttccatcaggcagtggggacacaggcagactg

SEQ ID NO: 135810 - DNA, 1018 bp, Homo sapiens
ctagacccctcctctgcccttgtctctcccatgaccccacctggccttcctttaggagctgccgcttggcagccttcctctgggcctctgggactccttcctggaacttcctggggccctaaagcatgaccagatgatgaatggtccacctagggtcaggtgacccccttgtccaatgagttttggcctgggggcagggctgtgtcaaccacacccccctccatgcccccagcatctagctcaacttgccttcccttgattcgtccacttacctgcttcttcactactttcttctctgtgatcctcaatgttcctgcctgtaaaatgggcatgcttatgcagatcaaagatcataagaattcttagaacgtcgctgggcacttagaaattgctcagtaaaagttcacctggcctaggagcataagaatctctaccaggaacatgcttacaacagccgtaagaggctggtactagcattttgggaattggacaaatgaggacccagagggccagagcagagtgacatcttgagatggggagctggtaagtggaccccagcctggctgaccccagcacacagtggggaccctggcaggctgctggtgtagcagtgggtgaccgggtgatcatcactaggtacactcatttcatccagtccttcctggagtcagccgaggagttcttcatgcgtgggtaccgggtgcactactacatcttcactgacaaccctgcagccgttcccggggtcccgctgggtccccaccggcttctcagctccatccccatccagggtcactcccactgggaggagacatccatgcgccggatggagaccatcagccagcacattgctaagagggctcaccgggaggtggactacctcttctgccttgatgtggacatggtgtttcggaacccgtggggccctgagaccttgggagacctggtggctgccattcacccaagctactacgccgttccccgccagcagttcccctatgagcgcaggcgtgtttcc

SEQ ID NO: 135811 - DNA, 1007 bp, Homo sapiens
ccacgcttcgttctcaggaacaaaacctgaggcagccctttggatgccctcacagccttgcttctctcagcctaggttcccatttggggacttcaggaccccagagccactaggacttccttgggaagcccgttagcccagggtgggtcccaccaggacagtagggaaacagttgtttccctagccatttccgaatagcccatcattccgagtcatcatctctgtttgctgccttcctggccagccaggtggaagaaagtttccaagctaggtctggcccgttggggatctcagcagtggggcaggagggtgcctgatttcggggagtcctgacccgagcctgttgtcagagttgggaggggctctgagcagtgttgggcaggccgggtctcccatcccgaggccagcgttcctgtgcagagccccatccactggttcttgccctgagccacatatgtctgtgccatgggctgagtgccacgacaggcccgtgtgacagctgctgcccacgcatgtggaagctaggtgggactcattcctaattctgccgttgtaatgagacttgattaaaacaccgccacttttttgcattgctgctctttcttcctcattccttgtcagtccaggaccatccttggtctcccagcagttgtccgagcagcagctcctcagctctgcctggacagcctggcccaaggtcactctctcctcattggcacctggtaggtccccagtattcagtgaatggacctgctgccatcattgcacatccaggcacctgtgcctctgctggcatctcatcctcactgctaccagagccggtgctcctagtgccggtattttagagaggagaggatgtggacttagaaggggtgaggtgtaccacggccacagagctaggaagtgaagtggcaggaatcagaacttgaacctgatggaagtctagacccagtgtcttttggtgccaggctcaccttagaaatgcagaagtcacaacactgggcagg

SEQ ID NO: 135812 - DNA, 2879 bp, Homo sapiens
aatggtggtcaagtgcatgacacagcctggcacctgggaagtgatcaggaaatggtcgcgaaaaaaaacttaaatcatcccttcactcatccaacagtttaccaaatgccaagcaagtgacaacggttcctaccaaacagggctcccacagcccaaaaagaccgggccaagataagcccccatccctgcacctagcacagcaagcagcgtgggttgcctctatttgtcttgagcaaaggtgcatgttgtctcccatggccagaacaagagagggtggaattgaaccttgtcagaggtctggctgacagcgcttaggtctgtagatggcaccacagacaggttgtggccagtgtggacatcctgggtagatgacagttaccgtaagctgggctgggccgggccaggggtggggatgccttggctgggttgatttctaggttttcttgttttcccccagattgaggacgagacgcaggtgtcacgggccactcagggtgaacaggacaattacgagatgcatgtgcgagccgccaacatcgtgagtggccagggtggagggcacggcctgggctccaagagcatcagtcccctcaggtttcctgggtggagtggagggggctctggggctggtctggtcttcttcccccgagaaggagcagaaggaggcaaatgtagagatgctttggtttcaccactcggcagctttaaagaatgaggtgggggcaaatcatttctcaggagactgtcctcacgtggggcacttggaggagggctgggcagagagccacccatgcccgtcctgtagccgtgcagtggccagaaagagggtagcccttcctgctaactcaggagttcctaaggtcagttgtgagtgaaaagacaaacagccgaatggaactgtaggcgccattggattccttcggatcacaggagaaacacagcaagcagataattccgcaggtgcacgtccagggctcaaaatgcatggaaaaaggtcccacaggagctctgcccagctggcagccatgttaatcctaccccggggcaggaggcaaaatgggatcgcagttttatctgtggggtttgagtttttcatgagcagaatgtacacctgcataattggactggaggccagtcctgcaggagtggaagccagaggctgacgagaggggagggcctgccctgcagaactgacatcccagttttctcacttaattctcacacatgaacctgtggaggtcaggggtagagtcccactttgcagatgaggaagctgaggctcctagagaggccatcccttgcccagcatcagctacttgtaggcaaggccgctgtcccccctcaccctgtgcccgccctggttctgatggccacaggtccgagccggcgagtccctgatgaagctggtgtccgacctcaagcagttcctgatcctcaatgacttcccctccgtgaacgaggccattgaccagcgcaaccagcagctgcgcacactgcaggaggagtgcgaccggaagctcatcacgctgcgagacgagatctccattgacctctacgagctggaggaggagtattactcgtccaggtataaatagcgctggactccccatgcagagcgggagcctgcctacctgggcctggccagcaggcagggctgccttctgctttttcaaattcttgctggtcttagcagtggagccatgcctgggtttcagagcagagctcctggccagagcgtttgaccgacagacaattcacatccatatgccagggccctgggcctttcccacagtgcaatgtgatgaaaaccacaggactcacgccagtcggataggccgagtctggagaagggaggcgcctggctgtatcccccgcaggccctcttccgagagccttcctcctcgggcagtgcgttctggggctgtgctgctcctgttaccttctgaatccatatgtagagatttcagccaaggctgggccagccttttttgggcagtcaggtccacacctatgtccagggcaccagggatgcaattccatgtggatgtcaccaaaccccagtgtggaggcagggacagtcatgggaatgtgggggatgaagcccaggcagggaatggccttgaaagccattggagctccaattcgtgacccactcagccttatccacggagctggagccaacctacgtgccaggccccatgctgggtcccagggatgcagaagggtcaaaacccatcatcctgacccttgtggggctccgtaagaagctgaaaccttcgaccgtttgagctggaggggccctgagaaatcagagtctacgtatcatttacttagggggaaacttaggctggagacagggaggccttccactctgccccattagcttagaaaatcaagattcagtccagcagatgcagagtccatgtccatcttgtgccttctcctggacaaacctttccttcctggtggtggatttaaaatactcctttctgcccattggccatgctgggagccacagctatccagagccagcatgacctggggcttggtttccctgccctgggctcagtggcactgctgagctgcagcagtcctagagttttccagggggttctgagggaatctttggtccccagtactcattaactcagcagacatgaggcagcatttcctccacactagggtggctgagaggggtcctggggtgtttcagacccttctgggcatctccttccacagctgttcagtttgtcggtctctttgaggcagccaccgtccctgagggcccctgcacagagcagctgtgggcctgtaattcagcctgcctgccttgccttggggcagggagagagggaacctgctcacggccctgcagcaga

SEQ ID NO: 135813 - DNA, 2888 bp, Homo sapiens
cggagccctagcgtctctcgggcttgctgggggccgctccagaggccttgtgagcgacgagttctgagcccgcccctgttgcttctagagcctgtggggccgcgactcagaggagtcatgagtccggggtgtctcctgggtgggcgacgcgaagagagcgtggtctcgggcttagccttgctctggccactcggggttcccggggctgcatgcttgtgcggctgaatgtgagatgctcctgtcgaggggtggtgctggggggttgcagaaagctgctcgccagcttagttcaggcaggtgctgtcagcgtcccttgttttggaggagccagcctgagccctacccccgacgaagcgagtggaggcggcggtttaactgacgttttctttctgcccagccgaaaggaaagaaggccaagggaaagaaggtggctccggccccagctgtcgtgaagaagcaggaggctaagaaagtggtgaatcccctgtttgagaaaaggcctaagaattttggcattggtaagtaacaaacggcagaatgaaaacggtctatgtttttctcaagggaaggtggtaattgggttgtgttgtatcttgtaggttttagtgggtgtaaagtggtcgcagtccttaatttgtgtctcttagagacgggggcaatgatacatgcttcttgctttcattgggagttgctgagcgagcattcagctcaatatggtagtggccttgaattcagcttagccatctggaaacaagtacagtagcagtgtcgcagcgaggtactaggactgcaattctgctgtacttcgtggcaccttggcttcttgttagatgaggaaaagcatcgtgctctttgttctcaggtgtttgtgtgcagatgatgtaaaagaatatttgctatctgagagatggtgatgacattttaaaccaccaagatcgctgatgcaccaacacccttcctagtggccccagacatgaacttgacatggaatttgagcctcactcggtgtcaccctttacttctcaggacaggacatccagcccaaaagagacctcacccgctttgtgaaatggccccgctatatcaggttgcagcggcagagagccatcctctataagcggctgaaagtgcctcctgcgattaaccagttcacccaggccctggaccgccaaacaggtgaggttctgtggcgtggaaaggagtttctcaggcaaggattccttatttcatccagaacatgagggggatggtcttaggcttcttgaactgcagttgtcattaaattatagtcatatagcaggaccgcagtccagcatttgttattaagtgttaagtgacaaggattagaaccttgactccaagcctaaactgaagagtgtttttccagctactcagctgcttaagctggcccacaagtacagaccagagacaaagcaagagaagaagcagagactgttggcccgggccgagaagaaggctgctggcaaaggggacgtcccaacgaagagaccacctgtccttcgagcaggtgagtaggccccaccttagggtgaacactgggggcgggctgttgcagtgatgtaaaatttcttggcctgaaattactgtgaagagtaaaaccgagctttttaacactgagtcagcagctgagcccagcagcttcttgtgactagagcaggccctgtgagtgctcacaaagtggttgtgtgttctaggagttaacaccgtcaccaccttggtggagaacaagaaagctcagctggtggtgattgcacacgacgtggatcccatcgaggtgcgtttgcctgttgactgctaacccaagggcttctggcagtaccaggaagagagagtagacctaatgccaagtcagtgatgggaccgaagtgggtgagggcagtactgacacagatccaacacatgcgtggctcttgcaatgatgtgaatctctcactgaattcaaccttgaagtgcgaatccatgagctttttaaccctgagcaattgttacaagctaactgaaatttgctgcttttggtcaaaatacagtcttcagctaatgctttcttccagctggttgtcttcttgcctgccctgtgtcgtaaaatgggggtcccttactgcattatcaagggaaaggcaagactgggacgtctagtccacaggaagacctgcaccactgtcgccttcacacaggtgaactcgtaagtacacagcctggccccaaacttccccccagttcatttaatccatgcctcacagttgtttccttttgccttaaaggccaatcttttagtttaagaaatatatttatctgaacttttgccaatgatggttaagaatttcttcacctgaataaaccatgtggtcagcattgcatctgaggcaaaagactgtcttgagctaaaaggtatttttgcattctaaaagggaaactaaggcaaaaaacccacttttgtttcccctcctgccttttagggaagacaaaggcgctttggctaagctggtggaagctatcaggaccaattacaatgacagatacgatgaggtaagaggcagctttacaccaaaatactgtcattcacaaatctttctcccaaataactggctggcttaacctatgagaagttctatctgacgatcagcttggaacagccaaacagaattaacgcaactaataaccttgaaaatctcagaaaacagtaagccaagctaactgcctctttttgtcttttcagatccgccgtcactggggtggcaatgtcctgggtcctaagtctgtggctcgtatcgccaagctcgaaaaggcaaaggctaaagaacttgccactaaactgggttaaatgtacactgttgagttttctgtacataaaaataattgaaataata

SEQ ID NO: 135814 - DNA, 1090 bp, Homo sapiens
ggtggtcgtttgaaaaagtgccctgaatgatttgtctgctctctccctagaatatgccctacagagataggtatattcagccacattttccattcagggtagcaaacagtatgccagatttggcttgcagatggggttttggcccacatattttttaaaatttcacataaaatattcattgaggagtccagatttttagcctctcttgtaaagttggactctggcagtgcagatccacattcccacatggcatcaaagttcccctttgaagagcacgccctttgcctttctccttcacttgtctggccctggtgggctgtgtagtctgccaccctcaggggattcgttttccagccaaaccttgctcggccactgttcttatctccatgcagcccaatggaactgaaaaatctggagtataggccagtgaaggtcagggggtgctttgaccattccaaggagctgtatatgatgccccggaccatggtggaccctgtccgggaggcccgggagggcggcctcatctcctcctcaactcagagtggggcctatgtggtcactcccttccactgcaccgacctggggtgagtaggacatgtgggagctggctgtcctggcagaggcagtcagggtatactaatttacatcactatttccttcacaatccccaaccttggtaggaccctggggaacccaagatacccaggagattcaattccttgcatagtttaagtccctaattgtgacattgacttaatcttctcagccagctcatttatgactggataatttctgtatgttgacctctgaagggaaaggagggattcgtgaaacaggggccctgcctctggagaactgtctagttgcccacacattagatgatggcaagctatgaggggccagcaagaggacttcaagagaaaggaccccagccctaccttgagggagtggaggcaggggtggctccctagagggctatttgggagttaagagatgggaagaacattccaggcaaagcaaatgacaggtacaggagcacctgtgtgattaactagggaactggaggattcacgtaaaaatgaaaatacct

SEQ ID NO: 135815 - DNA, 1039 bp, Homo sapiens
acacgaccacaattccactgaaagcattttaatacggaacttgtcactcccagggagcctccgctcagccggcagttggttcatttcaatccccacgacaacccttcaaagtgcagggcagacagcaggtggctctgcccaggcgcctggatcacagcccggcctgcagccctcacctgggcgcggggagaccctgaggacgctcctccaggcggcgctggccggggcctgcggacacggacgggcgggctgagctccgggacccctccccgcgccccgcaccccgcaccccgcaccccgcaccccgcaccccgcacccggcgctcacccgtcccagccccgccgcccgcagccccagctgcaacgcagccaccgccgccatcgcacccggccccgcgggcgcttccgggacgcaggaggcatctgcatccggggcgccgctgagtcccgcccagagccccgcccccggctccaggttctgcgagcggcttccgccgggctgctccgcgggcgcgtcggccatgagcgagttgccgggcgacgtgcgggcgtttctgcgggagcacccgagcctgcggctccagacggacgcccgcaaggttcgcagcgcgggaggggaacggagtggcggagaagggcgcagttgggatgaggggctgaggggagggcaggggagaggagagggcaggggagaggggagaggggagagcaggagagaggggagggcaggggagagggcgcggcgggatcaggggaggagagggaagggggcgcggcaggagggggcaccagggagcggagccctggccctcctgacgtcctgcccgcccacgcgtccgcaggtgaggtgcatcctgacaggtcacgagctgccctgccgcctgccggagctccaggtctacacccgcggcaaaaagtaccagcggctggtccgcgcctccccggccttcgactatgcagagttcgagccgcacatcgtgcccagcaccaagaacccgtaggtggtccgcggcggcgcggggaggcccagggcaattag

SEQ ID NO: 135816 - DNA, 1069 bp, Homo sapiens
acacccactgcagtgctcctggcctggtctctgggtcatccgggctgtgcacactagcccagccagtcctttggagcctacctcagccaacacatttttgcctcagacttccatggaccctggcttctccctggggtgctgttcccccgaccccactgccaccacatccctccagcctcagcctcgagcgaatccctcagcgagtctccccagccctcctgtctccgcaagcccaccccacatccctcgcccagtttctttcacacctcgcattgccacgcacactcactcactcccgagcctgcttctggctctgtgcctgcctgcactaaaagctgtggggtcaggggccatcatccctctcttcactgtgccaaaaaacaggcctgatgcatcaacacggatcgctgaaggacgacctgccttcaagcacgctccatctggggcaaggcgggcatgcactcagatggcgatgcactgatgggggtccactgggacttacatttacacagagctcgctggtaccgccggccctgggtgtgcctcagcacgtgttctgggcacttgttgatgtgccgcagggtgagtttgcagaacaactggtgcctacagagcagagagaccaaatttgtagggacagttcacagcaaggattcagactggtggctgtgtcttggactcatccctggacagtctaccatgcggcttggacatcgggcttttaaaggctcccggagcaattccactctgaagctgggtggggaaccgtctgacccaggccgactgcagcctcttaatgtttaccggaaaagcacgcatggcagcctcactgactgctccaggatgagttcatgcaagaggatggctccacctggagcaagggctcaatgaatggaaacatcctatctctgttttgacgattattacaaagcctagctcccagctaaatcaaagaccccttctggggttaagggaagaacccaacgctgttcacaacctcaggtgacaaatcacaagcctctactcatctgggaagcagccacaccccacaggacaaacctcaggtgag

SEQ ID NO: 135817 - DNA, 1992 bp, Homo sapiens
ggcctggatggctgggtgggccaagaagcacttgggaatttagttatggattagagattcatcttggtaaatcacagcctgttactagttgggaacttcagtcttccccaaaccttccacatttcaaagctggtgctttattgcctcctgcctccctttggcttttatctccctacttgcaccagcagccgtctcagcagtagctacatcagcctgatggatagagacttcatgacgtgcagcagctggaacttttgtttataaagcatctcttttcctcacatttattttgaatttcttacgtttcaacctatgcagattgtccagaacatcgtgggcacagctctgatgattttagtggccattggttttaaaaccaagctggctgctttgactcttgttgtgtggctctttgccatcaacgtatatttcaacgccttctggaccattccagtctacaagcccatgcatgacttcctgaaatacgacttcttccagaccatgtcggtgattgggggcttgctcctggtggtggccctgggccctgggggtgtctccatggatgagaagaagaaggagtggtaacagtcacagatccctacctgcctggctaagacccgtggccgtcaaggactggttcggggtggattcaacaaaactgccagcttttatgtatcctcttcccttcccctcccttggtaaaggcacagatgttttgagaactttatttgcagagacacctgagaatcgatggctcagtctgctctggagccacagtctggcgtctgacccttcagtgcaggccagcctggcagctggaagcctcccccacgccgaggctttggagtgaacagcccgcttggctgtggcatctcagtcctatttttgagtttttttgtgggggtacaggagggggccttcaagctgtactgtgagcagacgcattggtattatcattcaaagcagtctccctcttatttgtaagtttacatttttagcggaaactactaaattattttgggtggttcagccaaacctcaaaacagttaatctccctggtttaaaatcacaccagtggctttgatgttgtttctgccccgcattgtattttataggaatagtgaaaacatttagggacacccaaagaatgatgcagtattaaaggggtggtagaagctgctgtttatgataaaagtcatcggtcagaaaatcagcttggattggtgccaagtgttttattgggtaacaccctgggagttttagtagcttgaggcaaggtggaggggcaagaagtccttggggaagctgctggtctgggtgctgctggcctccaagctggcagtgggaagggctagtgagaccacacaggggtagccccagcagcagcaccctgcaagccagcctggccagctgctcagaccagcttgcagagccgcagccgctgtgggcagggggtgtggcaggagctcccagcactggagacccacggactcaacccagttacctcacatggggccttttctgagcaaggtctcgaaagcgcaggccgccctggctgagcagcaccgccctttcccagctgcactcgccctgtggacagccccgacacaccactttcctgaggctgtcgctcactcagattgtccgtttgctatgccgaatgcagccaaaattcctttttacaatttgtgatgccttaccgatttgatcttaatcctgtatttaaagttttctaacactgccttatactgtgtttctctttttgggggagcttaactgcttgttgctccctgtcgtctgcaccatagtaaatgccacaagggtagtcgaacacctctctggcccctagacctatctggggacaggctggctcagcctgtctccagggctgctgcggcccagccccgagcctgcctccctcttggcctctcatccattggctctgcagggcaggggtgaggcaggtttctgctcataagtgcttttggaagt

SEQ ID NO: 135818 - DNA, 1044 bp, Homo sapiens
agacagttcttccagggtagcccagggaagccaaaagattggacccccctgtctaaattgtgcctcttagaaacaggttctgaagaggatgttgcagagcccctagaatagtagagactgaagccgtctcttctgacccttatttcacgggtgtggggactccgggtctgagtggaggacagacctgaccacggggacccagctggtcaacactgaagctgtgactaggactcggttgtgtgtgtgttcaggtagcctgtcactgtcgagttgtaaagatacctctgtctcctgagctatgtaaggttttacatgggtgtaactcgagtctgaggtcctgtgcgcatgcctgcctggtcctgcttggcagatcactgggtttggagaaagggaagtaagggccttcttatactggcagcaaggtctccctgcacctggtctcacagacaggccagatcctggtgaggcttagcttccagcccacatatctgttcctcaggaacctggccctgggaggaggcctgttgctgctcctagcagaatcccgttctgaagggaagagcatgtttgcgggcgtccccaccatgcgtgagagctcccccaaacagtacatgcagctcggaggcagggtcttgctggttctgatgttcatgaccctccttcactttgacgccagcttcttttctgtaagtattcctacttgcctgaaccggtctggtttcctgtgaatgctgtccctcccccaccccctccctgctcacccctccctggttgggtattaaccacagcctgggggagctgctgaaatggagcaaacttttttttttttttttttgagacggagtctcgctctgtcccccaggctggagtgcagtgcgtgatctcggctcaccgcaagttccgcctcccgggttcacgccattctcctgcctcagcctcccgagcagctgggactacaggcgcctgccaacacgcctggctaattttttgtatttttagtagagacagggtttcaccgtgttagccaggatggtctcgatctcc

SEQ ID NO: 135819 - DNA, 1061 bp, Homo sapiens
acctctaagtgccttttcagatgtcattctgtgattccaacttgtaaatgcctttgaccgaaaagagcagctctgtgtcttgtggcagtgccaccttggaagactgtagttgcctgccgaggcactgggggaaatcacggtagcagagtgttagggctgctgccctataggatctgccccagagggcctaacgtcaagtcatgcatctccgggactgatccttggattgttgcatgtgtccagactcacagggtagcgctcaggagcaagcactgagagccccctagtctgccctgggaaggcaccggggctgacaagagctcttgccttccacagcgtctgttcctcacacaccccgcccaaggacgtgcctggcagcggcctggtgctccccgccgcagccacctcacccttgggtttctgtggccctgcagttcctccgtgtcacaaagcagtacctgccccacgtggcgcgcctctgtctgatcagcaccttcctggaggacggcatccgtatgtggttccagtggagcgagcagcgcgactacatcgacaccacctggaactgcggctacctgctggcctcgtccttcgtcttcctcaacttgctgggacagctgagtgagtggctttgcgggtggtcaggattcactgggcgtcttgttccatgatcgttagcagttgggaggctgtgtgtgaactcgggggtctcctggactgctgtcccccctccattcccctcttctccagctcagctgtgccaggccaggagtccggttctgcaagccttggtggggacgcttagtctctagccctgagctcactgctttagagcttgctaaggaaataggacatggtccctgtcagggacccaaagcaggagatgctggagtctggctggcagtccacagtagagcagttaattgcctacctcaggtgggtggctgacttgggagctgattgtgggaaacagcccattctttatgacggcaagggctccactttctggtgtttgtgataagtctagtcagcttaccatgtgtggtccttgcctatcatta

SEQ ID NO: 135820 - DNA, 1073 bp, Homo sapiens
aactgacactgcagggcgcagtgggtttggggagaatggccacctggctttgtaatctctgcctccgttctctgccacatgggagccaatctgcagtgctgacctagtcagggccccacctgacaggctggagggtgacctgaacacccaggggcgtggtaactgagatgggcagcttcagcagtgtctaggactttgaagcaactttaaaaaatgctgaaaaataagaaacacgcatatcttcctttgttccaacagtaggtttagtcagccctaggaggcctgtgcagctgacgttcgctcgcctcccgtgggggtcagcctctcgggtgctctttagactctggcttcccaacatgcgttggtggatgggtcccctgatctttctccgaaggacttgctgtgttacagtatttctttcactttatatctcagttttgcatgggtgataagagaaaagtgcatggggtgaacctgcgtgacatttgtacctggcatccgatagtgcatgttggctacctaacccagccgtcataaatgacctgactcacagcacagcaggaagtcataaatgttttctttccctttgacatttgacagtgatttcacacacttgcgtttcattgctgttgaaacagctgtccatcccatttgttagtgtgttttaatttgctcgagattatgcaggctttgacaaaatcccagcgctttctagccattagcggtaccagcttcatgctgcgctgacggttgctgcacacacagtccccacgtcagatcctgagcttgcaggggagagctccgtcgggctgggaagcgccagccctggtttgcaacagcacacatgcgctgtccagagcctggggcctcctcctgctgctctggagattttcggataactgtaaacgtgatcttactattcagtcaaccatgtggccctctaggtgtggcaccctggctgtcacctaagccaacccttgttctgtcagggtactctgggcgtcactgggcaggctgggaggtccaggcccttggcacctcagccatgtgtgacctgcaggctggggtcaagt

SEQ ID NO: 135821 - DNA, 1030 bp, Homo sapiens
gagtcgacctctcccaggttactgaggggaggccaaacctgctcaggctcctagacttgcctgtgaccaagaccaagaaaagccgggtcttggtccccagcgcccccagcccctggtgttgctcttctggcacaagtcaagggaagagcactagcgggtgaaggggctgctcacatacaaaacccaagtgggttaggaccatatctgtaaggcaccatatctgtaaggcagcgcaggctgccgccgtcagatgatctccttaagagtccgtctaggtggtggcagagcatggctgtgggagcttccatgcccttttgtgggcagcttgggagggcagctacttgtactcgcccaaaccccaatcagacagatgcaggcaagtaaacagggttcgaagtcaaaatatggcttcttgtggacagaatctgaccaagcccaggtggggctttgtttctctttattcacatagtacttaaagctgccagaccaggcttttacatgaaaatgacctaatttgaagccgatagaggattaccatggaagtcactgatcagataaagtgacacatccattttttcacatcttcagaaaacaagagcaaaactgaagtgacaagatttgaccagaaagtgtgggctgctgaaagcaagacctaagtaagcttagtttcccaggcccagtgtcttccagtattatgacaatgacattaagtctttcactgggccgggtccatgatagacattccttttgtgaacttcttgactgtaggaggttggccagagcgtcaccatcttcagatgggcagagggaggttggctggccgcactggcttgtggtggcctggagactgagtccgcatcctgttaccccaaaggctgggttcctcactgcttggttgactgatctttccttctggcctgcagaggctggtccacggggacgagcagtctggttagtttctgctggcaggctccccacagttgcatctcttgtctctctgcctctggcatcaagctgcttgctctggcag

SEQ ID NO: 135822 - DNA, 1032 bp, Homo sapiens
tagcgaccgcgtacgggcgagcgtccacccctggccccaccccgcgtgggtcagtgggacccgcgggatcctccccgcccgaacggcgccctcgaggcactcaggcgtccctcccgcgcgctggccccagacccccaggtccccgcccccttaaaagggacgcgttccgccgggccgggagggaccgcagggcctgcgcgcggcgggcggggcctccagcgtgagaggcgtggcgtcgagcgcggcgggcgtggcttcgagcggatgggtcgggaggctggggatggcgcgtggcccctttaagacgcaccggggcgggcccgggcggcgcgcggcccctttaaggcttggcctacgtggcagccgctggagccgcagccgacgcggagcgaggccggccgccgggcacttcctgtggaggccgcagcgggtgcgggcgccgacgggcgagagccagcgagcgagcgagcgagccgagccgagcctcccgccgtcgccatgggccagaacgacctgatgggcacggccgaggacttcgccgaccaggtgcggcctgcgggctcctcccccggccccggtcccgacccaggccgcccgggccgctccggagtcggcctcccagcgcagggcgccaggcccgggccgccccctgactccttgttcccacagagggacccccccgcccgggccctctgtcccggctggacagccccaaacccggcctccgggcccagtctcccctgcccgctgggccgctcccggagcccgggcctcggcgccctgcctggctagccgcccccaccctccagccagcccggggcgcgggctgtgggggtttcttcccgggccggcggcgcgagtcctggcgttgggtcgggtctgaggctcgcggggagcgcctcggcgtttggagctgctggggggtccccgcacgtttttcctctcactggggctcccggaggcgggctgggagctcggggacgaacgggggccgggggtcctcccagaggaaagggggcgcgctggcgtgcg

SEQ ID NO: 135823 - DNA, 1102 bp, Homo sapiens
acttggctcgggccacccttggtctaatcacccctgttcggggggtacaagtggggttggtggtggggtggtccccagaagcaggcaaggctgcctctggagcccagggcctagggcaacacatctctacccatttttgtgggggcagttttgtttttatttccatttgggaaattgtcaagtaaatcatgaggttgaataggcagaaccacgctgccaggcggctctaaaagtttctcagtgcctacactcaacatatgctctcctccagccatgagccgactttgcagactgtgtggagcactttattcctctcctcagaggtggttctcgcagccacccctgccaggggcccacaaggcacttctcccaggggggtgggtggatgtggtggcttcgagtcaccctccgtagtggcattgcaggcctgaccatttgtcttaggtctgaccaggggtaggagcggggctgcctcctcacagaatgatggtgatgtgtgtgttgcaaaaaaccgcttctttgtgttgattttccaggagaagagcttgaagttgttcagaaggaagtggcagagatgctgaagggcagaattctagtggggcacgctctgcataatgacctaaaggtactgggctctctcctggggactcagcctgcccctgctccgtgggtgttacactcacgcccttgctgtgttggggagttttaacaatgtgtgggtttgtgctctatgttgggaatactttggtaataatatcagataccgcgtgctgagttcttactgtgttttaggagccatgccaggctcttgttttgagagcccccagcgaaactggggtacccataccagagcagctggcaaccccgccctaatgagaaatgaaggtgctgataccccttttacctggaggaaggcctaatgtccagttgtcccatccgtgaccagggtccctccacaggaaacaagtttatcctggcagatgccctgtggcccatgttcaggttacgcttgcctaaccatcaccctggccctgggagcttgcctttgccttctttctggcgtcccgaggaaaatcccgcctggggcagcccctggttcttc

SEQ ID NO: 135824 - DNA, 1096 bp, Homo sapiens
ttcggcgggtacgctggtctcagggagtggggtctgctggggatgcttagccgtggagggcggggcttcttcaaggaagaggatgctttcctctccctgaggtgaatgaggcaagcacctcccagggtcctgctaagaaccaggaccacacagagcttgtcacgtgggtgcaaatgagtgaggggcagagagcttttctctgctgacacttagtccatggatccctggggctctgacctggagccctgtggcctgccgtgtttattaaactacagcctttggttacccttcagcctgacaagagccttagccttggactgtgagatggtgggcgtgggccctaagggggaggagagcatggccgcccgtgtgtccatcgtgaaccagtatgggaagtgcgtttatgacaagtacgtcaaaccaactgagcccgtgacggactataggacagcggtcagtgggattcggcctgagaacctcaagcagggtatgtcatccacagctcaggaacttagaagggaaagtagtaactggattcgttttctcccttttgttcccttttctgtctgagaccactcactgcagctggttttgatgcgtcttgtctccttttggggcgatgggttttaaaatacaaaaggcatccttagacggctttacacccatttatgccttgcacttcattgcctcctgtccgctgacttcaagaccaggccagtagctgggcacggtggctcatgcctgtagtcccagctactcaggaggctgaggagggaggattgcttgaacccaggagttcaagtccagcctggacaacatagcgagacctcatttctaaaaaaaattattatttttttttgagatggagttttgctcttgttgcccaggctgaagtgcaatggcacaatctgggctcactgcaacctccgcctcctgggttcaagcgattctcctgcctcagcctcccgagtagctgggattacaggcatatgccaccacacccgactaattttttattttaagtagagacagggtttctccacattggtcaggctggtcttgaactcccgaactcaggtgatccgcctgcctccgc

SEQ ID NO: 135825 - DNA, 1036 bp, Homo sapiens
gttccaaaaagaagcccaaaattatccagcaaaacaaaaaagagacctcgcctcaagtgaagggagaggagatgccggcaggaaaagaccaggaggccagcaggggctctgttccttcaggttccaagatggacaggagggcgccagtacctcgcaccaaggccagtggaacagagcacaataagaaaggaaccaaggaaaggacaaatggtgatattgttccagaacgaggggacatcgagcataagaagcggaaagctaaggaggcagccccagccccacccaccgagtaagtatgggccacctcaccactgagaaccgaggcacagcgacttcaccaaggcctgtctccttatggaggctggtggcctcaccgcagtctctccatcactttaccctgatgtcgtctgttcctttgtttactcgctgttacttgttttcccctagagtgtgcgcatgataaggcagggcctgcttcttccgagcgttgagcagagctcagcatttagtgggtgccagtacacgtgtgtggaaggaaagcgtgctgaagccagaaagacccaagtatgaggcctgtccctgcttctcgccagttgggtggtttggggcaagtttctgacgtcctctgtgccttgtggtagtcatggtggcatcataaggagattgtgaggttggcactcttggctcagtgcctggtgattacttcaaccctgtgatggagccaggtgtggtggctgttgcctgtgatcccagctccttgggaggccaaggtgggaggatcacttgatcccaggaggttgaggctgcagtgagctgtgattgcactactgcctccagcccgggtgacggagcaagactctcaaaaaaacaagtgaaaagaataaaccctgtgctggccacccacgtggggtggaccgggagtcagtggccttctctgaatggttcagctggaggtgacgtgttcataagttacagctggcttcatgttgcctgggtgttcaggacacagtcgctgatggctgaggaatgagccatt

SEQ ID NO: 135826 - DNA, 1010 bp, Homo sapiens
gtctgccgggcgcctcccggggcggaggaatggcggggccgccgggagccggcgtcctggggttgccatggttacccgctcgggcctgggcgccttggtaccccgggctgggctgggctggcgcttctgggaacattcccggagggaccagaaaccccagggcgggggggcggcgggggcgggggtggggcaccggcctggggcacgtgactgagccctccccccgctccccaggggcttttgtgagactttctcggtgatgctcacggggcgcatgcccacctggcccgtactaaagcgtcaactgttgacttgggcgtaggtgacggcagccacattgctaacctttgggcaaggattgtttgtaagggaggcgggtgcacggctggctagatttctggcaggaagccactgggcggaagtttgctgagggtcaggtggtgtcagggcacaggtggcccctggggccgcggggcagtgagctgagggcccggcctctccctgggtcctctgtccgctctcatatctcccccgttgctgctgccttagccgcctgtcaccggccttcctccccttctccgcacgcatcccagtcacagaccctgaccttaggctgccagggaagctaggctcttaagcacagccagaaaaggacaaagagggaggcaggtcagctccaggagtgaatggaagccgtacagctggccttccagggaaagacaagtctgtctgagtgataccctttcctttcctgtctgccctcaatcttgtggattactggagtgggcaaggtcttagagaatgtctgtcgaggatgtctgcaggttttaaacagtgcctgcctggcagagagggctagctctgggcctgggcagggcaggccccatcagcaatcctgccagaaggaccaccttttcagggtcaccttgggttccacagcctttccaggtgggtagagggtggagggaggttgaggcaggagggtgctgggctaggagtgtgctgccctc

SEQ ID NO: 135827 - DNA, 1037 bp, Homo sapiens
caaaacgtgccccagtggttctgcgcccaggaactcagctgtcgctgtgccgtagtcactggaaggttcagaggtatatgagcatgtgtggcagcatccgtgcagtggagagaaagtgggaagcgtctggaattttggtccgtccactgggagttgttaaccagatgatagtaggtctgtaggacatgtttctctgcagcctttccgaagagtgggttcatctagatgtcctgacgtgaagggggagaagcaggttgcagagcagaaaatgtggttgccctctaaatacacttgttaaaaattttcccatttctaacaatgaaatcaatatgtaatacttctcctctcagtcataagaaggaactaatttcaggataagcttaatacacggaaactcctagaataatgcctctagtgcataggaggctggtggcagctgtattcattattgtctaggttatctttagaaagaagtctagatgcaagcttgcttccccttcagagaggcccggtagttttgatggtaagagcacaagccacatgcttagttctggagccatcttgtgccatatctaaatcacgaagaacacaggatcacaaagctcttatctacacgcagtgtcatgtccttaggggttcaaaaaactgtattttaaaaatgctagacatcatagaaattcattcacaataatttggaatatagaacaatgttactcgaagcccgctgcctgctaatcttctgatgtgtgtgcttcctgtctgcaggcattttttaaaagcctgcttttaacacagttataaccattatgaataagtttgtatcctgccttttttcacttagagtaatgatataagcatttgaacatcaccacagactttataacattctttcaatacaggaatattcattcagctggatgtatcatgctgttcttaatttcttaactggtgtaaatcgaggtgtgataaacatgtgtctgctaaaactttttctgtgtttatgatgatttccttaatatctattttcaggtgtggaa

SEQ ID NO: 135828 - DNA, 1008 bp, Homo sapiens
acttctgcgtggcccagtcttgccccgtcacggcctgcagcaaggatagcaaaaacatggctggtgggagccccttcccctcccaggtctgcaccgggcattgtactcagttgccaccctctctcctgcagagcccagactgaggctggttccttcgcagcccagcatcccagggagcctgggccattctcagaggggacaagacaggcctttgccaccccagcagttgtctctggggaaatcagaatgcctgcaggtcacacctgggtcacagggcaggaaccgggcagtggtcaggagggctgtgggcatggggctggtgctccacgtgacgctgcctctctctctccccaggggcgatgcgatctcctatgccaggatccagcagcagaggcagcaggcggatgaggagaagctcgcggagaccctggagggggagctgtgaagggctgggcgcccctccctccctgtcccctcttctggctctgtgtgggtccaagtgaggcctggactgtccacgctgaggcacagcctggagaggggcctttgcacgtgtccctacacctggagtcctctgctcctttctccagactggcttaagccaggagccactggctgctggtgtgagggtctgggctgctggacttgaggcagagcctgcagcagctgtgtggacactacccagccctactcctctgctgggtgggtctgcagatctcacaccacagacagggctgcctgtgacctgctgtgacctgggagcagcttcccctggagatgctggtcctggcttgaggggaggggcaagtgggaccctgccacctgggcactgagcagagggacctcccccagctctcttagcaggtggagccccagggcctgggacagcctgccgctgccagcaacctcccactgctgcctagggtgcagcgcccactgtcaccctgccttctgaagaagcccacagggctcctaaggtgcaccccggtacctggaactgcagccttg

SEQ ID NO: 135829 - DNA, 1027 bp, Homo sapiens
gaaatgccccacatcccaggacaccagccatcaggaaggcagctcttcctcacccagaaagaggcaattatttcctctcagcagcctggccccaggagcccccttccctctctggggctctgcctctccttttgtgccctgccatggagccccagggccggggcagcccctctctgcccagggaaggcaccgccctcaaagacaaggcttggccgggcagtgaccttccctgagcggaggggtggcttgagcaggacacttcttgcccttactcaaaaacgaaatggccagtttccagaggcgtcgggggaacggctgacgaagtcacaatcgttatgttctcaattgttttcctcctcttactttctctcctgcctcgtttggacaggccagtggcattcgcccttgaggtccctcgcagccccggccccccgggcccgcccacacctctggcttcctctgtgcatcctgtgaagtctgtttctgatgcgttggcgtggggggtgggctgggtggggtggggatgagggcccagccctcatgattccatttcccaattcctttctggtctccatcctctctgtagatatgtagatctctttgaaacgaagtaagcacccatccctcccagctcactcggctccaccgtggggacctgctgggggagccgctggctccctgaggaaagtgaaagccaataaaacatctcccacactctcgtgcagcgtcttccgtcctcccgggtgtccaggccgtccacacccacgctcttcaaccttctgggaggggcttcctcccaccccgcaggaggcagagtcagcttctccttccggatgcagccagtcaggccagggctctgcccggcggggccgagagctcctctctggcttgggggcacagcagtgggccacgtttgattttgagtttcccggtggctatccatcttccagcattgagaactaccagagtggactctgaacccctggacagagggttgtgggggggacaggctgggtcccctgggaca

SEQ ID NO: 135830 - DNA, 1051 bp, Homo sapiens
gtggccctgaccttgggtttaattgctgtaaaggaagaacagcttccctgagtggcctagcctgccctcctcatagcagctgcagcaaaagtgccaggcgtcaccagctgtgccaggctggaggtgacaccctcctcctgcctaagagcacctgcacctggggctgactggctcccgagcgcttgctggggagcccgagccagggtgtgggatggggagcatgcagaggccaagctgtctagaaggctgttccagccgcccctgccccgagggattcgagccggattggcccccagcctcggcgctgctctggccgctgtgcttgcccgggtccggggaagccaccgtgttgctgctgtttcccaggcatctggaattgctggggtgggaggtgtgttgtccggtggaagtcatattggctgccagaccttggctttgccggaccccagatgcccatgtccaactcaagatcacatggacacgaactgcacctgctctggggcaatgcctgggttcagaaaggagtccctggcacagggatgagtttgcccacagggcaggtagcaagaccaagaccccctcctccagagaagcaggcagacgtgagccctgtacctaccaacagagagtgatcctcatccccacctctgctcctaggtctcgctggactttgtgaagagcggggactatgccctggagagaatgggggtgacctatggtgcccaggctcacctgaagtcgcccttcgaccccaacaacaagagggtgaagggaatctactgagggctcagaccacatgccccatcccatgctgtccatccattctcacaggtcccaaatggccctgggtcccaggaccctggacccagccagaacttgtgccctccctgtccttagcctaggcctagtcctgcgaaaacccccaaaccagatacggacagagaccaagatggcccatcctgtggtcactgactggaaggcagtctctaatccaccccaatcctcccagaaagcaaacctgtaagtgtcttgggctcagggaccatggctt

SEQ ID NO: 135831 - DNA, 1377 bp, Homo sapiens
ccctggccaccctaagattctgcatatgtctgtggcctcttcatcccaacaccccatctggacctctagctttgacccatgtctctcagtacctatccatccaagcaccagagctccctgtgccaccaattagaaaatgcccagctttctctgtgagctgcaagctgcacagggcaggtggatggggcttcagagggccagttaaccttggctcccagtgctgacccttccattgtccagtggccggagcagctctgccttcacctatcagtctgccccttggaggccctcaagtctgacccattttttacccaactgccctatagaagtgtcaaggctactgaggcttaggtagcccacctagggggctgggaccactggttctcaaagtggtccttgtgtgattggcattaaaagtgcctgaagctgtaatttaataagcacatacctgggctctttcccagatccaggtattttctatacagcattaagttttagaacaactagtttgagtattactggataattcctgtcaatttgaccctgttaccattatgaaacgtcttttcttttctctggcatttattcttgctgtagtctccttgatctgcttttgtgacaccagctttcttgggattactgctttgtgtggcatattattttctctcatactacttaaacttttctatttccttatatttaaaatggatttcttataaatagttggggaagccagtctggtctgacagtctttggcttttaataggcatatatagcccatttacatttaatgtaattactgagctgtttgggtttaaattatctaactttattttctagttgtcacatctactccttttttcttctttcctgcctacttttgaattaatcaatatatttttaattctacttcccctgccctacattggtttgttagttacacactttttttcttaagtggtaaccttagactagaggttaccttaaatgagtacttttttactatttcccagacaatgcaaggaaggaccttgcgacttttgattgcatccattttcctcccaacttttgtgcaagcgttctcatgtatcttaattctatatatattcaaaccttagaagacattgtttttgtttttttgtttttgggatatatatatatatatatatatatatatttatttatactttaagttctagggtacatgtgcacaatgtgcaggtttgttacatatgtatacatgtgccatgttggtgtgctgcacccattaactaacctaatttacattaggtatgtctcctaatgctatccctccccctccccctccagtgtgatgttccccttcctgtgtccaagtgttctcattgttcagttccc

SEQ ID NO: 135832 - DNA, 1052 bp, Homo sapiens
ctcctctgaggagcatccttggaaaccctggctgactcctggtccactctgtgcccttcctctctatggagatgttctcaggtgcccagagatgacaccaccacggtcatgacccccgcccgtgttgccatgggattctccttccaagggcttgcaggcccctcagttgttcctgcccagggagccttaagatagtaacttggcgcatggtctaacagcacgcgtcattttccccctttgtgtggagaatgatgagaccaatattggcccaattagccagctgtgcgtcttttatgtttggaggatgtttatttccaagcaggcactggcgaataatctctcggacgccagtttgctccgcgtgggtttattgccagcagctgctatgtggaaggtggggatccagcggagctggaatgaggagacagggacctggtagggcaggtcacaggccctcagacccccaggctcccaagagtgggtgagatgccacttgccaaccgtggaggcttttgatgccattggcttcccccaaagaaataggaaatttctcagaaagctgatttcagtgttttcctttagtgtgggagtaaccagctggtggtggagaagcagaaagctggggaaacaaatccctaaagaggccttgcccactctgctggcatcctgctgggagagacaggcaggtgcagggctgggggtctcacagcccccaaactgactgttaagagcaggtttctctgcttgtcctcgaagggtctcgactgagttttgttccccgccataaccggggggtctcccccgagggatggtggccctttgtggaggcagcagggcctccagtttgccttcccggggagcctggctgggtagctgttagggctggaagactgagccatggccctgctgctgggggctcccctcgcctccccggagctggcctgagaggtcccgaggcggccggcgagccgtctggacttgggaatgagctctgactggtcaaggccagttcactccccaagttgtttgaaagctgggcgtcctgcaggtaa

SEQ ID NO: 135833 - DNA, 1050 bp, Homo sapiens
gattgcccaactcctattcattctacaaaacccaacccacaggtcaccttctctaagaggcagcccccaaccctaccaggctgaattgaagttcaccttcaccagatgcttagaaaggacagcaggacagtctctgccaccaactttcccttgtcttcctgcttctgtttctcactgctgagataaacgctccataagggtcattcataaaggagcagagcacagagaggacacctaactaggcctgggcctggttcactgtggtaggaggaagggctggggataatgaggtcccgagagcattcacgattcccatactggaggatctgagccataggtccatacgctgttcgacaatccctgctcctgtcccctgagagccaggccctgggctttgccgcttcatctcagccctcacaactctgcaaggtgggtgctccagcccccattttgcagttgcacaaattaaggctcagagagggtaggtgacttgccggaggtcacacagcatgcctcacatagcagagggggaaatgaaaccctgtgctgtggcccgggacattcccctgggcctagtccttgtgacctggcccaggggctgttcttttttggttcctgaatatttttagatggtgggaggctcttttactgcttagaaagaagcccccaaaaagagggagttacggccaggagggacagtccggtggacgggtctccttccgggaatctggtagctggggcctgtgcaggtacccgcctatgtggcttggcgagctgggtgactctcatgccctctctgagccctggtttccccacctgtagaaaaagcaaggcctccctccctcatgggtcgtggtgagggtctgccagggcgtgtgagaacaagctccctgatgtgtaaagcggttcttgtctgtctgtctgtctatctctccgtccgtccttccccacatgcacaccatccagttcccagccggcttcttcagaggctcgatgcgccttctctctgctgcccccaccccagtcccctggggatgaagcaccctgagg

SEQ ID NO: 135834 - DNA, 1058 bp, Homo sapiens
gttgtgaattttcaaagctggagctggggaaatggtctaatcagaagccaggtctattagtattacagtttaaagattgcttgaattgtaaaggaaagaggtttagttgactcagttccaccggactggggaggccccaggaaacttatagtcatggtggaaggggaagcaaacacgcttttcttcacatggcagcagcaagaagggcagagcaaaaggaggaaagccccttataaaaccatcagatctcgtgagaactcactcactatcatgagaatggtatgagcgatacgagggtcaccgcctccatgattcaatgacctccttccaggtccctcccacagcacatggggattatgggaactacagttcaagatgagatttgggtggggacacagccagaccatatcaccaggcacaggagtgaggagaaggaagggacatttggagcagaacgcacctgttctttgctttgggcccatagccagatgcccaacatgaaggtcaccttgaatgtctaaaggactccgctgactgcccagaccccagacactctgcagctgtttggggaaagtcaaagactggctcacagatgcagcttgtctcccagggaacctgcaaatgtggttttaggacaccagcgaggggcaccgtgtgagtgcctgtgtgctttcattcattcacacgatcatcgttcattccatcgtcagctggttcctaaacactctctgtgtgtcaggcttggaaccaggagctggaaacatattaagatgaagacacatttcctgcctcccaagacccaggccccatggggagtgtggaagccgaaggacagtttcagggcagtgtggtgggattacagcggagccacgtcaaaaaataagaagggacaaacgaaattaatcataagaatgtattttataggctgggcatagtggcttacacctgtaatcccagcacttcactttgggattgcttgaggccagaagttcgagaccagcctgggcaacatagatcctgtcactgcactccagcctgagcgacagagcaagacctca

SEQ ID NO: 135835 - DNA, 1054 bp, Homo sapiens
acaagcggtcgtgctccccattgaaccccacgtttgaggccccacagtcctcatggaagcacagtaaggcgtgagctgtccgggctcgtcccctagaacccaggcacctgctacctgcctgggaaggagggcagctgtgtttagggtcctctctttgctactctggtctttgtcttaaaaaccaaatctggctgccggctcctcagggccctccaagaaagcaaacccaagctgtcgtccctctagctgagatcctgagggtctgcactgacagacctgtgcttgctaccctcagcttggagacccctgcgcgtccaatgtgcccctccctctggactgtggggccaccatgcagctgtaggcacagtgagtggcacaggtggtgccctgcagacgccatcgtttctagcagattttcacagaagtcctgagggcaaggataggagcctgatttattatcccaaagcgagattcaagctgttccttctccctgaatcagtgacaaatggccgcccatgccagccccacgcaggtgccccgtaattccccggggaaggacgggaggagagtgaaggagctctttggaagcaggagctgtgtttcctctgctcttccttcggggtttgggtttgggcacccctgtagggtgttctgttttctggtctgtgtcctctggctggtgacttatttggctgtagcactgggactgtgattgtcctgcccagaattgagctcatggggaaggcctgttgggggctgggggagctccttgagcaagcagtggctcaggggcaggagtggggagtgggtgctgaggaagcttggggagtgggattggatgggtcgtttgggaggaggggctgctgcccaacgcgggctctgctggggatttctctgcactcagcacttggggcttctctgcttcctgtgcggacatctgcttcgtcccctcggcggtgcagtgggaaactctgcttcccgaagccgggcacgaggaaatgcatgctcaggaaggctctggtgggaggagagggatgcagccgcccctggggag

SEQ ID NO: 135836 - DNA, 1114 bp, Homo sapiens
gggctctcctggaaacctgctctctgctgggactggcatccctgtctcaccagggctgataaatccatcagccacctggagtgtgtccatcccagtggactcagagagaatactgtgattgactagtgatgcctgccatgggcaggggatggaagggtagtggctgctcctagacaggccctggggttgctgtccctgtcacagccgatcctccaacgtgaggccccgtcacactagggagactgccaaggcctcggccacccagctgacccttcatttcccagcagacaagtcggcaggaagtgcagggagggggaagagggccttcagctgctgcgtcacccagtcccccttggcagcctagagaggagagagatctcgcctgaggtgacacagcagattggtggttgcagagaacccccagtgcggccccccattctggccctcccaccccagctctccgagtagggatcctgcctgcagctcccagcttccgagtgtttgctggaggaaggtctgcattttaaacttgttgccttgggcgtgccatgcgggctgttcctcctgggtctcagaccagagcccctgccatccagcccgtggattcagtccccggcctggcccagcgcgtccacgcttctgcctctggccagggtgggacacacgtgcagacaagccgctgtggcccatgtccgcccacccaaaactgcccagcctggcttgtgtgatccggcgactgtgccagacgcgagagcgggggaagctcaggaagccgtttgtgtgctgccctcctgcaacagacctccactggcccagggaaggaaactgctgtgttcagggagaggtaaaaaaaaggaacggtgtttccagtagctgacagagcgttccatgttcacaggaggatctcagagctgtcctggttggggctgctgaggaacccgggagctgtctggggccctcatgggcaccgtcgggcacagagagtgctgacctgcaggcctggagtctggaagcttgggcagacccaagccttgcctcagtttcctcctcgtgaatcagacctgtcgtgtctgcgttcctgtgccatagtcctcattagtcactctgtccacct

SEQ ID NO: 135837 - DNA, 1050 bp, Homo sapiens
atcatttactcaggcgaaagagtattttgtgcctagaggcccagagagggcttctgttcacaccccggtactctggggccttcttggggaggtgagcttcacggggccctcagcactgactcagcagcttggacagtagtggtgcattgagaagcttgcggggaggacggagccctggctgcacacctggcacccgacggccccgtggccggttgctgtgtcctgggagcagcgggcatgtcgtccgactccactgggagagggtgtgctgcatgcctgcatgcctgtgcccacgtgcctggtgcccacgtttgggctcggctggacacgtgctttgttgcaggggctgctttcctgcaagtgcatttgccgtcctgagcctgctcactcatcgaattccacgtggtcgtctgggagtgattccgggtgcttcctggtttgaatttcacgggaccctggaggacatgaactcagaaagtgaggcgttgatggtcgcttttattggtatattagatgcattgaggttttgaaagggaggacttgggattcttctgtgtctttttaatgtcttagagcgtctagaaatagcatttgctcttcagttctctagaggggtctcccagaagaacaaagctgtgtgtggcagagtggttccctttagaatgcggagctctgggggagagcctggcgcttgggctggagccggcccaccaggacacgggctggagccccattcgctcatctgtgatttggggcacagaatttacccggataggaagcagctcaaaatacaagctggttccacccctttcccagtaagaggattttaagtttcttggtcaacatgattttataagcttttagggatagatgaagtagttcaacatttacttaaatatttaatttgctcaatcgtttacatctttaaaaacatgaaaataacatgttcttgtaagttgcccttttttactcagtgtgtgaaatgggtttcttcaaactcttcccctggctttcaagctcagggtctctgcctccccgagccctctccgg

SEQ ID NO: 135838 - DNA, 1195 bp, Homo sapiens
caaaattagcctggtgtggtggtgcacgcctgtaatcccagctacttgggaggctgaggtaggggaatcgcttgaacccaggaggcggaggttgcagtgagccgagatcgcaccactgcacttcagcctgggcgacagaacaagactctgtctcaaaacaaacaaacaaacaaacaaacacacacacacacatggcggctgcttcttgggaggcttaggagcccaggggttgagaatgggacttttggactcagatgggcctggatttgaggtctgcctgtgtgtttattaaaggcgcgacctcgggcatgctacatgactctgtgggcctcagctttcttacccacgaaatggacataacagtatcagccacgtggagttgtgaggcaggaacgaatgagctgccgtgaaggacttggcactgtcctggcactagttggggctcagagattccaggctgactcttacaatgggtgccaccgagaaggagtctgccgcctttccagggcccctggcctgggtttctgagtgtttcctggtggtggtggtagcccgggctagcagctgggcctgggtccggaccagcagatgaaagtgcgggaaatgcagacacaaggctcggagccagcgccgccttcctgctctctggttcgcttttctgccgccgcagagagtgcgctcctttgtttaaaaatagtttctagccgagctggaggcaccgagtcctctttagcatttccgacggtttccctattaatgtcactggaggaaaccaccctgagatgcctttcaagtggaaaaggagagctgtcctaatactgtgggcatatcattaggaaaagcaaattaaatcatgtttaatggtgttagagtctcaatcactttggaaaatggagttggtgaagcagggaaatgagaaattgctgacctcctgtggaaggaggtcagtgaaggagaatctgggagttgtgctcgtggaagtggcgatgggccggggcttagggggctggggattcagccgggagggtggggggaccagggcgggggaccagggtctccaggaggctgcgtcagttctctctcccactgtcctggtctccctcgggagggtgtgggtccagctagccttttctgtccacagggttctctctctgggatctgttcggtcctgtccttgggggcccagcataggtca

SEQ ID NO: 135839 - DNA, 1243 bp, Homo sapiens
ctgcgttgatgaatgtgtcccgcaggctctgtctggccaggggagaacacagcagtaaccttggggtattgatccagcaccccttatctccacacccaggccccgaggctgcatgtgtttgttcatttcctcttcgtatttgttcattaatttgctgagtgcagaagactctgtgctcacccgaggcctttctgccagtcggtctgatgactctgagatgctaatgctgcggtgagttcatttgcactccctgccttaatgctggcagtgagacgtgctagtctttgtagcagcatccactccacactaattacttattaaaatgcagtcgctcctcgctggggtggggagctgcctcaggctcccggcagagcccggcgcaggggctgttggcaaaggccttcagagtttctgcttgaaaacatttcctcttttatctgctagttgttgtcatttcaggacgttattcacccacccactttcagatgaacttgacaaccagatatgctgcacatgggcacagacacacacatgcacgcacacacacagacatacacacatgcacgcacacacacacacacacacggagtcggtaagcccatcggatgctgacccgccgttttataactggggatgggagaggtttttctctgctttcctttccaggcgggagccatgcccgtcattaacttcacactggacaagggtggagggtggttcaattttggtagccgagtccctacaggtctgatgagctgcgtgcctggaggtcaggctcagcccactgtgcttcatgtgaggtggctgagcctggcgcgccaggccaggaagcctatgggtctttgcctcaaccctgctcacaggatcctaggaggctgtgatttcaagacctgagttcaagctctgggagcggccttggcccatgagtggatcccttgatctccatgccagtggtgtgaggtagggattcttgctcctgtgccaggaaatgtggtgccaggttgggaacttgtacctgcttgagggtcattactgttggctttttatagaaggctgaggggtgaaggaatagaaaccagagtgataaacgcagaggggaggatctgggggccgcttggagtggggccaactccagacagaaaggcaagggtgcagggggtgagttggggtgctgggtgtgggtgtgtggccaagacctcaagagcagtgtttcagtgaatgccaggccccacgggccacctag

SEQ ID NO: 135840 - DNA, 2135 bp, Homo sapiens
gtctccctctcccagggatggccccatgtggaggctggtttgaccagtgttttccctgctcatggccctcacttgctgcttaagggcggtctccgcccactggcccttgggttttttcttctgccttccctttgggacaggtgtagagggtttccttaacccaggaggagcattgggaggggacccaccatgagtcagcctggttccctctgctcctggcccctgccacctggggagacctgggcagcaggcagatggacccctggaaaccctccaggttttggagccctgggaagcctgccaggtggtccactgcacctgccttctggtgcctcctctcatccaggctcggtggagccaggcgggccctggaggaggcaggcgggtgagagcaaagcttccgtcagacctggacgcgagttggactctgtagatacttggtctcgttgagcctttgtttctgcagggatcaaatgaagcttgagactgtccccttggaggtgttgctgtaaaggactcggtgaaaaaatgaacggcaggtcctagtcatttttattagcattttcttcctcttcactcaccccgcaagttccagtaggaactaaaggatccagaaggtttattccggaagtgtttctcttctggctgctttcctggtatttttttcaaagggttgcattaaagagattaggttttggctcaaataagttgtgtccggcttcctgtgctgcccggggtgggcgtgctggggccgagttatggccgagcgtgaagggtgagtccgcagcccttgctgatgggagccgttggccctgctccccgccacggcctgtagatcctttcctgttttcctctgtgccctgtgtctgggcggtttgtccagttgcccagctgggaaggagtgtggagaagcccatgggtcgccagctctggcggcttcttccaggggctggtttgccccagcttggaatccggtcgggcatttggagggaggattctggtgaggctgcggggtttctgtggcttgcttctgagattctggtccctggactctgcagatcatgatagttccgaccgtagggactctgatctcattgcgagctgggactgagcacaggtctgcgggagggaaggaaggcaccccggcagcgcactgactgtttaccatgtgccgtggtgtcgcctgtgttatccccacctaagcaactggtgcacggtaacatggctgtgagtttcttgggtcctcaaaccctcgctgtcctccctccccaggtgcctggtcatggcattgtcattgggatccgtccagctccttcgcggggccctgggcaggtggctttccctgagcctgatgtcctctcctgtgacgtgaggacagtggtcccgcttcccctgttgatcagagcctcctgggcaccgggtcacaggcagctctttgttagggctggagcggggtgagcagagcgtgatgaggatgctgttgctctctccctttgtggggatagttgccattgacagtgtgcacttgcaccctaggtcaggggacaaagggacagactcgttcaggaggtgagggctgcacttctgggcagaggacagggaaggcagctgggcagaagggagggaagaaaggaggggagaagggaagagggaaggacgtgtttctcctgagcagcacagggtgctccctgcctgcaggaggggggccccctgggcgcaggtgcttctggttgtcagagggaaagctctgtcctccctggtccctgccccttgctccccctcgctgctgtggagctgcttcagcccctcctgctgctgggctctctggctgccccctgcctggaaggttctccccagagctgctggtgccttcccgctctcctgcaggcccttactcagctctggcccagcagggcctgccctgatggcaccttgccctgtgcggggacaggtttccgagtgaagtctgatgctgcttctctggtgtcccagcccaggccaccctgcctggccccaggaacccgcggtgctggctgggcagtgcacttcactccagcctcactcggggcggaatgaaccttcccagaggaaatcgctaggccgcttctcttgctcgagttaaagagcagcgcgca

SEQ ID NO: 135841 - DNA, 1083 bp, Homo sapiens
ttttggttgtcctttatatattagggaaatgcaagtaaggtctatagataagataaccgtgtggtgtccatgttaatttcctggttttgctgtaggtactgtgattatggaagaggatgtccttgttcttaggaattacacactcaggtatttagggataaaggagtgtcattactgtagttaatctcgagtgttcagaaacacacacacacacacacacacacacacacacacacgcacgtggacagagagggactctaggataaaacagatgagtctgttgtctatgaacagcagccgacccctgccaggatgggaggagtggcctgaggcagaaggggctggggtgagcactgcctgctgtgaggcagggtgaggggtcagcaggggcgtatgtcctggctgggggaccctccgctcccagggcgttctcagtgctgcttggtttacgctcttaggctctgattctgacgtgcactatgtctaagtctgtccatttgtctaaatttccagtgagcagggacaggctctctgaactgctcttggagctgggcagtttgtccataggggacggttattgatgaggatgacaatcctgggctcttattgggctgtgtgtgccacaccctcccctcgcgaatccccgtgctgagctggattggggggctgatggctcccacaccccagtgcccactctggtcatcagggcacatgattaatcccgtgaggcaggtggcggtagaaaaccaggcctggcataaccactcaccctggtctccctgctggagtcagcagacaggattccaacctggggcccgagtgattccagagcgtgccccccgggccacctcacctgctgccttataagtttccttaccaagctgtttctccacgaggactgggcagatggccgttccgccccagccaagccttccgcccctgtggcacgtcaggcgcagtgagggccgagagctcactggttggcagtgggcagagaggagatgacccatgcattgatttgggaattctggcttttgtgctccctccacccttccactgtagttggcacctgccactctctgg

SEQ ID NO: 135842 - DNA, 1046 bp, Homo sapiens
gtgagctgtgccattgctggaagaccttctctccttctagcctggttcttcctgtaggagctggtataggggctccctccccttggcagcctccttgggtttcaccctctccccaccctgtcctccacgcgctttgaacctcgatctcactcctccactgttccaggtttctctctggcctcgtgtaatgaaactctttgtttcatcacacgatacccttgctgctccttctgcaaaactcagcagctggacagctggagagtgtgaaggatgatcctaatgacagacccagtgtgtctggagcacctttgtgtggctgccccccttccaggtctgagcccctccaaggcagggccacggctgggcttcctcctctctgggtccctcagaaccttgtgccttcattcgagaaataataaataaataaatatataataaataaataataataaaataaataaatataataataataaaaccctgctgtgtgccacgcaggctttgtgcctccaaggggagggaggagaacaggccggggctgtccctgctctcatgaggcttctggtcacgcaaggaccccagtggatgttgatgaggtgcttggtgactgaaaagcgacatggaagtgcccgaagggcccctggtgccagcagaaggggctgggctggtgtagccgaggtccacaacacagggctgccgggagcagaggagggaatgctggttgcaaagaagacaagggcgtcttttctttttttgggggggatagattttattgtctaaaaaaatttgaaaatatctcagtcattggaaaagttatgagtacaacacaggtaactttttcttgaaccatttgagggtaagtatggggcatcagtgcgtttactgcaaacaagggcattctcctctgtaaccacagcactgctgtctccatccagccaacagcatcaatccgtctccatccagccaacagcagcaatccgtgacccgtccacttctccacaattgtcccagcaaatgcccttcatagcatagagcagcctcaggac

SEQ ID NO: 135843 - DNA, 1242 bp, Homo sapiens
gaccctgacagcccacggcgggtacactgagcagctgcattggtgctgtcacttttttaaggctttctgtccagacttcaacactggtttcttttcagagtttcgaaggattaatgacttcctcagcgcccttgctggcgggctgagggtgacagtcacgtccgtttcttctgtattagaaggctgcggtgattcaattagattgtcccactgctgagacctgtagggcagcttctaacatgcttttttcaaggggagaggagtagtgacaagtcgtgtgtcggaattggatttgagaacactctgaatgacccctggaggccgagggggcaggcttcgggcgtgaactgaactccagacccctctttgtgttgggcagtgtcatcttgcttacaaactgtaagacacatttttttgtgtgtttgtttttgttgttgttcttttgcagcactcacgcctctgacagtcttttgggaaagagtaacacccacatacagaatttgtcacatccagagtagcactgttccttaatactggcataatgcttccaggaagtttttcttttttatatttaaaatgttacttttctgtatgatgtgcatgcaagtttaccgtaacttttcttaaactttttagtgccgtttctagtatattcctgtaaatgtcagttactgaaaatgagtccaatgtaagtagtttagcttgtttattgcaatgctggcctcaacacaacagaataaaaatggtagaaagtactctttgatgtttctggtaatcatggacccttctcctggggcatttgttttgttttcataataaaaagcaaaaaaaaaaaaaaaaaaaaagactgttttttttttttgcattttcctgtgctttctgtgggggctcccagcctctctcctggagcctggaaatgtctggaagcacctggtctggaacagccttcactggtccacagcaagggtgctgagctccccacacttgacatcctgtaactcttggcaaaaacacccagagcatccaaaaggggccccaaaaaaccatttaaaggcaggatgcagtggctcgtgcctgtgatcacagcactttgggaggctgaggcaggaggatggcctgaggccaggagtttgaggctgcagtaagccatgattgcatcactgcactccagcctggacaacatctcttaaaaaataataataatcaaaccattaagtagctcttgtcctgagccctggcagg

SEQ ID NO: 135844 - DNA, 1100 bp, Homo sapiens
ggctgggcctaagcgaagggtcatcgcagccccagcccggagcgtggagcccttggggggtggtcgggtgggatgtgcgttctccgctcgtggtgatgtcaggagctcctcggagggaacagagcggctgtgtatgcagcctgcaggtttccatacactgaagcttttacctcaactttaaaaaaaaaaaaagaagaaaagatttaaaaaaaaaaaaaaaggagactttttttgtaaggttcggcaattttctacggaagtccagcccgctgtgagtccccgcctggctagcgctgcccctgctgctgctgccgcgccacccttgggaaccacttcccgagcttatgtgtatataaatagttatttattaacatcattggtcatttttaaaaaaaagaaaataagaaaaaaccgcagaagaaatgcattcacacagtcgcagagatgcaggccttgccagtggtgtgccgggcgcgggtcctgtctggcggcggcctgtcgtctccaggtgctaactcctgccaccgcgcggtgctcacccacgtctgttcgcgcgctcgcccctgggtttgttgggttttttggtttttttctttgtggtttttttttttttttttttttgtatgaaacttggaggcttacaggtatagacagctttcagctacagcacattctaattttttattttgtttagttcttttgtattcacttctggtctctttaagactgttttaaaagaaatcaatttagggaaccccagttatataatataaactttgtaatctgagagaaaaaatgtatagtaaatctaagtcttgatttttaactttctattgtaaaaaataataatatacagagtttaatagaaggtgatgttttggttttgttttcccagaggctgccatatggtctttgagtacggggatgtcccaaactggcccaccaatgagcatggcggctccggccaggaatgccagagttagcctcccaggcttgcgggtggacatgcctgctccctgccagcctccagtggcctggccaggccctcccgagcctgtctgccctccccaggggtggaggagtctctgggccccaggagg

SEQ ID NO: 135845 - DNA, 1018 bp, Homo sapiens
cagtgtcgagacagggcccatgaccctgcccgctgaaggggtctgtctcctgtagtcactctttggacgccccaggcagagtaagcgctccagaaacgccagcagctggtgttcctgtcgctgctggtggccatgtgactggtggatgtttttgatgggcagcctttctcgcatccatcatttcctgttagtagtctgcattcatttttttcctgtctcaagtatattcagatagtcttgttgacctgattaatttcaataaatacttattaaacgactgggtcaggaagtgggtgggtcgtggcacccagtgtgatggtgtcacgctggcatggacgacatgccgccaagcgggtcaagaagcgggtgtgcgagcgcatctccctgcccatgtctccacagagaagcccggctcagcaccctcagggggcccgtccaggctcagcagcagcagctcctccgagtctgggagcagcagctccagcgggtccagctctgacagcagtgactcagaatgaactggcttcggacagaacaggacagatggatgtcgcacacgccgagactctgccgtacccctctgtggttcatattactacttctgttccatggtgtgcaggtctgcttcttaattcagtgttatgatatcttccagtttttgctttcataggtcagagatctatcttgtgtgtgcgttagacttgatgagaaggtgtgaactctgcagaaagtctcttcttcatcactgaattcagtcacttggagatgacaacttcaaatgctaacccgatgaccccagaaaaccgtgtgagattcgtaccgaagaaccttgtggaatccctttgcttaggcccaacctggtcgatagctcgagaaagaattttttccaaggaaatgtctcggatatgggtactgtatttgaaagctgttagctttgtcaacacgcattgtccttgtcatttgggccccgagctctgaccctcgtgtctgacgcggccacctctttctggaggggctg

SEQ ID NO: 135846 - DNA, 1025 bp, Homo sapiens
gcaccggcccaggcttccctgaagtcagtggcaggaacgagtcactgctggggtctgcaggtctggcagagtaggagggagggcagacccgaggcagcccttgtggcagcccccataggctgtcaagtgagtgcagggctcacttgaacttgcatgtggcctctcgggtgtgcatgggcctcacttgctccttttcctggatggaatgtctgtgtggtcatggtgcgtctgacccacggtaagtcaccgggtcaacttggagggagcgactcaggagtgtcaggcagtggagaccgggcctcctgctcgggcagatggagagcagcggccctggtgaggcaggtccatgaatcagaggctctgccctgcacatgagggacgttggccaaaccgcatcctgtccgtgcacctgtttgcgccataggaatggcctctgtcaccttaggatccaggctttgctcaccctgagggctcagcagatgtgggtggtggtgggtctgtctcatcccagtcatttctgccactcgaagccctggtgacagctttgcatctgtcagctcccagactcatgaaagctgggcagctggcatggatgccagtgtgcagggctggggccttggccacctggatgcagccctggctcctgccccatcggtctgctctgcagtctgagtgcccatttgttccccgacagcagcaagcgggaagaaacaggcagccaagtcgaaagaggagctagctcaggaaaagaagaaggagctggaaaagcgtctgcaggatgtcagcgggcagctgagcagcagcaagaagcccgcccggaaaggtaccgctggcggccgctgtgccacccctctttaggggggtggggggtgtcagcagtaggggtttgagcatcgagcaggcccacgtctgagtgtggcttacctcctgatgagctccatgttcttagacgagctcttgagctcctgaaacctccatttcctggtctgtcactgggggtcataccccaaccctgcagggaggtg

SEQ ID NO: 135847 - DNA, 1083 bp, Homo sapiens
ccgctgccaggctgtgcttcctcccccttctctgctttcctcgtttgcagtatgggacaaatgtcacccactctgagctgtcttgaggtcagattgagaaagatgtgaattgtttccccagacctctggcagccagccagatgcatgatttctgggaccccagattgggagaaaatagagcagggctgtcgagtcaggaggggaacagcatgaatcagggctgcaaggacagcgatggccctgcagtccccagagttgggctggacatttgattttgaagtggcaaggacacacagcagggaagacggctgtgaggtggcagctcctccacccgccctctgtcttccttgcacagaccacccagaggcagggacaggccgtggactcacatgggcagtgcctctcaaggggcctctcccatggaggtggctgcagtggggagggcgaggcgcttggcacaatgccagctgcagggaggccctggattaatgctggttgctggcagtggattgttttaaccccggagtcctgcgtgttatcaaatggcttcccagaaatcactgatgaaaatctcctttgtgtgggcatttaaacttctagagagtccttccttatctgaacaatggtaataataaaaatgttagctgcccacctaatgtagatgacgggttgatgggtgcagcaaactaccgtggcacatgtatacctatgtaacaaacctgcacattctgcacatgtatccccgaacttaaagtataatacattttttttaaaaagttagctgccctcaccgagtccctgttgtgccacccgcgcagtgctgagcctgtggccaggcagctcttccccactgcaggcgaagaagccgaggcggagagggctcatgactcactgggggtcacgggagtgaggggcagagcagggcccaggtgctcctggttcacctcctcacccagctgaggcagctccgacatcgccccaagccccctccaatcccagggcgccacgcagccccagtggtgtgggccgtgcccagcacctgctcagccgcccgctcttttccagctgaaggccgtgcacgag

SEQ ID NO: 135848 - DNA, 1908 bp, Homo sapiens
gccagtggatgccgaggccctggagctgcacgactaccacgacatcatcaagcacccgatggacctcagcaccgtgaaagtacgtggccgcgcggcaggccctgctctgcccatgtcctgcggctctgccgtgggtgctgatgtcttgtgccggctgagtgggggctgtcggggagcagggtctcgcttgccggagaagcgcaccctccaggctggcccccgcagcgccggctgtggctggcaaggctcagcgaggaaggcgtgctctgcctgtgggtcccggagtctgtggctctgttgttgtttattcccatcgaacccgtttagtgatttcattgatttcattcctacctcccattctgtatcatcaggtcagggggtccctagagctgggccactctcacagttggcaaagttttaaagctgcactttgcttccctcaagccccggatacaggcgcctcacagcagacaggagtgaggcggccagtggggatggcctggcttctgtcccctaagtgcctccaagccccaccccctcacaagacggaagcgggacctgggtgggtggcagagctgagaccgagagcctggcctcccccatgccagtcttctcaaggcggcagcctctgcctgggctcttgtgtgcctcacagcaggtcagagtgagtctggtccctatggggggtggtggtgggtgcggcatttgagctgcaccgccccaagccagggtgagctccaccgggtcttccctgagcacctttccagactcctggctggcacctgccctccctctgggagagctccaagccagctcccagggacgtgcaggcagttggcagaggtgtgacctgcctcctccgccaactgccgtgcggccctgggaagagctgctggcagccctgttgggcagttgttttcatcctgggaagccagtcgcagtcattctgcctacctgaggcaggatctgctgatgaaacccttttcttccttgattgactggatctcgggcaggacagacctggctggcccaggccccagagcccggtgcacagtcaggtgaaagtgacgagcggggccgcctggctccactgccgtgggtggggaagctgagggccagagccacgcagcccagaagctgccaggagcctcggctgcagcctccagggctggggtttgtgtgtctctaccatagcacagttaacaggaatttctggaacatcatggggggttccagtgtttgggctggactcaagctcagcttaattccattttggtcaaagggtctgatttgcccttgaaaccataataaagaagctctagaaaaacaattcactttaaagtcatgatctgctttgttcggagcttcccacctctatctgtcctggcatggcatggggagaagccaggtgcagtggcagcacttgctgcccgcgactgtggcccggacgctgcggaaaaggggcagtgaatcagggagagaggcctcaggacctctagattatacagatggagcttttggggatggtttatcccggcacatgctaaaacggaaaactagcttttcccccaacatcagaggcttccaggtcccactgtgcccccgggttctttctgccagcccttccttctggatgggtctcatgtctgagtgcatagggtacgggccctgagttgggggcgccctctgcgggttaggacccggcccctccatctcactggcacctggacaaatgcagcctggaccccacagagcggtcggggtagatttgccttgcccttgcgtgtgtcgtccctcgaggtccccgacaaggtgcctctccttgaagccatcccaggatgggaaactcactccctcgggcacagcgtgacctctctttgccccaactagtgtgttcccagtggccac

SEQ ID NO: 135849 - DNA, 1050 bp, Homo sapiens
agcttgttacttagggaaccgagttcagtaccagctttccatgactccagggtggcccttgactgccaggccatgggactgccttggcttcctcgttccgcctcctatggtctgtggtggggggcctccacttcatgcagggagccctcagccaagatgagccagaccaaccctgcccccaagatgcaggatggggggcatctcagcatggagggttcttctggccggcggtcttggcagcacagagctggtacccgtgttctggctggaggggtggcactggaagcttctggaaatactagtggagcctggtgtgttgaacatcccttccttgtcttgaaggtacacagcaagtggcggccgtgtcctctgtctccccagcgaccccctttcagagcgtgccccccaccgtctcccagacgcccgtcatcgctgccacccctgtaccaaccatcactgcaaacgtcacgtcggtcccagtccccccagctgccgccccacctcctcctgccacacccatcgtccccgtggtccctcctacgccgcctgtcgtcaaggtgagcaccctgagtccggatgggtggggcacctgagcccggccagggttcctgaggtcagggcaggagcagcaggcggggggcccccacctttccctgagtgctggctcttgggagtgtttctctctgcgccctgggagctcaggccgttgttactgacacagatgaggagacctaggcctggggagctgaaggtcacacagctggtaagggagggcctggctgaacttgaaccccagcttctctggccagaagccctggccaaaggcttggtcaaggtggggaagttgtgggagagaagccagggtgggaggggtcccggtcctcccctgctcacactcaggagagtggtgccagctgtacctacctgggtgcgttgtgaggtgccagcacccaagctggccccgcctgtgggctccacatgggagcatggggacctgcctgtcctgctccccacttggctgggagcttttctcagtgggccctgttggtc

SEQ ID NO: 135850 - DNA, 1854 bp, Homo sapiens
cgtcccggactcggggcgtcgctgcggccggggcgcgcagcccggagttggcgcggcccgcgcgccccgcgccagcccggcctccgcgcgccctccctcacggaagggatttttttccccctttcctccgcccgccatctttcgaagggggaacccagggaggacgcggagggggaaggtgcgcgcggcggccccggcctgcggccgtgcgctccgcggggccactttccccgcgcctgttccgccggcctcgctcccgagccgttgctggggcccgcgcctggggaccgtcgccgcgcgccgcggccggggcggggggcaaggccgggctcggccctgggctctgcgcggcctcctcccagagttacgggcccagagctgactttgagcccccctgagttgccggattattgcacccaaaccagggggagacccagttcccgttttgaaatcagcctgaaaatcgcttaatccgggcgagggcgagttggagcgggagggacgggggtgcttcccctccttcccacttttggggggcgccggagtgacaacgtgatacaagcccatccggggagaaatgcgcaccccgaaccgtgtacacccacatggccctggtgggctctctgtgaataaagctggggcgtgcgggaagtcttattccaccggttgctcgttcgggggcagggccgggatgggggcttcgcgcggcctcctttccctggagggcgagaactcggcccgccgagacccaccgggggcagggacccggcgtccatcgtgtgggttcctccgttcgacccaatccttgagtggttgcgatctttaattttggttgaaagctttctgctcagaaatagatactgggatttctcccccttacattaaacttggtcattgtctgcaaaagttaaccaggaggggagactgtagtgcattggtgggcagagtaattgggctggaactgcaagaggcagcttcgtgtgtcccgtcctcccccgccctaccctgtgagaaggaacagaagaggaaaagagttttctttttaccctgctcttttgtaggcttttccccttactcttttctttaaaatggagggttttttttttttcctgggtccatgtagtatgcctggggagatcctggaatctatgcaaagttgtatggcatttttctggggaaagtagtttgttactggcttccaacggggtctaaggaaggtctgaacccctgcaaggggctggcctcgggggttagggagccctccctccgggttcttccctggcagccctgatgcagcctctcatttgcaaataaaggtctgtgtttgccgttttctctgttgaggccttgatgggtgctggtggttactgatcatgaaagataaggcacacgctgtaacaggacgggctgcaggcgagcgaggggcatttctttctgaccttccgggtagcctcagaggcccggtgcctcagcagggcaccgggtgcctggaaagactgtgggagcagctccagcctgagccctgccgttgggacatccggggaggagggatttcaaaagctttctccgagtgggcagtcactccatttttatttttgttttgtttttagaaagtagagtaattactttcctttgacaacagctcgcgcctgcttcggaagtgagtgagctttgaatgaaggacgggacttgcaaacagtgcctgccctacactccgaagtagtcatacccagaaagtgaaagtgggggtgtgcagagcgaagcagccaggcctgctgcagccggtgctaccttcctctaccctcttcctccaggctctggagatgccagccgcgggagccctgtgcaccaggc

SEQ ID NO: 135851 - DNA, 1076 bp, Homo sapiens
atgtggaaattccagcaggcagagctgcctctggcttgctctcatctctgtgttttgtggctcctcactgagtgcgcgagccctgtgagctgttagcatgctggaaggcagcctcgggccagcagcctgtgcatggaggcactggagcccccccatgaggcgtagaccactgggtgcccgtgcttgtgttttcaaacgtggctgtgaacgtgattgcgtcacttggggtgcattttaggatttggatgtgatcccaaatttctacaccctgaagctcagtcttctgtcatttggcgtgttagctttctgtcaggaaaccttttgctgttctttttttaatgtgtccagggctctttgaagaaaactgcattttgtttgcacaaactgctgcattcttacagacttctggataacaaaataagaagcacgcttgagggtggggtctttcattatgatgacaaaaggggagagcgcaggggtgtcagcggagcagctggaaagtattagcaaggacttaggggaattaatagggtcctcaatttggaatggtttgtttgctacagggctcaatatggtagtcaaatgtttttcttttcatcctttttcttggaaatcaattttttaaaatatagtttgtttcttggctccctgttctgcatctcgctcaacagactgcctctgtcaccgggtccctccacccttgtctcctgtgcggccagcgtcagagccatggcgacggaggagaagaagcccgagaccgaggccgccagagcacagccaaccccttcgtcatccgccactcagagcaaggtgcgtgcccaggggccccttggacaccttccgggggcaaatacgcttagagagtctcggaaacatctcaagctcataagcctagtcttccctactcagttaaatgtcactgctaatttttatttactgaccgcatatctggcgaatgcttgttgcctgctgtgtcagggatcccaaatctgtcacctggaggagagagccttttatcaaaaatacagattcttggttctgattgtaagagtctctgtaggaaccagaaaacatct

SEQ ID NO: 135852 - DNA, 2017 bp, Homo sapiens
atcacgaggtcaggagttcgagagcagcctggccaatatggtgaaaccctgtctctattaaaaatacaaaaaaagattagccgggcatggtggcacatgcctgtagtcccagctactcaggaggttgaggcaggagaatcgcttgaacctgggaggcagaagttgcagtgagctgagatcatgccactgcactccagcctgggcgacagagccagacaccgtctcagaaaaacaaaagaagaagaaagaaaagaaattgcccgtggaccctgggagggaggggaaggggactggtcctctcaggcatgtggccgtgctgaatgggttctgagccatgtggttcatgctgatcacctgggactcatgtgggaaaagctcagactttggactctggatgactagacaattgtgtcctgctcttagcctcagatccttttgttttctttcagctgctgataaacttattaaaatttggggcgcgtatgatgggaaatttgagaaaaccatatctggtcacaagctggtaggtttcagccctgtgcggtgaagttgactgttgaacagggtggctctagtgatcaaggggtcagggctgcttcgagagctgtgggttcaggttttaagttttccccgttttttaatttttttatagttatttgcatcttgaacttttaacccaaataacatttgacttccatggaggagtgtctgtgaggctggcagagctgcagaaagcctgctgtttttctcctgggccgtgtgtcttttgtaaggttaacactagtgagaagatttcctgagggcaatggggatgtttgggattttgaccttttgccgatggtcctattttgtcctgtcaagttactgaccctgttttttctccccaagggaatatccgatgtagcctggtcgtcagattctaaccttcttgtttctgcctcagatgacaaaaccttgaagatatgggacgtgagctcggtaagtgacactcagtgcttctctccaggggagaccggctgcagggcacggggcaggtgcgggggactgagttgactgctcagtaagcaacactcagcgctcctctccagggaagactggctgcaggggcatggggcgggggtgggtgggggaggccgagttgacttcggggaacagcaagtcactggcggggcatcaggcatgctttgggatgtcagacattgatgaatgtgacctgactcttacgtttggggaaataagcactggaataatcctaataatactctgttatagggcaagtgtctgaaaaccctgaagggacacagtaattatgtcttttgctgcaacttcaatccccagtccaaccttattgtctcaggatccgtaagtgtggctggggtgtcttccctgggggaggtggtgtcggatgtgggaaggctgttgaatttgcttgtagccactgtggagaaggcaggtgggccctgagtcctttctgtgctgtttgtggggaggatgggctgatagcaggtcttaggttctggggaggtttgtcccctctccttcctgtaaaatcactgtcatctcttttgtgttcagtttgacgaaagcgtgaggatatgggatgtgaaaacagggaagtgcctcaagactttgccagctcactcggatccagtctcggccgtaagtccctctgacacggatggggtggtgtccagcactacgtttctctgacatcggatgtggccagctgtctccctgaggggcgtaagcctggccatggcctgtgcctagctgattcctgctgtcatgccacagtctagagcaatcaggttggaggctgggacttgagaaatgagtcctgtgtgcagtggagggatggcgagggggtggtgaggtgtcagtggggtgccctgtgatgagcaccaaggggccgtttgtgcagacttgggggcagtggccacaggcgttcaggaggtagtgtaccctgaactgatgcacgggacaggaagggcggccaggctgggaagggcactgggag

SEQ ID NO: 135853 - DNA, 1059 bp, Homo sapiens
tcgtgcttggggaatgatttgtccacgtgtgacccgagcctgttccccgctgctggcatctgtgcagtagaattgtgggtgctaacacagtgggctctgcttccagaatgcgtctgtattggcagaaatcacagaaaccctgaaattggaacaatgtaaatgcctggcttgtaccttctgggaatagtccagaagactgcttacaatactcttaaatttttgttttgaaagaagccctctcattgcttgcatgtgtttgcatgagcgtgggcagagcctgcgagaagcactgggctgctgctgcccctctccttggccagggagagtggagagagcaacaggcttcccgctctgtgttgggggtcaactgtggcttgtgtaggagagatccagaggtaccccacacatggtctgcacgtgtgtagcatgtgtggactgttgatgtttgtatggacagtgtttagtctttgtccctagaatataagagaatgactgttaaacaggtgaagcataacttttaaaaaaagatagggaaaagcgtgctagtcctaaaatttatatctgactcccagcagcccgcgtgagatcataacttgtctgcttacgcttttttgttctctttgcttcgaagtcgcatctgggacaccgcctcaggccagtgcctgaagacgctcatcggtgagtgtggctctgtgtgggggctgggtctgtggggagggcctcccctgctgggttcactgcccctgttcttcaccagctcctcctccctcctctgccctgggtccgcccctgcaggaggaaccttcctccgtgtccgaccgttccgccagctccccctgaccgcccgctggctctgttgctccttctggtgcagttttcctgccatggcctttctcttgggccagcctggggctcctccacctgtgctgtcggcctcactccggctgctcactggagtcctctgggcagccccattgcctcctggcttcgggcccctgctgtcgtgccagcctcttggatcattccttgagtgaccggctgagtgcctgcccatctgct

SEQ ID NO: 135854 - DNA, 1983 bp, Homo sapiens
gaaaactctgacctgtacatcgacagcttctgggaaccttgactctttttcagctgtgtgagaagcagcggctctgctctgccctcagggctgcagagtccagctgataggcctggggcattagctgtggatgtgacaacaaacagatgggttctgtgggtgcagatgccccttgcgtcgataaattcttaaaggagaatttccgaggtgattccccagccctctttgctgctggtggagttgtccctctgttgagttgggcattcgccagccttatccatcccctgtgaggcaggtgattcctgagagtgcccatggcctggtgccccaggaggcctgtattcgtaaagtcctggtgtcaaggggcccccgggcctatgggcttgaggtgtcaagaacctgctcacggctggtgtgcgtggctaggccacccttcggggcggcgaggggtggtggtgctggcactgatggtggtggccgacctcactcagatgtcgcacgtgggggatggggagcgggtcccacctcctgtccctgcctggctgtcagcgcccgccgtgtgtcacctgtccgtttttattgcagatgacgacaacccccccgtgtcttttgtgaagttctccccgaacggcaaatacatcctggccgccacgctggacaagtgagtactgcgtgggactgtgggggcgggcatgtggcctccccagccagagacacctgcgtgccagcgtgagcctttggagagcgtgttgtgggcttggcacgggatccaggctcctggtggagcttcggcttctgggcagtggcctgttaggtcggagggcaggcccccgtccatcccttcccgaggctgaacctcaggtccgactataggaggatttagggtccgttttctggttgagcaactgtggccagggcaggcctagccatcccgcatgaaggagtcggcggtccgggggcctccaaggccctttctggttctgacctctgagcatcttgattttacctctcacaaagccactgccctcctgggctgttctctaagctccagctttcccatgcgtgcaccctcagccctgtgggtccgagcctgggccctgatcctctgagggctgtgtggttgggtggtaaaacctgttctggatgtttccagaaccaagaggacttcctcacccttttgaggatgacccgagtcagggacgataacacccatcagcttcctgttaaagtctctcttggaactacaaatacttgcggctgtcacactgtgctctcagacgccaagtcactggactttgagcctgaggggctccttaccctgatggggaagggggttccagccccgctggcttttgcacctggcgctgatggtggctgtgacgtagtggctgcagagttgggtgtggggacagaaggatgcctccagacatgccgcctcacccctctctctgtcttgcagcactctgaagctctgggactacagcaaggggaaggtgagcccccgcaggcttgggcccccatggtgcaccatccctgggtcatggcctctggtggggacagagctggccccggtgatgacaaaggagaggagctcagagagccatctccgctgggtttggtgcgaattcctgaaagacctgggtatttgtagggtggcagtctgcaagttaaatcttcgattgtgtgggtttggtacttgtacttttcagaaataagtgaagtgagtagtgaaacgccttgcttagaacgtagaattacacaaaatcaaggggaaccatgactctgtgaccagcctgtcccctcctgtttcagtgcctgaagacgtacactggccacaagaatgagaaatactgcatatttgccaatttctctgttactggtgggaaggtgagtctcataaccttgaagcgtctcacctgttcccagcttactctcccgagaggtcacacctgttacaggttgctttatactcagagacacttt

SEQ ID NO: 135855 - DNA, 1822 bp, Homo sapiens
gggtccgaggagaagagggacattgtcgataaaggactgaggactgtgaggggtctgactgcagtccttgtgcgcgccagcctctgagccagtcctgctgccgcgctcctccttgtgggcgccgagctgctgttggtgggggcgtgtggggctcctggtctgcaggcagggctggcactccctgtggcctcctgcccctgtcccccaaccggctgtgtcgccctggtaccggctgctgtcccctcgctcccctcccctgggctccctgtgtcgaaggtgggcagtgggtgcttgtcctgtgacctcccaggtggcgggcaggcgctacccgcgtttctggagaaaggtggagctcagtctgggatggcgtccccgacccaggcgcagggatggctctggttctgactgtgtctttgttttcagatgtcgtgatctcaacagcttgtcacccaacagaaaacatcatcgcctctgctgcgctagaaaatgacaaaacaattaaactgtggaagagtgactgctaagtccctttgctcctgcccgcgagagactgtcgggaagttgacccggattggcaagaaacagggtgtcttggaggtggtcccccagatctgcgcctgggggtcaggacagggcctgatttgagcctcctctctgaagatgatttggccgagcggaaggtgtggaccaccggaaagttcttaaaagttgctggtgacatttcttgccaattctaacactgtctagggaagagttcctagtctattgtgttcaaacagagtcaacaaaagtttttaattttttattacagaagggtgaagttcaatttaacatgcgttgtgttttttcagtaaacgttctgtatctttttgatattccatgacccagtgcacgctgtggcctgtcaccgccaccgtggccccgccagctggcctcccctttggcccacgccggccgcccccattctctgctgcgtagatgccctggcccagggccctgactcctccattcccgccagtagctgttcctagtgtattttcgtctttctggaaaacagcattgagtggttgttttctgtgtaaagagccgtttgtgtcttgggagtttgtggcccacatgccgatagcacggtcatcgcacatgactctcccgtttgtctcagtgtccctgcaacaagcagcaccgcagactgtaataaaaggtggggttttgtgaatggttgtggcaagtgcgtccttgtgaagctcgtctccatgtggctttcttggagaaaggctcccctggggcaagagggtggaaggtttctttggacaggaggtgctgaggctggctgcacctgctctctgaagacgccttcctctctaggttcattgttcagtgttgctgggggcggggaacgggggtggggaggttcttagttgcgaaggagccaagctcctgatggacttgcgttgggatgtgggggacacctgtggcatggtaaggctccctgagtcccttactccaggtcagatgccagtgggactcatgcgccctatgagggctgcagggccagtgctgcccctcggactcctcgaggggttgggtgctaagcgcgagcctcgccgtccctgctggagccctcgcctgcctgcccctctgcctgtgctcctggcagtgtggcttcccggtgctcacctgcacagcagttaacagcagaggccgagcgggagcctctggggagcgaggctgaaacctgaacctgcccatggagacagttgtggtgagggttgccacacacagtgagggcggagcagggtggctgagggcacaggtgcctggg

SEQ ID NO: 135856 - DNA, 1050 bp, Homo sapiens
gccccggagcccagccagctctgcctctctcagggcctggagtcctgggggagctcagccagctctgcctttctcagggcctggagtcctggatgaatcctgcaggtttttggttgcaccggcccagggaggaagcggggggtttgtcaggtgggctctcctggaggtcctcgagtggcaggggtgaggaggggattatctgaggcatctggagatgtatatcctgtggtttcccctgcccctctgtttccgatgaggtgtacggatgagtgacctgcactaagaagtgagttgccacagtgaaaatgggttggtttttgtcttcgacgctcagggtctgggcgcctcgcatttgcagtctgttgtgacagacacggggagctccgcgtgccagcctgtggctgccctgctgtgggggtcctggggccggcgaggccccttcagtcttgttctggggggacggcccactccggggagggggtgtgctgtgctgagcgctgtatccctgaatatagtttattttttctacatttgaattctgttgtagatttatgtaaaaatacattctttttgaaaataaaaattttcatgtcttctaatttagtctggtgagaatttcttaacttaaaacgtagctgtctctgtggggtgggagggcggccgccctggggctttgtccccggtggtgggggtggtgtctggtgagccagggtgccccgcaggacagtcctgggtttttacagtaaccttaggaaagtcatctatttgtgctaattattctatgtattttgtattggtttttccactcttaggtatatacctgtgtgctaattactgacagtgttaggcaggtaggcacggatgaggagaggtcctccaaagtcctgctgccaccaccatgctggggcgtatcttccaggatatgcgttataaactaacaggagctttcagatgtgaagagtgtggcgccccccagtttcctgtccctgctgcaggaacttcatcgttgttcatcggctcctcctgttatttcagtacaaatcccagaca

SEQ ID NO: 135857 - DNA, 1055 bp, Homo sapiens
cttctctctttgggcactgaccttccttgcctggaaccttccatggcaccccattgtccccaggatggaggccaggcctccacctagtgtcatgtggctctgtagcctctcccacctcattaggcacctctcactgattttctcatgtctaaaactaactggtgaggtaggctgccccatgcgatgagtgagcgcccctctgagtcacaggctgtatggccctgggctagcaaattcacctcactaggcctcagttgtctcacccataaactgcctgggggaggtcagggaagcttcacagaggaggtgatgtagttgggttttgagggatgagtaggagtttgttgggtgggaagtggggaaggaatcaaggcagagagaatggatggattctttccagggggatctggttctagccaagggtatggggaagggatgcccgtgcgggcgtaagtaggggcttccctggagggtttctgagggtctgactgtgtgaccaggctcctctggcctgccccttgctggctggcttccaggtctgtgctggtggggacccctgtgagcatgaggctatggtcagctggcctgggaataattaaccctgggaggagctcaggctaggggtgggcctcgctgcagcctggccgcccccagctggcctgatgtcccctctccttcctgcccaggtctggagtgtgactcctaccggcgcccatgtgcggtaccccacctcggggccctggctcccagggtgtgtccactactgggaggaacggctggggcccttccctaccacctattcctataccccttggtctgtccctgtagtgccctgtggtcctgccttggtccctgcctctccctgtgggcagcttaggcgccatttgcccgggagccccctgtgtgagtgcaaggctattggatggcttctcgccctctccccacccggagggaggaaaacagctctgaccgtgagcagagtccacgggaggcggtggagctgcccctaccccaccccttcatggactttctgcccaggatcaaggtcgaggtgt

SEQ ID NO: 135858 - DNA, 1607 bp, Homo sapiens
ccagagcccagagatcctccctccaggactctggagacagccgccgttctgccctccctgctgacccctctgccctccctcaggtctgcctggccgcctttctgagaacaaggagccgattgttgtcaccactgctgtctgcctcctgctgtggatgccttgcttggcgctggcagtgcccacaccggcagggacctggggacttggagccggacctaggtcgccggccgtgtgcctggtgtcggggcagggctggtggtcaccccccctggggttggccccgtgggctcagggccctgcctccctgtgccctgtccgtagggaccctctcatgccctctggccagcctggagagctcttggcagaaaggccaggactgaggtggctggcatggcgcctcccgcgctgttcctccctccctgcctggccttcaggggcgcgtcgtcctccccagaccctcctctgtctgcgtgtgagcccgtgagcctgtgtgggcttatgtgtgtggctgggattccagccagggtttgtgcgcgtgagcctctgtctgcgtgtgagcccgtgagcctgtgtgtgagagtgtgtgggtgccatgcctgtgtgagtgtgtgcctgtgtgtgagcctgtgtgtgggtgtgcatgcccacgcccttgtgtgagtgtgtgtgagtctgtgtgtgtgtgtgtgtgagcccgtgtgtgtgtgagtctctgcatacccatggccttttgtgagcctgtgtgtgtgagcctgtgcgtgtgtttctgtgtgagtctctgtgtgtgtgagcctgtgcgtgtgtctgtgtgtgtgcctgtgtgtgtgtgagcctgtgtgtgtgtgtgtctctgtgtgtgtgcctgtgtgtgtttgagcctgtgtgtgtgtgtctatgtgtgagatcccgtgtgtgtctgtgcacacccatgcccttgtgtgagcctgtgtgtatgagtctgtgtgtaagcctctgtgtgtgtgtgtgtgtgagtctgtgtgtgtgtgagcccatgtgtgtgtgtctgtgaacatccatgcccttgtgtgagcctgtgtgtgtctgtgtgtgaacctgtgtgtatgtgagtgtgcacgcctgtgctcttgtgtgagcctgtctgtgtgcacccgtgcatgtgtgttcctctgtgcacatctgtgtccatgtctgagcctgtatctgtgtgcacccatgtctgtgtccctctgtccctgtccctgtgtgagtgtgtatccgtgtgcacttgtgtcctcgtgtctccctgtgcccgtgctgtgtcggcatgtgtgcctgtgtgtgcttctgtgtgtcttgtgccccacaccttctgatggcttgtgcctgcgggtccaggtttgagactggccactgcccgtgctgtccggctccctccttagctaagggtcctgagggctcggggtccaggacaggagaatgagaagctgtagggggctgtggagggctgcaggcagatatatgttctagaaagactttggccatcgtggggatggtggtttggggcagaccagtgatgccacccactgacctttcagccagttcccaggaagtgtcacaggggtgataattgtccagccaggagtgag

SEQ ID NO: 135859 - DNA, 1050 bp, Homo sapiens
tcctttgattagaggccaggaaacccaatcccgcagcctaggcagtggggggacctccttctagagaggccccagcagattatgggattttcacctgcccagccctgggaggtgtcttggacccagagcatttggccttgggaggtggggagggggttcctgccctggagccagggaagctgtctgcggcccacagttcagggccccacacagaccttttacatgctgtgtgacctggggcagcgtgtctctctctctgagtgtcgactttctcatctgtgacgtggggtgagggcacttgctgcccaggtggttgtgagggttgactgaagtaaggcctgtccttcagttcttgcctgggagcagggaaggccctggctggggttgcctctgaacctcagtgtctttgagggctgggaggaggagtttcttcttctgggttctgggggttcatgcaggattgcccgtcagcatcctgcagcccctggaatagggggcgctcagtgtagggcaaaggaacgtgaggagggcatgagtgttgtatctcatgggaagaagcatttttttgggaggagtggttgcaggggcagctagttctggaaccatcctaggacctagaaattgctcggggccaggaagcgagaccagtcactgggtgcaaccttgacataggcttgaggggtcacgtcccctgccctgtccccatcttgctcagtggccagaggagagaccgtgtgcacttggtggactgccacgggcctgggggcctcgggaccaaccctccatccgcccgtccccagccgggcgcggcactgagctgagggagcctgcgttcttccttcaagcagaggatcttctgcaactgtggggaagagtgtttcttcccggaaggcggggccagctggctgggtcagcagatgggctcctctggcgtcttctcaccttctggccggtcattggccctcgtggccctaccacagtggggtgggcatctccccataggccctccccacaggatgcagcccttcctcatggggcctggtcctgctg

SEQ ID NO: 135860 - DNA, 1307 bp, Homo sapiens
gagcaggaggggggcctggtcagtcagagccagcccctgctgtgaccccacacccctgtccggaggagcacaaggctgggggaggacggccaggggcctgcgttgatgggcaggttccaggtatgcggagggtcactggccagcgtggttagggaaagccctccagggggatgctgcgggtgggcttgtgcatgggaaggagcagccggtggggaggtggagaaggacctctcaggccaggggaacggtgtgtgcaaaggccccagagtggggctcactggcaggggctggggcggtcagttcagagctggacattgaggtctggtggccaggagggggctggtgggtgacagagccaggcaggacatggccagaggtgctgggcctgtcctgacagtggtgagcatccttcagaggccgtgagtgctgagtgagggtcctggctgccggtgaggatggaccccaggggcaggaggggagtccgtggccacttaggaggcagaagcagaggtggtcatggccatggctgtggggatggaggagccggtgggtctggttgcagttacagctgtggccaacaggccgggagagagggcttggggtgaccatgtggtttgggcctgcacagtggtgctgtttctagggacatgaggcaccaaggggagtcgagggtgccaggcgcggcagttgcgattgaggtcatgcaggacccctggcaggttacaagagcagtgtgcattgaatgccagagctctgggggagacctggaagcctcccaggaggtgaaaccccagggtctgtggttggagcttggaacattttggcggcaggaccagccagggttttgagaaggaggacagagcagcatttgctggtgcagcgggcatcgtggtgcgatgatcttcaggatgcagggcagtgagagccaggtgcagctcctctgagctcaggctggctgagagggtccctgtagcccagttttgtcccgaggtcccccagggcccatgtggctgcttgtcccctgctgcagatggggaggccagtcacgggcagaatgttgatctgatcccgggggacgcaggtggccgacacgtgggttgagtcttggctgagttcatccaggcttgaacagccaccctgctgtggcactgcgatggagggctggctcctgcccagtgcttcccggcctacgtacgccctgtcctcggggtcctaggctgcatggcacctgcccatccatccgctgtcaaaggcatcacgtgtccgccatgtgctgcctcaggcacaatgcaggattcggtggtcag

SEQ ID NO: 135861 - DNA, 1054 bp, Homo sapiens
caggcctcctttccctggtgacctggaaaagcatggactctgctggcatgtccttccctcctgcccctgccaggtggagcagggtggggcctttggggaagctgcctcaccctcacctggcttccttgccccagccctgcaagggaggggaactgtgtcaggctctcgtaggtgactctccctgggggagttctggggccttgggtaggtcacctcatcaacctcagccttgctctcctcattggtaaaaagcggggaagagtttctaccttggattttggtaagggggagccattgtttagctcccaccgggaacacacctgggatggccttgggctggggattgcatgctggccgggccggggagccaggagttgctgcctgtgctcctgcaatgcccaccagggctttcggggtatatagagcagcacggtctgcgggatggaggcccttcctgctgacacaggaggctggggaaggtccgtggctggagaaggtccgtgccttgcccagaagtgtgtcttatcaccaagagatggcccggtgcactgagcacctactgtatgctagcactgcggtggccgtcctgctcagcggctcttggattagccatccttggctgcctgcaggggaggacgagtgttctcaccgttgtcctgctatggaggggaaggtgacaagcttctctggtggcacctgtgcctcaaagtgttgggaaagggtggttttcccaggtgggggcccctgccctgccccagcctcaccctgcctgaggccctgctcagccaccaccctcgatggccctggtagaaagtgtctcccgacacctccgcaccctgcctgtctcccagcctcagcagccctggaggtggcccaaggcccatgcccatgcccagtgctgggcacccccaggaagctcagaggcccccaggcagagccggggaggcgtgaaggcatagccagggcagaagcagaacaaaagaaaagaaaaaaatccacccccaaacccacccagcccacaccctgaatctccttatctgtgtctccgcagcct

SEQ ID NO: 135862 - DNA, 1048 bp, Homo sapiens
cggggacatgggatgagaggcgtacccactgtgctccccgacatccctgctgctcgctggcccgagggctggctcctgcagcaccatctccacgggaggccgtgggccgcttccaagagggctgctgctgggtgtgccacccaggccccggccacctgccgaggacggagccaggcgtgagcccgtgcaggacagagtggaaacaccgagttctgcctgcacagtccttgggcccttgctggagggctctggctcacgagccaggagatgggcaccagtcctgttaggccgccaccatccactttcctccggcagcaggcaggcaggcaggcaggcaggagccacagctcagggccaacaggcctccctcagcctgggtagggtggagctggagggagggcttcctgggggaggtaacagggaacatatggggaacagcatatgcaaaggcccagagctgggagagttccggggcctgtaatggggaggtcagtagctgagcctgtgcagtcctcagaggccttgtgcagggtctggacttggccctgtgggtgccacccaggaactgacaaggtcttgttccagagacttccccagaggtctgggacctgctttccaggctcctgtttggatgctgttccagcccagcagcactgccctaggccctgccctcccctccccgcccctccctggtcgtctgcaggactgggcagagcccctggaccctgcctgagacaagcagtttccagggcaggcctgggccccggctggggtctcaatggggtgtgctggctttgggaacgttggcaggtctgagcctggcctatgtaagtgctgcttgctcatgtgggtggtgagggctgtgggcagagggccaggagtccccggggcctgctgctgggctcaggggaagggcaggcggagctctggggccaacagccccacgtggcaggggattttcattaagcgttgcgcccactcctaccccatgcccagttctggaaggctcaacagggtccagggagcattcatggaacagctgctgggg

SEQ ID NO: 135863 - DNA, 1049 bp, Homo sapiens
cctagggcaccaagttcagtaagttcactttccccgggggctgttgggtgccatgttctccctgtgccatgtgccctgtgcctgttggatgccacgttctccccatggggaccttttgggagtcgtcattagtgatggaagtaacccaagtcatggccacgggcgagggggtgggggcctcgttgctctgtcctctcccagtccagcatgtggcagggccgtcgggcctcagaggtgtcccctcactcagggagcctggcggtgggccctgtccacccaccccattttcctgagcagcgggaggtgggaaggcatccgtttagggagtcagctaatttcatacctctctggtttctcatctaaagcccagccctcatgggcctggtgtggcaccacaagcccaggctcctgggtaccgtgcccctcctctgcagggcagtgtgtctgtggggcagtttgcttctgtcctgtttctgggatgggcctacactgccctccagggaggccccaaggggtgcaggtgagcagggttggcaacggcagctttgggcaggacgggcactgtgccgcacctgtgcggcaccgggtgtggctggcacggtttggctgctgtctgcctgagcactgcctgtgctggccagtgcgtctcccagtccttgggacagccttgtgggaggcccaggccgccctgagcatggggaccccagggccggaggtgcgacctgagcatggggatcccggggccggaggcgtgacgtgggtctcctcatcccgacctcagctccagacatgtcaccatctcccccgggtttggcattttttggggaaaagcctcccctaaaaactgtacagccagaaaaaagaagaagagaaagggttgtgccaagagccttgtggtgggcatactgggtccgtgccgggcttctcctctcccagttgcccctccttcagcccatgtttccatggtgggcataccgggtctgcaccaggtttctcctctcccagctgcccctccttcagcccatgtttccagactcctccacaaccgt

SEQ ID NO: 135864 - DNA, 1048 bp, Homo sapiens
acaggtgggaatgggggcccactgcctgactccctgggacccagctgggatctggtccttggtcttctgatgtcccgggtcggaaggatgactgtctgtcccatggctatggctttgaggagccccggaggccctgtggggtggtgtccatctgcatgggacgtgggggagcacacgctctgagcttgagcactggctccgccgctgctgggcagtgtgacctcgggcagggctgcgctgagcttggcagggctctctgccctcgccgtgtccactgctgggagcacgtcaggcctccctgcccggctggttccaaggcctttctggtccctgtgtgcagacgaggctcctcacctcgggaccccacattactttcttatttgtgcgctggtttactttgtctctcgccgtggggcatcacctctacaggacaaggccaagcctttgccccgtagacgaagggctcatggtgagcccctcatttgggattctgtagctctgttggggcagcctggtcatgccagggcctttcagggtttcagagtgctgcctgctatgtgacctccctggtcgtccttcctcgccacctgcaagccatccccgtgtgctggctgggccctgggctgcagactggggccagggagatctggacagcagcgtccaccccatgcagttcgctgtgtggcggcgccgggtgggccttgtgcacagcccagctcagaccacggagggtctggggttggaggtggtgtggacatgatgagtgctctcactccaggagagaacgctgccaagagaagggtggctggcccggcgggtggctgctgaggggccatcgcggaaggtgggtggtcagcagagagtacagtgtcccttcttccactgggttccacctgagggagtggcaggagccggagggcttggggaagaggccgcatcagcctcacttgagggctgagtgctgaagacagtgtggggggccctgggctggcaggtgggtcaccctcgctctgggacacgctcaagagagtgccctggagaggggttt

SEQ ID NO: 135865 - DNA, 1032 bp, Homo sapiens
catccttgctgcagggccgtgggggacatagggacaaacctggtgtacaccccgctgactgctgtggttgccccccccagctcagctcacctatgaaccccgtcagcagcagcgaggacatcaagccccccctgggcctcaatggcgtcctcaaggtccccgcccacccctcaggaaacatggcttccttcaccaagcacatctgcgccatctgcggggaccgctcctcaggtaccgctgctgtgggggccaggggctggtgggacagggttgtcaggccattgcagggtctggaggcctccccaaatcaccctcctgtgggccaagcaggacccaaggccagggtgcagggaggcaggtgcctgggccatgccccactcccagggctccgcgaggccattccagggttctcacgtctgtgggacagtgagtgttgggtggggtggggcacagggcagcctgaggcttccggagaggaggtggctgctgatggcaaggtcagcatgggggcagccagtgctgcgcctcctcccttggctgggtctgggcaaggggcccgtgttgtgccactgacccccaacggcctgagagggaagaacgggctgcacagtgcagacacagagcaggtgacttgcctggggccctggtccctggtgggctgggatttgtccctgccccactcctaagctgtcctcggaggagcagagagagtgaggctggggcccagtctgagcccaggcaggggtctggagaccagcaggtccctttctgaggcctggcccgccagctggtagtggcggcgttggatggggggtgggctccctgccggggcggtgggtgctccccagccctgctctgccctgtcccgcaggcaagcactatggagtgtacagctgcgaggggtgcaagggcttcttcaagcggacggtgcgcaaggacctgacctacacctgccgcgacaacaaggactgcctgattgacaagcggcagcggaaccggtgccagtactgccgctaccagaagtgcctggcc

SEQ ID NO: 135866 - DNA, 1023 bp, Homo sapiens
gccggggagggggcaggggttgggggtcccgcagggacacgtgctctgatggggaagacaggcctcacccttgggggttcccagtccgatggaaaagacctagcttccacccagggtcgtcgggggagacattggtctagagggggcagtggctgtcccccattctgcttcctcctcctccctcaggaaggctgcttcccatttccttcctgcctgcctttgcttcctgtgcccaccctccagctctgaaggactgggtgtggaaacagcagggtctggcgtgtgtgcacctatgtgtgcacgtgtgtgcatgtgcgtgcactgcagggatgtggctgacccacaggtctctgctgtgggaagggagccccggctgggctcgagtgtggccctcttgccttctggcctgtgaactgggcaagtgaccttgcctcgcccagtcctcaggttcctcatctgtgatgggctgggggcatcaggaagacccctgcgagcttgggggtggatgagagtgctgtgcgtggctggtggtggggttggagagcagtggtcacgtgtgggtgtgggtgtggtatgtctgtgtggtgtatgggtgtgcgtgtggtgtgtgtgtgatatgtctgtggtgtggtatgtgtggtgtggtatgtctctgtgtgtctgtgtgtgtatgtctgcatggtttgtgtgcacgtgtgtgtgcatggttctcgtgttctgatgccttgctctaggttgaagccctggagggaaggtaagtcactccctttagagactctagcttgctgtgtggcctctggcgctgctctctgggtctctgtctccccacccttaagaggaggccagaatggtttggtggagttcggtcctgcctgtcttgggcccagccctgggctgcacaagggacggaggaaggactcagccattgccactacccaagccagaggagccagtgggcctggggatgcccctcggctccgacatgcctgcctcggagctgtctgcccttccccagaccccctc

SEQ ID NO: 135867 - DNA, 1048 bp, Homo sapiens
ttcacaccattctcctgcctcagcctcccgagtagctggaactacaggcgcccgccaccacgcccggctattttttttgtatttttagtagagacggggtttcaccgtgttagccaggatggtctcgatctcctgacctcgtgatccgcccacctcggcctcccaaagtgctgggattacaggcgtgagccgccgcgcccggcctctctgcacagtctttctccacgagtctagagagccacacacaccagactgggccttctggggaccggatgtcagcttcagctggagcgggaaggctggggaggggcactgcggggtcccttgggcaggggtctgcaacacaggagccgtgggtggggaggagcaggccacctggagaacgtggcccctgaacacgagagccccaacgttagaggtgagtagaggccatgcaccggcacttacagggggattaatgccccagcagcaatgccccagggggtggttcaggtcccagagtcccaagggtgatcctggaacttgacctccatgggatgtgccaagtgcaaaagggtttgtggccgcagacggtgggcaaacggtagttcaaacagtgtccttgagggtctttgccgcaggacttgtcagggcctttaagaagttagtgtacaggagggtccccacgggggctgcagggtgcagtgtgcagtgtgtattgcccacagaagcttctttagaggggtactggggatatggctttgggaagcgaagccccagccacttgcccagctgacagatcctttgtctggctggtagagagatggcgatgacagaggtttcagggttacattctctggggtcccacagcagtgactacagaggccccggcatttcctcgccttttttgcgagtggaatgcaaagtctgccctcagtggcccaggtcttttccatgcccgctgccccatccctctgcagctgtgtgctcctgcctcagagcagacatcgggggtccctcccagctcctgttctgtcccaccctgttctccagcctccttcagatcttc

SEQ ID NO: 135868 - DNA, 1997 bp, Homo sapiens
agaactgcccatgccccttgcccggccctcaccagacctgttccctgcaggttcgctaagctcttgctccgcctgccggctctgcgctccatcgggctcaaatgcctggaacatctcttcttcttcaagctcatcggggacacacccattgacaccttccttatggagatgctggaggcgccgcaccaaatgacttaggcctgcgggcccatcctttgtgcccacccgttctggccaccctgcctggacgccagctgttcttctcagcctgagccctgtccctgcccttctctgcctggcctgtttggactttggggcacagcctgtcactgctctgcctaagagatgtgttgtcaccctccttatttctgttactacttgtctgtggcccagggcagtggctttcctgaggcagcagccttcgtggcaagaactagcgtgagcccagccaggcgcctccccaccgggctctcaggacaccctgccacaccccacggggcttgggcgactacagggtcttcgggccccagccctggagctgcaggagttgggaacggggcttttgtttccgttgctgtttatcgatgctggttttcagaattcctgtgtggccctcctgtctggagtgacatcttcatctgctctgaatactggtgcccagccagcccgtgacagcttccccctaatcaggaggggacagctgggggcgcaagctggtgtgtcatcagcaaagacctcagccgcctcggggatgagaggggactcgtggggcaagcaagctgccctgtgctctgagtgagggggaaggtagcccctttttccaaagataactcacagttttgccctcgagccaatgagaacatgagctgccctctgtgcaaggtttcggggccacctccaggctgcaggggcgggtcactcacccccctgttttctctctgccttggtgttctggtttcagactcccgactccccgttcagaccagagtgccccggcccctccccagcctgagtcttctccttgctctgcggggtgggctgaggcttgtccttgtttcctgcagggctggccctggctcgggcagggtggggcatcaccacctcactggccttgctggaggcacagggctctgcggacctgcagccatctgtgaggcccgcggggatgggaggggaggagggtggcctgttggtttccctcagagggggcaggtggcctggagagagaggggctcaggaactgggagcctcgtgggtggggcagatgctccgcggcctggagtggctctgccggggcattggtgggacccctgctcaggccttctctctggctgccagttgtgtctaaaagactcttggaatctgagaacccggagtcgcagcgccctcgggcctgggccacacgcaggccctggtgggaccacccagcctggtattgtccacggacagcgttgttcacccagagccttacttgggagcctcactgaacgcctgctctggttgaaggtggggtgggggcggggcttggggcctccctggctcagcccagtgcggcctggcgctcctcccgcaggctctgcccccgggctccggtggtgcggggccctctcaggttgaactcgcctcttttgcactggaaggccctccctttggcctgagtacttttcccgttcacgcctcagtcccgtggacccagcctttgtcagtggcaggtgcctgaacagagggtggatgggggggataccggagggggtcttgtcttcccagccgcagtctaggaatgatgcgggggggtggacgccttctccatagtctttccccacctggagcaggggcttcctcagtggtgaggggagctgcctacaggttggaccgggaggcagtggcttggagaggcagctttccagccttggtggggaagaaagtgtccattctttgccttcctggagctcccagccagagctgagcttaggcacccgagtggagcctgcagctga

SEQ ID NO: 135869 - DNA, 2329 bp, Homo sapiens
ccggcaccttcaggcacgctcctcagctggtcacctcccggctttgccgttcagatggggctcctgaggctcaggagtgaagatgccacagagccgggctcccctaggctgcgtcgggcatgcttggaagctggcctgccaggaccttccaccctggggcctgtgtcagccgccggccctccgcaccctggaagcacacggcctctgggaaggacagccctgaccttcggttttccgagcacggtgtttcccaagaattctgggctggcggcctggtggcagtgctggagatgaccccgagcccctccccgtggggcacccaggagggccctgccggaatgtgcagcctgtgggtagtcggctggtgtccctgtcgtggagctggggtgcgtgatctggtgctcgtccacgcaggtgtgtggtgtaaacatgtatgtgctgtacagagagacgcgtgtggagagagccgcacaccagcgccacccaggaaaggcggagcggttaccagtgttttgtgtttatttttaatcaagacgtttcccctgttttcctataaatttgcttcgtgtaagcaagtacataaggaccctcctttggtgaaatccgggttcgaatgaatatctcaaggcaggagatgcatctattttaagatgctttggagcagacagctttagccgttcccaatccttagcaatgccttagctgggacgcatagctaatactttagagaggatgacagatccataaagagagtaaagataagagaaaatgtctaaagcatctggaaaggtaaaaaaaaaaaatctatttttgtacaaatgtaattttatccctcatgtatacttggatatggcggggggagggctgggactgtttcgtttctgcttctagagattgaggtgaaagcttcgtccgagaaacgccaggacagacgatggcagaggagagggctcctgtgacggcggcgaggcttgggaggaaaccgccgcaatgggggtgtcttccctcggggcaggagggtgggcctgaggctttcaagggttttcttccctttcgagtaatttttaaagccttgctctgttgtgtcctgttgccggctctggccttcctgtgactgactgtgaagtggcttctccgtacgattgtctctgaaacatcgtggcctcaggtgccagggtttgatggacagtagcattagaattgtggaaaaggaacacgcaaagggagaagtgtgagaggagaaacaaaatatgagcgtttaaaatacatcgccattcagttcgtttgttccgtgtggggacttttttgtttggagcgggagggcccgcgatcagcccccaccagcccaccctcctgtccaccctacctgccggtcctgtgcggcgaggctggcatcctctgtgggccatactcttgagagttctctccctgtccactgggctctgctgctcctccaaggggcagggggctggggcctccgtgagggcacctctcagcagccgtgggcactgggcctgtgggcgcctgcggagcacgagtgttcccacctgtccctccccaggctgcctaagcatccacgcctctgcagccacgctggcccagatgggcaggaggtgcacccagagggccaaggaacacacgatgtcacccagctgccccaataacaacaagttaatgatgccccatctgcattgtctcctgtgataaacgccctctgtctccatgctgtctggggctgggctgctcccggcctggtttggtcttcgtgcccggagccctctcatgcacctgtgtccagccaggcaccctccccgagaggcaccagacacactgaagatggggagtggggctctgaaggtccaggtcctgccctgtggtggtgggcagaggacagtgtggcctgtgcccagagctagggtggctcccgggtgagacttaaaatggaacggcctgccacctgaaaggcagggacttcctgatggcactcccctcatgagcacacacacattcacacacgtgcatactcaaacacgggcacggacacgctcacatggaccctcgcacccattcatacgcatgcacacaccacgtgctcacacagatgctttggcatgcacacccatgcagaactgctcccgtgcacacacccatcgctgcccttgcacacacccatgcatgctcccatgcacacacacccatacaggctcagttgcacacacccatacacgctcccgtgcacacacccatacacgctttcatatgcacatacatccatattcccatgcacacacacccatacacactcccatgcacacacacccatacatgc

SEQ ID NO: 135870 - DNA, 1053 bp, Homo sapiens
caataatttgtggggagagtcggccaagttttgtgagacttgacaggtatcaaatggttaaatttcctctgactcaatcaagttggctggaaagacatccttttccatcctctgccccctccctccctctccccataaaagagcagtgagtgggaggagctcagaagccccaagaattccccaagccctctccctgctgtggtccagatttgccggaggggttggagttttggttgctacccagggctgtgcccacccagcagtgcggcagccccaggcaggggcgtgctcccagtgccaggctcacagtggtttctccagtgatgttactcctgggctgctcctgcggggctggccagagcctgctcttcaccccgccctgcagatatttctggactccccaccgccacgcctcagccgaacacagctggtgctgcccgtcccgccctgccttctcgctgcctggcctgtctgcctgccctgcctcctccctggaccgccccatcccacctcctgggagatagaccttgataggtggagtaggggctgtgcagagcagtgagctgccccgctggagggcgaggatgagtccccaacacttcccgagggcacccacataggagcctgagccaagctgcatctggaacagtgcaggacctgtccctgctcggtcacgtgacgtggctctgggaatggccttgggagacaatcacacatgggaatggaggggctggcacttgcctggcctgtggtgagcatcagctgcaccatctcactgcaccctcacccgggcctgagaagggacagagcctaggagtcagggggcagggatgccaggcagatgtcttccattcctgctgtggggccctaagccagcaacggcccttcgcctggcatggtcactctttgacttgtcacagttccctcttctcacttcccatcggtttatcagctctccccggggagaaggccagggccctgagctatagtcctggcctgggggcccagtccaaacagggtcctgggagcagagccattccatttggccaacac

SEQ ID NO: 135871 - DNA, 1049 bp, Homo sapiens
agagggcacgtgacaagtgctcgcatgcacacagcaaaatacaacggccgccgccctgccattctcccgatggctgtgaccgcaccgcagggaccacgctcccagggaccacactcctgggtcccgagccagtgccgagtgctgtgtgctcccccttccccctttcacttgggctcccggctgggcttccagggttcagacagccatccttgtctgagggacgagggttctggggaatgagtagatctcatggcacggggtgttgccctaacttgtctgattccagaggctgggccttgatctgctccgccccaccacgatcgtgcaggaagtgggccttcttcctgtgtctcgaggaatttgcagcaaaattgcttgagctggcatctgtgatccaagccctgtcttcaccatctgtttctttgcaggtggcacagaattgctctcagcgtccacaagaaaaatgtcaccttgatcctcgactgtaaaaagaagaccaccaaattcctcgaccgcagcgaccaccccatgatcgacatcaatggcatcatcgtgtttggcacccggatcctggatgaggaggtgtttgaggtgagcaggagggcagaccaacccctgtgcccaccagggcactcctcctgtggagccactgtgactgctgttggaggaggctcctcgggccgggaccggctggcggtccactgtggtcaccgtctctgttggtcagaagcctctgctgccatcctaagagatgtttgtggctttcggaaatggaggggccagagctgctgccgcctgtaggccgcgtggggatggcagtggccgcccttgtcccaagggcccagtacgtgagtctcctgggtgctggctcggaaaggacagggcctttgtccagcctcgtgctgaggctcctggaaacctgcacactcctgccgtctgtatccgaggccatcctgggacaggggcagctgtcctctgggtgagcttgaagggcagagctgggccaccgtgtggacgcaccagggagacctgtgccgacccaactcggg

SEQ ID NO: 135872 - DNA, 1052 bp, Homo sapiens
gtactttccaggctgtttaggaccccggcagggacacctggttccccagagggtggcccaggggatcttgtgactctcccctgatgccctgtcctgccccagaggctgtcattcaagaaggtcaccaaatcctttcaattagatgctctttctgcccagcctttcctctggagagctgtggcatgtgagctcctgagccggcatctcagagcctgcaggcttcacctgcagtgtctgcacacctagcagcttgctgggagcgaggacattccaggcctttccggctggtaccagagctggtaaacctggcgtatgtgaagcagccccaagccagagaacccttgtgcaccactgaggggaagctggtgtccaggctaacagctcatttctctaaccttgccttttttctcctctgcagggtgacgacggagaagttgggcccagggggctgcctggggagcccgtaagtctgtgagctgagtgggacggtgggggctcagtgtggagaaaggctttgtccaaggctcctgctggagcaggatctgggatcagccaggagcttagaagagagagagctcgacctgagaacagacggacctgggcatctcccagggaagccaaagagaggaggcacaggcgaggctggctggcaactccaggaggaagtctgagcctgcctacaggagcaagcctggccctcaagggttgttgtgggggtccaggggcagcgtggtggggtctgggggcattgtggggagtcgggggcagtatgtggggtccatgggcattgtggagggtctgagggcatcgtggtggggtccggggtcagtgtggggtgtccgagggcatgggggtggggggtacaggggcatcattgggagggtccagggtcagcatgggtgggtacaagggcattgtggggggtctgagagcattgtagggggtctaggggcaacatggcagggttcagtggcaccatagggggtccgagggcattgtggggggtcaagggagaagcatgggaggtctgaggtcattatagggggtcaggg

SEQ ID NO: 135873 - DNA, 1031 bp, Homo sapiens
tgcctagattggcaggcgggcgtgtgagtggcttggctgaactcagtcccctgtgagaaatacaaggtttggacatgtgtgagctcttcatggatacaagtgtgcattcaggacaggattttaagccagacaaatagagacctgccaaagacagtggccagcgccaaccctgtgggcagctgagcgacctcactgcggtgctgcttcctgtgtgggtgtttggatattcaccaggtcagagtccctaaatccatctctggtctgtgtgcaccttgcaaacttctagaattaaagagctggtaggtgctacagtcagtgcataaatttgcattcattcccaactctgcaagctgctgtgctttatttaaagggattgtgggacgccaacacaacgtgcacgaggcacagaaaatacaatgtcacagtgcaatgttcatgtctcacctcagttcagctcagcagtgtgtgtccctttctcccaaacaccagccaccctcctatggatatgggcgcgtgggggatggtggcaggggagggagcatgatgaaactccatttggctttctagagctgaagcctgtgaaatgcttaggaaatatttattgagtagagaggatggataaagagataggtggctgggtgagtggaggggtgtggataggtaggcagatggatgaatgggtaggtatgtgggtgtgtaggcagatggatagacagatagatgggttggtgggaagagaggtggatgaatggatgggtgggcaggtggggtagatacatagatggatggatgagtgggcaggtaaatagacaagtggatgaatggaggggtgggtttataggtaggcaaatcgatgaatgggtaggtgggtaggtagacacatggatagacataggtgggctgcttggcagagaggtggatgaatggatgggtgggcaggtaagtagacaggtcgatgaatggaggggtgggtttataggtaggcaaatcgatggatgaatggatgggtgggcaggtaagtagacaggtgg

SEQ ID NO: 135874 - DNA, 1113 bp, Homo sapiens
ccgaggagcttagatggatgctccagatgtccagggcatcagcactgtgggtcacgggacacaacacaaacctgactcaagcccagacctgccaggcaccacatgccccagtcacacataggagctactcacagcctttctgcagcctctgggtgtctggccctgcccaaggacatttcgttcactgctgcacctggctggtggcacaacccacaacacagacctcaggccaaaagggcgaggccgtgtgcttccccttgagccatggtagtggtggttcatgtgtgtgagatggagccctggcctccttcatctttgccatcacagctcttcagagcctcccgttcaggacactgagcacagcctttgcccgcatgagccttcagtggcatcgtcactgcagaatgaagcctgcagcactgcctggctttctggacagggttgatgctttgtaccaagttcggggaatgacggagagtgtgggtgccctctgatctagtaggttgggcttcccgaatgtccacaggaagctgagggctgggctgtccttgcaaagggacccttcctcttttgttgactgcagaagcctcacttaggttacccagaagcctctgggcgctggcttgccttctgcgcctcggtgaacagatgctgcctcccaggtttcgcccttggccgcccttcttttgccttgggctttggacttggtagtcttgggtgcagtccattcacttaaacagcacatgcatcgcgagtcctttctcagtgctgggtgttctgccaggctctgaggactctggtggtcaaagcagacatccctctggcatccagagtggaacaccacctggtaagcagcactcagaggagtggtggctgtgatgatgaaggacaagggtgagtcagggaaaggtcataggcaccagggtctgacccagaaggtccagggaggcctcctggagcagtgacatttttgctgagccctgcaggagggacagaagtggataggtgaggtatggaaagcaggcagagctgtggggtcaggaggtgaggagccgggggccggcacagggccgagcccggcaagggagacgtgggagtgggctgtgggctgca

SEQ ID NO: 135875 - DNA, 1893 bp, Homo sapiens
ccccacctccgacctgtgcagggggactcttgggacatccaccggggttaaatgcatgctctgatcagccatatttcctccaacacttgcccgggcaagcgcagccctgggtaggagacaggacaccagcctgggttttggagccagacagattgtggggggtgattggtaaaccccaagacccccaactgttcttaaccaccggccatctgtctccctcttccccagaccaagaaaggctaccagaagacggttctggagatcgacacccccaaagtggagcaggtgcccatcgtggacatcatgttcaatgacttcggtgaagcgtcacagaaatttggatttgaagtggggccggcttgcttcatgggctaggagccgccgagcccgggctcccgagagcaacctcgtgacctcagcatgccattcgttcgtgagtgtcccgtgcacgtcctgaccctggacagtgaaggcttctccctcccctcccacctgacttcatctacgcctcggcaccacggggtgtgggaccccagcccggagagaacagagggaaggagccgcgcccccacctggagctgaatcacatgacctagctgcaccccagcgcctgggcccgccccacgctctgtccacacccacgcgccccgggagcggggccatgcctccagccccccagctcgcccgacccatcctgttcgtgaataggtctcaggggttgggggagggactgccagatttggacactatatttttttctaaattcaacttgaagatgtgtatttcccctgaccttcaaaaaatgttccaaggtaagcctcgtaaaggtcatcccaccatcaccaaagcctccgtttttaacaacctccaacacgatccatttagaggccaaatgtcattctgcaggtgccttcccgatggattaaaggtgcttatgtttttgtgagttttaagtaaatatttgtattgtattgttataaatgttaagtgtgcctggctttcaatcatgcacggaaacccagtctcagtcccacggacagaatgggcgaggcatggattctgggttgcagtaccgttctgattagaaataggaagtctccccacccccgccctggccaagaacgtgcaataaattggaagtttgccccggggcagcaagaatttatgctgccattgaaaagcaggtaccagtgccccttttcagacagtttttgattcgctctagactttttttttttttaatagggaaaaaatttgataattttcttttttctacatgcacttaagactaaaacacaggtttggattaattttatttgcttcctttttccgcttttcttcccgcagagcctgatgggagaatgtccagggcagggaaaccacattttttgtaggtgataactcaatgaaaattggtgcttattttttacacttctctcttgtggctctcttgtggtgctatctatctgttttaaggtctccttgaaggcgcactggggaccctggccatgcctcgttctccctgctttctttatcctgttattgcctccacagtctgttgccaaggactctaagatcaatgcacgtcactttcctttccactgggcaggatagccaagcacactccctcctgcgctctcccgccccggtgcgtccactcccgagggctgttatgaggactgggttgtgcctacttgatttgaaaacacacacaagcaataaaaagcctcttcctgcattgtctgtggtgtgaccatagcagattatatttggttcctgaatgtttgtggtgctaatttctgtgtttgttccaagccgttcagtcatgccatgcgctgcctcggtagatggagtaatgtacaatgaactccatgagtctctccagggctgcct

SEQ ID NO: 135876 - DNA, 1469 bp, Homo sapiens
ccttctcctgaggtccaggaaattccaagtcggggaacagcttcccgcccaaggaacagctttccacacaagcctgttccaccccactttggaagtgctcgccgggtctttggaagtgctcactgggtctttggaagtcctcactgggtctttggagtactcactgggtctttggagtgctcaccgggtctttggagtgctcaccaggtctttggaagtgctcactgggtctttggagtgctcgctgggtctttggaaatgctcactgggtctttggagtgctcgctgggtctttggagtgctcgctgtgtctttggagtgctcgctgtgtctttggagtgctcaccaggtctttagagtgcttactgggtctttggagtgctcactgggtctttggagtgctcgctgggtctttggaatgctcgctgggtctttggaatgctcgctggatctttggaagtgctcactgggtctttggagtgcttgctgggtctttggaaatgctcactgggtctttggagtactcactgggtctttggaatgctcactgggtctttggagtactcactggctctttggagtgctcactgggtctttggaaatgctcactgggtctctggagtactcactgggtctctggagtgctcactgggtctttggagtgctcgccgtgtctttggagtgctcgccgtgtctttggagtgctcgccgggtctttggagtgctcgccgggtctttggagtgctcaccgggtctttggagtgctcactgtgtctttggagtgcttactgggtctttggagtgctcgccgggtctttggagtgctctctgtgtctttggaagtgctcactgggtctttggaaatgctcgccgggtctttggcatgctcgccgggtctttggagtactcactggatctttggattactcactggatctttggaagtgctcactggatctttggaagtgctcactgggtctttggagtgctcaccgggcctttggaagtgctcaccgggtctttggagtactcgttgtgtctttggagtgctcaccgagtctttggagtacttaccgggtctttggagtactcactgggtctttggagtgctcgctgtgtctttggagtactcactgggtctttggagtgctcactgggtctttggaagtgctcacttggtctttggagtactcactgggtctttggagtactcactggatctttggaagtgctcacggggtctttggagtgctttctgggtctttggagtgctcactgggtctttggagtgctcagtgggtctttggagtactcactggatctttggaagtgctcactgggtctttggagtactcactgggtctttggaagtgctcaccaccgggtctgctctctccacaggtgtggtacatggacggctatcacaacaaccgcttcgtacgtgagtacaagtccatggttgacttcat

SEQ ID NO: 135877 - DNA, 1036 bp, Homo sapiens
ctccgacgagttgtagctccctcctcctggaagccaagggcccacgtcctcaccacaaagggactcctgtgaaactgctgccaaaaagataccaataacactaacaataccgatcttgaaaaatcatcagcagtgcggattctgacatcgagggatggcattacctccgtgtttctccctttcgagccggcgggccacagacgtcggaagaaactcccgtatttgcagctggaactgcagcccacggcgccccggttttcctccccgccctgtccctctctggtcaaacaacatactaaagaggcgaggcaatgactgttggccagttctcaccggggaaaaacccactgttaggatggcatgaacatttccttagatcgtggtcagctccgaggaatgtggcgtccaggctctttgagagccatgggctgcacccggccgtaggctagtgtaactcgcatcccattgcagtgccgtttcttgactgtgttgctgtctcttagattaaccgtgctgaggctccacatagctcctggacctgtgtctagtacatactgaagcgatggtcagagtgtgtagagtgaagttgctgtgcccacattgtttgaactcgcgtaccccgtagatacattgtgcaacgttcttctgttattcccttgaggtggtaacttcgtatgttcagtttatgcgatgattgttgtaaatgcaatgccgtagtttggattaataagtggatggtttttgtttctaaaaagaaaaaaaaaatcagtgttcacccttatagagacatagtcaagttcatgttgataataatcaaaggaattactctcttcttgttaaattagctaaatcatgtaaccgcagataggaagggctcgcctggggaaactctggtttccgatgggacaggaaagtcatacgggcaacagtatgcggaaagtacgttttttaagtaaaaaacaaaggcaaactttgtactatccagttatctaaggaacaataaaaacattaggagatctttttgcttcacttgtca

SEQ ID NO: 135878 - DNA, 1051 bp, Homo sapiens
tccccactgggtgtggacttgggggaaagctggaggccacttacattggcctttcagctcctggaaaacaccaagcactttcctgacccacacaaatatcttgtagatgctgtatcctctactgagactgtggttctgctcatcttacatgcatacctgtacgcatggacacatgtctgtccacctcacatgcaaacctgtacacaatggacacatgtctgtccacctcacatgcaaacctgtacatgtggacacatgtctgtccacctcacatgcaaacctgtacatgtggacacatgtctgtccacctcacatgcaaacctgtacatgtggacacatgtctgtccacctcacatgcaaacctgtacacatggacacatgtctgtccacctcacatgcatacctgcacacgtggacacaagtctcttcatctgacatgcaaacttgtacacatggacatgtctgctcatctcacacatatacctgtatacatggagacatctgtgttcacctcacatgcaaacctgtacacgaggtggacacatgtctgtccacctcacattcaaacctgtacatgtggacacatgtctgtccacctcacatgcaaacctgtacatgtggacacatgtctgtccacctcacatgcaaacctgtacatgtggacacatgtctgttcatctcacatgcatacctgtacacatggacacatgtctgtccacctcacatgcatacctgtacatgtggacacatgtctgttcatctcacatgcatacctgtacacctggacatgtgtgtgtgtgtagcatatacacacccacacccatacacacccctttggctggatagtgcttcagatttcagtgcaaagattttagcccaaacactgctctctgaagcagatttctctaacccttgggctctctcaaggcaccctgcgttctctccttcacagcacctcccgcaattgcagcttaacaggggatccaggagaggacttccactccagccataaggaaggagcctgtgccacactggctctcttgctgtaaac

SEQ ID NO: 135879 - DNA, 1023 bp, Homo sapiens
ccagggtccacttttgccgcctggcctcaacagccagaccggcggccacaagacccctctctctaaaacaccagacccactgctgggctgcaaaaggaagcgtagaggtggtggccatgtgaggccatccacgcccaagaaaatgcaggaggtggtgaaagacggtagccaggatgccgaccacagccaggggagagctgagcccggccatgagaggcgagacctgcccatccagggcaaagccagtgaggccctgggaggggagggcaccgccaggggccctggcgacactcgcatgtcacagggccagggtaagacagacgaggcaaggcgcctagacgagaaagagagctctgaagacaaaagcagctccctggacagtgacgaggacctggacacagccatcaaggacttgttaaggtccaagcgaaagctcaagaagaggtgcagggagcccagggctgcgtgcaggaagaaggtcaggttcagcacagcccagacgcacttcttggagcagctgggcgggctccggagagactggaaagacaggggcccgccagtgctgaagagctgcctctccaagtccaagagagacagtggcgagggtcctgggaagaaaccccccagtgtctttggcagcacggcagagaggatgaggcaggagggtgccgcgagccaggacgcggccctggccttccgggtgaggagacccgcctccgcctctgcctccgaagggaatccattccccagggagtcccagggcccagctcccagccccggctccctgtctgatgacagcagttcagtggacagcaacgacagcatcgaactggagattaggaagtttttggcggaaaaggccaaggagtcagtgagcagttcagaagttcaggcagagggccccaccgctcttgggacagggggcccagccaggccagaggtgctgtgcaggaaggagcctgccccaccgcctggcgtgtgcacacgcagccagagggccaggggggtcccacatctggccga

SEQ ID NO: 135880 - DNA, 1033 bp, Homo sapiens
gggcgtcgggagcgagagagacaaggggtccgagggccccgcccggggcctgcccagcctgccccttgcgggcttctcgccgctgctgtccacccagctcttccactttggaaagggtgtctcctgggggggcaggcaggctggcctcttcagcccccacctggggctgcctctgcagggcccctccttctcggccttcagggaggcccaggccggacccagccctgtctttggaagcccacacttgctggcaaagaaggacggcggcccctggccaaccaggaaggcacaggcagggctgagtttgcatgacaggaggagctcgggctcggaggaaagcattttagacctgaggtatcgacgaagggtcaacagggatgaccaggagcaggacgccttgggcagtgacgccagtgacttcagcgacacctccacggaggacagtggcggcagctcagtagtgaaggtctaagccctcgagctgtgggttcgcgtcctgggttgcgtgcattcgtggaaagcggcgtagccgtgcgtgtgtgtgatggttccgtggctgcaaggaagggaaacagtctattatacatagccctgtatatatgtacaccaacatgaaacttttatttaacagacgtgtcctggtaaatatgatttttgtagctttttgtaaattatttaaagtgatgtaaaagatatttttggaaaatactgttgttcaattttgtagggtgttcctaactgcagttttctgtgttctgcatacaagtcttagcttaggaaacatttggttcttaccatcacagccaggttcacagaggctctgatgctttttggttgattgctggtgagaatggccggcggtggctgcagtggtagcctgaggaaggccaagctgccctccctgggaatcactcagatgccccaagatgtccgttgggaagctcccaggacagcactttttatacagaggacaccgcctcggccccacgtccttagaggccagagcacatctgaaaactgcaatcacagccgt

SEQ ID NO: 135881 - DNA, 1022 bp, Homo sapiens
ctgcggccccgcgcggatggcgacggaaggggaggccgctcggcctggcctggagggagacctcgctctgccccgcgtcccagccatggcgacatcctcggccgcgctgccccgaatactcggcgcgggtgagcgcgcgcttgcgggaccctggggaggagcatgcgaggaggatgcggaggggcgcggggacccgatggagcggcggggacgtggaggggacccggggcgagcgcggaggggactcggggagggcgcggggacgcggaggggacccgttagggacgcggaggggcccgttggggatgcggtggggagcgggcgtggtgcattcgggactcggcgccaggacctctatctacttccccccaggtgcccgggccccgtcgcgctggttgggctttctcgggaaggcgaccccccggcctgctcggccgagccgcaggacgcttggaagcgcgacggcccttatgatccgcgagtcggaggacagcaccggtaacactgggcgcccagccgagttgggtgggaacgaggagaggccggcagccgcgggggatgcgaaccctagaggggcctgggcgctgcacgcggtcgaaactgcgcgctccgctgggctcctcccactcccgtgctcgccgccgctcggtcctgcctgacgtagcacagcgggctgaggccaccgcctcaccatggatagggtgagagggagcgggcgggccagtggttagcacaggcttcgctccctaggggggtgtcactggaccaccgaggcccggagccccgagctcgcccaggcgggcccaagtgacctgggggcactgggcttggagtctgcccaccttgctggactcctgatggggactttctggctggccacctgagaccacaaggcggggaggtgccagaaagacctgagcaacccgctgggcccctctctttttctcctctgtcttccaagtaagaccaagggacggggttgaccaggttcgaccaggcttacccaggagcaaggtcgggat

SEQ ID NO: 135882 - DNA, 1100 bp, Homo sapiens
gctctgttccccacagagcaaacgcacatggcaacgttggtccgctcagccactggttctgtggtggaacggtggatgtctgcactgtgacatcagctgagtaagtaacaacgactgaggatgccgctgacccagggctggggaaggggactcccagctcagacaggcttggctgtggtttgctttgggaggagagtgaacatcacagggaatggctcatgtcagccccaggagggtgggctggcccctggtccccgggctccttctggccctgcaggcgatagagagcctcaacctgctgccgcttctccttggcccgggtgatggccgtctggaagagcctgcagtagaggtgcacagccagcggagagtcgtcattgccgggtacagggtaggtgatgaggcaggggttgcagttggtgtccacgatgcccactgtggggatgttcatcttggctgcgtctctcacggccacgtgtggctcaaagatgttgttgagcgtgtgcaggaagatgatgaggtccggcaggcggaccgtggggccaaagaggaggcgcgcgttggtcagcatgccgcccctgaagtagcgagtgtgggcgtactcgccacagtcacgggccatgttctcaatcaggtacgagaactgccggttgcggcttataaacaagatgatgcccttgcggtaggccatgtgggcggtgaagttcaaggccagctggaggtgcgtggctgtctgttccaggtcgatgatgtcgtggtccaggcggctcccaaagatgtacggctccataaacctgccagagaccccaccaaggcaagggggatgagagttcacggggccatctccactggctccttgcaggaacacagacgcccaccagggactcccgggctcctctgtgggggcactatgggctgggaagcacaatttgcaacgctccccgtgtgcatggacagcagtgcagacccatccaggccacccctctgcatgcctcgtctcgtggcttaacccctcctaccctctacctcttcccgaaggaatcctaatagaactgaccccatatggatgtgtggacatccaacatgacgccaaaaggaca

SEQ ID NO: 135883 - DNA, 1100 bp, Homo sapiens
atcccccttgccttggtggggtctctggcaggtttatggagccgtacatctttgggagccgcctggaccacgacatcatcgacctggaacagacagccacgcacctccagctggccttgaacttcaccgcccacatggcctaccgcaagggcatcatcttgtttataagccgcaaccggcagttctcgtacctgattgagaacatggcccgtgactgtggcgagtacgcccacactcgctacttcaggggcggcatgctgaccaacgcgcgcctcctctttggccccacggtccgcctgccggacctcatcatcttcctgcacacgctcaacaacatctttgagccacacgtggccgtgagagacgcagccaagatgaacatccccacagtgggcatcgtggacaccaactgcaacccctgcctcatcacctaccctgtacccggcaatgacgactctccgctggctgtgcacctctactgcaggctcttccagacggccatcacccgggccaaggagaagcggcagcaggttgaggctctctatcgcctgcagggccagaaggagcccggggaccaggggccagcccaccctcctggggctgacatgagccattccctgtgatgttcactctcctcccaaagcaaaccacagccaagcctgtctgagctgggagtccccttccccagccctgggtcagcggcatcctcagtcgttgttacttactcagctgatgtcacagtgcagacatccaccgttccaccacagaaccagtggctgagcggaccaacgttgccatgtgcgtttgctctgtggggaacagagcacagagggtgagcgacatgtgcagaacggccccttggctgcagttaggacctcagtggctggtatggccaagctgctagaagatgctgctgtccctgtgatcccagcagccctcccttcaccgtgacccctgacctttgtcaggaaggtgcagtttttcttctcaatctaaatgcctttcaggtgggccgcttccttggctacctggttccagggggctgttttgtaatgagatgctgctggcaggccactcagaggctcccagctgggttggtg

SEQ ID NO: 135884 - DNA, 1037 bp, Homo sapiens
aggcttcctgtagaagatttcagcctggactcctccctgtctcagtaagtgctttgcaagggaggaactgtcttggtggcagacaagggctcttagaggtgtgagagcccttgtttctggggggtcccctcaacccagcatcccctgcagctgggccagggccaccggcacctcccagtacccgctggtgcctctgggtcccaggtgctggggctggagacaggacagtcagtgtgcccccttggagaggagcctgaacttgggaaatgggctccccagaggtgggtggtccgcagcctcaggagaggcggatggcagagcaggggcccttgtcatggtgcctcccagggacaggcaggcaggcagctgctggggcctgggctctggctcagcccaccttggctgcctgtgccggtcgagctcccaggagctgggatgcgctctcggaggctgtgccactccccactgagccgccggggctctgccggtggtgcttcctgacttcagctaagatgtaggtcaaatggaagaggctttgaggccagggcagccaggccctgcgcactcctgggaagccccccgctgccatccaccttcagcgcggtctccaggaggggccccaggcttactgttccatgcacggcaccagcagcagaaaccaccgagcactcagcactcacggctgttgagcatccaggggctgcccggcacccatggtgggacctattattatcccaaaagagtcctggaggctgggaggccagtggccaccaccggacctctatcttcccagcctggggccccatggtgcagagggtgacgggtgtgagatagaagccgtgcccaccacccagggttctcctggccccaccccaggctcccgaggagtcgggtctcagacctgtggaggaaatggatgcgtctgcagccgaggctatagtgtgtgccgccgtggcacggtctggacacagccgatgttcctggacctttggaggcccagctggactcacccttcagccctgagccagcctcacctg

SEQ ID NO: 135885 - DNA, 1122 bp, Homo sapiens
ggacagtcccaggctcagtaagcatgggacccaggctcagtgaatgccaaggacaaagccaggctcagtaaaacaggtgactcaggctcagtgggcactgaggacaaacccagcatttactgacccagggtcagtaaatgctgaggacaaacccaggatcagtaaacaggggacccaggctcagtgagcactgaggacagacccaggctcagtaagcagggaaaccagactttagtgaatgctgaagacagacaggctcagtaagtagggaacccaggctcagtgaatgctgaagacaaactcaggctcagtaagcaggggtcccaggttcagtgagtgctgaggaccgacccaggctctactgctctccacacaattttcccagggatccctgaggacttcctgaccccctctgtctgcttcaccacctgaatctctccctccactgacccatctgtgtccttgctgttttcctggggtggagagtgcacaggccaggtccctggctggctcctgggtgggtgacctagttcatgactgggtcccatgtctccatctgagaccagagagggtctttcacacccacccctatcatgttccagaggggtcagtagatgcctgtgctgagaggggttccgtgggggaaaaccaggtccactgagcctccatctccgttccctccccaccagggcagcgggatagccgctctctggtgtcttcctgagcgtcctgcctcacccactgcaccctccatcccaccctgggcctagagtgggcggcccaggaggaccatggtttcaagactccatctgccctcggccctggcgggggtcagccaaaggccttggtggctaagactgtcctgacatgggagtgagggtcaaggcagaccccagacacacacctggctttgtgtggtacctgcccgcgaggcctgtggggtcaggccccagccccagccccggcctgctccagagctccttccctttcctgactcccaggtcatcgtggccataataagcttcctggagacgatgcttctcatctacctcagctacaaagtgagtgcctgcccgggatggcacctcacagggggtccccaccctccccaccctccccagc

SEQ ID NO: 135886 - DNA, 1395 bp, Homo sapiens
tcacagtgagctctagggcccagaggtggtgggcacaaacacagtcctgaaggcagggccgcccgggcggggcaggggctggctcagagggtctgaccctccgcctggccggcaggactattacgtggtcatcctgtgccccacggagatggatgtccaggtgcgcagagtcctgcagatccctctgtggtcccagcgggtcatctacctccagggctctgcactcaaagaccaggacctcatgcgagccaagtgagtgctggtgggcggagggggtggcatgggggcaccttcctgagtcaggtcggctgctcagggctgaggcattgaccgtcgctctcctggccaatgagagccatgagagcattatagactatccccagggtggaccatctaggtggactgtccagggtggatcgtccggggtggaccatttagggtggatcgtctggggtggaccattcagggtggaccttctgggatggaccatttaggtggaccatacagggtggatcatctggagtgaactgtcaagggtggaccatccagggtggaccatctggggtggaccatctaggatggactgtctggggtggaccattcagggtagaccttctgggatggaccatttagtgtggaccatccagggtggattgtctagggtgggtcatctggggtgaactgtccaggggggaccatccagggtgggtcatctgggatggactgttcagggtggaccatccagtgtagatcatgtggggtggaccatctagggtagactgtccagggtggaccatctggggtgggctgtctggggtgggccattcagagtgaaccatctgggatggatctctagggtggaccatccagggtggatcatctggggtggaccattcaaggtggaccatctagggtggaccatctggggttggtcctctggggtagatcatcaggggcggaccgtctggggtataccctctggggttgtctggggtgggccatccatggtggaccctcttgggtggaccatctggggtggatcgtctggggtggaccatccatggtggaccctcttgggtggaccgtctggggtggatcatccagggtggactgtctggggtggaccctctggggtggattgtctggggtagactgtccggggcctcttgcagtttctctagctcaggtcccaggcccagatgagcaggaccctgcagccaggcccttgtccctgcaccatacccactgtggagcagcccaggcaagcccaacccagctaagtctctgtctcccttttcagggtgaggggcagccttttgcgagctccaccttcccctgctccaagtctagggaaatctttgtcaagttctagggaggctcaaaatagaacagggg

SEQ ID NO: 135887 - DNA, 1123 bp, Homo sapiens
cgcttttgcagtggctcgcactgctgtggccactgctgaccactgaggctcccagcggagggtgttcacagccaggtcccgggccacggagctcccttacttgaagttctccttcagcatagattagacgtgatccactttgctttcttgcttctcacctcgcccccttgcacattgcctgacaccctcatattggccagctgtaatctcgtgactatgggactgaggctcaatcttggcttggggtgtttgaatgtctatagcaaaggaattcataatgggaaatctttttcatttgagaaattgtatgatatttattggttgtgtctactgccaacatttatatccaattctaagatttctgaaaaaaaattcttatcccttgctgctcagaaaaagtttacggaaaacaccagttcactaaaagcaccgaaatctgcaaagcctgtcttccgctagaacaacgtctacaaatgtgaagatgatgacttctggcacgcggtcatgagggtggggaatggcactaggagctgatgtttgcctcatttaaagtaggcaagccgagccaactgcagccatcattcattaagttttgggtagtgctctaatggtttgttcactttaataaagacagattttggtaaagtagaatatttttcattctgagcatgtttgtcccaaaaggtgatgcacttaagctgacagtcccttcagtggttttgttaggtcacggcttgtcctgtctggattctgcatctggaagcgctgcatgctctcagaggagcgtgccgtttcccctgtagatggatacttttgttttgttgcctatttaaaaacaattaagtggttatttgcagttatttcagaactccaagtaagtggatggctttgggttctttctgccttggtcccaatggtgttgatgcttctgtggagcgcggacattcccaggagcaggtgcgtgccagccatggctgccagacactgctgcaactgaccagctgccggaagattctggagccactaacattagttttgcacatattttcttgggagtgttacttgaatctatctcaaactgcagaaaaaatcaaaagatcaataattgggagaaaaagagaca

SEQ ID NO: 135888 - DNA, 3433 bp, Homo sapiens
gtggtgtggcagcaggtggagtcaggtatgagggtccagccagatcccagaactatacaggtgtcaaatagtgcctgcccttaacactaggaacttcttccgttctggcgaatatagtcatttgtcatggagtgggctaattactgtaattttaatcagtgtttagaaaatgtctgagctttaatttgtaggatgataaatagagattaatactgataaatagaaacaaaagctctttgaggtcctcagtaattttgaagggtatcaagaggtcctgggactagagtgtttgagaatcacaaagctgaaattatctctgattttcttctgctctgtggaagagtgagtttaaatctcctgcatatgagaggcgtattctctttgtgtggccggcattctcaccccctggtccatgttgggggtctttggtgtataccgcagcgcacccagtgggccttccctgtgtttcaggcctgcgtcccagccaacaccttttgctctacatcacgctgcgagttgtgaagtggatcccagctctggcgacagcatcagcttggcccgctccatcagcaaagacagtttggcatccaacattgttaatctgaccccacagaaccagccacaccccacggccacgaagagccacgggaagagcctcctgagcaatgtcagtattgaggatgaggaagaggagcttgtggctattgttagagcagacgtggttccccagcaggctgacccggagttccccagggcctcaccccgggccttaggccttacagcaaatgcccggtctccccaaggacagctggacacctcggaaagtaagcctgacagttttttcttggagcctttgatgccagcagttcttaagccagcgaaagagaagcaggtgatcaccaaggaggatgaacggggggaagggagaccgaggagcatcgtgtctaggaggcccagcgagggcccccagcctttggtacgaaggaaaatgactggcagtcgcgacttgaataggacttttaccccgattccatgctcagaattccccatgggcatcgaccccaccgagacaggaccactgtcagtggaaaccgcaggagaggtctgtggtgggcctctggcccttggcggattcgatccgttcccccagggaccatccacggatggcttcttccttcatgtaggcagggccgatgaagacaccgagggaaggttatatgttagttgttcaaaaagccccaactcccacgattcagagccgtggactctcctcaggcaggattctgactcggatgtggtggacatagaggaagccgagcacgatttcatgggtgaggcccatcctgtggttttcagcagatacattggggaggaagagtcggccaaactgcaggaggacatgaaggtgaaggaacatgaagacaaagatgacgccagcggccgctcgagcccctgcctgagcacagcctctcagatgagcagtgtctccatggcgagtgggagcgtgaagatgaccagctttgcggagaggaagctccagagactcaacagctgtgagaccaagtccagcaccagcagctcccagaagaccacgccagatgcgtctgagagctgcccagcccctctgacgacgtggaggcagaagagggagcagagtccgagccagcatggcaaggatcccgccagcctcctggcatctgagctggtacagctgcacatgcagctggaggagaagcgcagggccatcgaggcccagaagaagaagatggaggcgctgtcggcaaggcagcgcctgaagctcggcaaggctgcattcctgcatgtggtgaagaagggcaaggccgaggctgccccacccctcaggccggagcactttgcaaaggagtactctcagcacaacggggaggactgtggggacgctgtttccaaaaccgaagactttctcgtgaaggaggagcagagagaggagctccttcacgagccacaggatgtggacaaagagagcctggcctttgctcagcaacataaagcaaaagaccctgtggctctgcacgagctggagagaaataaggtgatctccgctgccctcctggaggacactgttggggaggttgtcgacgtgaatgaatgtgacctttccatcgagaagcttaacgaaaccatcagtacgctgcagcaggccatcctgaaaatctctcagcagcaagagcagcttctgatgaagtcccccacagtcccagtgccaggctctaagaataactcgcaggaccacaaagtgaaggcaccagtccacttcgtggagccactctctcccacgggcgtggctggccaccgcaaagccccccggctgggtcaaggccggaattcccgttccggaaggccggcggagctgaaggtcccaaaagacaggccacagggctcctcccgaagtaaaaccccaacgcccagtgtagagacgctcccgcacttgagacccttccctgccagcagccaccctcggacgcccacggaccctggcctggacagtgccctggagcccagtggtgacccacatgggaagtgtctcttcgacagttacaggctccatgatgaaagcaatcagcggacacttactctgtcctcttccaaagatgccaacattctttcggagcagatgagcctcaaagaagttctggatgcgagtgtgaaggaggtggggtccagctcctcagatgtctcgggaaaagagagcgtccccgtggaggagcctctgaggagcagggccagcctcattgaagtggacctctccgacctgaaggcccccgacgaggatggggagctggtaagcctcgatggctcggcggaccttgtcagcgaaggcgaccagaagccgggggtcggcttcttcttcaaggtaagggattggtagcatctgtttcaggcactcgtgatgtgttgccaccccacgtgatagtgagttagagaacacagatctgcaccaggctggccagccgctcctgtaagaggccaggggatgtgtgtgtttagctttgtgggccacagagtctctgtcccgaggactccacttggccagaagcagtcccgggcaatacgcatgcaagtgagcgtggtgtggctgagacgactttgttatgagccctgaaactggaatttcatgtgattttcaacatagtttttttttttttgctggttttccagtcaaaaccctgtcatctccctgtcctgccccaaagcgtaaaaagcgttcgtcgttagaatgctctggaggtggccaggcctggcctgtgggctgaagtttgccaacctctgatatagcaacttcaaaaaacattttttgtatgtttttcttgtaattttttccttagatatgaagggaagcgtaaactgaactgttttaatagtcagtgcgtcacatgatgtttgctgtgacgtt

SEQ ID NO: 135889 - DNA, 4669 bp, Homo sapiens
tctgtatctgtgtaattggcctaaacaatacctatgtctaggagtcagaggtgaatcaggtgaagtgggggtctctgggggataattgtggagatacaattgtgcgggacagcaattacctctttaatgcatttctcttctactttaggtaaatcttaaaatgagagagataacagagaaagaagttaaattaaaacaacagttattggaaagtccagctcatcaaaaggtaaagggtaaatttaatttttctggaatgcactaagttaatgttggtcccaattttaaagaattctgttagttcccactatttgcttattctctatttttactcaccaaagaagcagctagtctcttggattcacctggtgggctgattctccacacctcagtgagatgtgaccacggcagcctgccccgcctctcctgggaaggggtgttttgtattgcactttatggtgcgtgagggtatttgggggaattgggaagcttgagtgagggacgtagggcccacctgggtgctagcttccacaagtcaacaaacaagggggaaattgcctgttgctaaagatgccctcgaaaagtccttaagtggctcatgaggtacagcgtagctggtggtgtacctgtgtgcctgtgccatgattctgctggatgaaccctacgtgcctactgaagtagcacgatggctgggctgcaccttccagccattagcctttttcttcctctgacgttattttctcttttgcaagcacatgtgtgactgaattcactcagttcagtgcacacaagatgcagcccgaccatctataaggtctcgcctttgaagggcagtgtgctgccttcccctgttccttcttccccctccagtggcaccagcccctggccatgcatttgttagctgggtgggtgggtgagtcaggccgcctggtatgcctccctcatctggatcttaagcattgagcttcctccctgttcctcagatggtcatgtttaacacatgggtacagactaagcactagacccttcccgcgtcagagctgacttcttgccttttggtacccagcccataccaagtttccgaagttttctttgctactgcaaagaatagtgttgtggaggtgactcgtgatcttccactttaatcatctgctaatacaacatgactatggccacgtacacttagaagactttgcttaccagaggctctcccgcctctgccgtgtaaacgccgtggggaagtgtgtgttacctcgtccacacgtggacctgctctgctgatgctcctctcctgccttccttctctcgcttcctgagcagtctccctccaagtggtattggaagttagtgcctgtaagtgaaccccaagccgccagctgccatctacagagccatcctgtcgcgatcacttgcttccattaaaaactgctcgcacccaaaactgtttttttgttgttgttgtttaaatgtcccaccttggagttatttatatagtacaagaattggcctgattctgagccgaataggccttgtaatatggcactttggaactcttaagttacatttcgcccagtttcctagttacttctttaagtgatcaacgtgcacgtaatgagagggcatttttgtgatagatacagagggaatgagaagtggtctagttgcccaagttactctgtatattttgttctttctgatgttaccttgcctgactgtggtatgtaatgtgacatctgttaggagccatcagctgggtggtccaggtatgcgggtgatgcacctggtggactagggctggagggctgcagagaggggctctcaccagcatgtcagattcctctgttctcctcctcgggtgttgcagccattcctgctgcctcggcctgcatggagtggggaaggggcgtttccttattcccaggcaagggtctgagttaggtcagcctggccacaggctttctggagttaagtgtgaattttcacataaaaagaaaggtgaaaacagcatttggttttccaaccctagttgtgctccacctggtggcccattctggaagcggagccagtttgttaccaggcccctggggagagagtacttggtgccagtggtgcctttctcgggaacttttggatggagatcttgcagagggctttatgcatactccattaactgcctgtgtccttcagtgtcattattgggcccctattttcctttgaagtccatcctcgaggcgatagcagcgggagtaagctgggatacagggctcctttgagcagcggtagattctgctgcagagctcacagatcattttgcctctcttgaaatatattaataagaagaaagaggaaagcattctaaatcaatatagatcttttaactttttgaatcctgaagactgaagagctaaatatcaaagcacttacgtgatttagtcaagggctcacagacttcgtctgtcctgcaggaagtgaggtcacatgagagttttataaaaacagaaacatgttaccaagggtggtgggtcccttaatgcttttttattagatagttcataaccctaactttccgaccccagtgttcagtaaataggtcagtgaggagaagtgtggaaaggcctgggaaagacggacagatttagaggtctaacctcaacactgtacagcctagaggttcacagcacctgatttgcaaggcagctatacaagttcctggactcttgtagttccggagtgtttcacctgaccttaagcccaccccatccatctttaatcaagaaaccatgtgctttcccgcatgcctgtgttcccccctcacgtgtctgctgtctgtgtggaagcctggcctggcgcatgctgtggtgcactgcatgctggaacccgtggagtttgcacgcgtggtacagtatgaggcgggtcacgttttgtagtgtgtgccgtgggctcccgagaaacaagttaaagtgtgtgctgaaatagattttattgacataaaataagccttattgctaaatttaagagaatgtgttacaaatgttttttgctaaacatcagtattgattattctacatgatgtacttattgacataacaacctgaaattcttgattttagacaatttctcctcaagttgattcagctgcatgactctcagaaatcagtcattttttattgtagattgctggttttcttcctctagtttgtatcgtgtattttcctcctgtggagaaaatgtggttggcaagaaatgccatattttaaagctgtatcgtggctgttaatgcagaaaacaccagtgtactgcaggctgtttggcagtggggctggggctgagtgtcctgccctcagtggcctgtgtctgtgctcttgttcgctgacatgcagatacaggggcagatctgagggtttgatggagtgcagaaggccacacgtgtggctttctgtaaatgcagaaacatggaatccttgagcagacacttgtcttctggagcaccttgcatggatttcgcctcctgatgcttcattgccgttaatagagtggtggtggttgtgttatgagaaattttgtctaacctggcttctgaaatttctcaaactaaatattcatgctgttttgtgtttttcttaatgactgaggctagtgatattactcagaaaagtaacagtaacttgggtcttctgagcgtcaggatgttcaccatttaacttgtttctcgttagtgtctagtacgtcggctttcggtagtgtaggtgtgtgttctgtgtcctttcccgtgtgtgcctgcactagtggcagcctctgcttccaggtcagtttagagtagactggctctggtattgctagcaagtagttgctgttacccagtgtagccatgaagcccagctccttggatcttgacatatatgttccaggcaaagtacgtaatccagacgtttctaactctttctagattattgcaattgttctccatgttgtctgttaggcgttatgttaattctcgatctaacagtgtgcctgtaacatatatggtagtgaagagacatcacatgcagagaccgttttccttttatcaactacaggtccgctatcgacgagagcacctttctgctaggcagtcaccctacttcccgttgttggaggatttgatgagagacggcagtgatggtgctgctctcttagctgtgattcactattattgcccagagcagatgaaactggatggtgagtggagaatgcttccctgaaacagatccgaaaaggcttaaaggaaaattatagtgtacattgatccacatatatattaaaaaaaaaaaagagaaagaaaatggaatccttaatataaattgggatgttagcctatagatgaaaaaattgggggatgatgtgctcatacttaacctgcattttatctgatgacaaaactgcactttgaaattagctgggtgtggtggcacacgcctgtggtcccagccactcgggaggctaaggtgagaggatcaccttagcccggggtggggtgggcggggggtggtggagagggagagagaaatggtacttcaaagtatctgagtaatgtgtgaaagtatttgtgactttatctatgtctcagaatgggtagcttttgtaaatccttcctcaattgatttaaatcacctagaacttagtttgagga

SEQ ID NO: 135890 - DNA, 1048 bp, Homo sapiens
actttgttttttgtttgcttgtttttttttggccaaatctgaacctaaagattgtaacattttcctttctattagtttgtgtaggtgtcttttcccatgtcttcccatatcttgggcattattaaaaattacttgcccatttgaaaggtgaaaaatagtgtctttttctatggtaaagacatagaaaaacttaattctgggtaaaattgcagattctgggtaagagcatctgtcccttactctccttctctggtgaatcacttgtttgttatctttgcccgtatttttttgggcaagagggtatgtttctttttcccctgcttggtcacgtttctcatttgctgtgcatttgtaagtgacttttcaggctgttgctggcctctgtgtttctgtggacttggcagataaatagaaggtggtctccttgtaaccagagacatcattttccttccatgctattctcgtttctacctctgtattttaaagaaatacattgtatttccggctcctgactcctcatttgtggacatgatctactgaggtaggattgtgacaaatggcaattacagtgattacagtttccatggccctccactcccctcctcctcattcccctgcggttgcattgacagctttggacacgttcacagtcagacttgatgttcctgtggtcaggcgcccattttcacaactcatgttcctttccttgtattatgctttgtttttcctggagttaatacttggtttagttttcatgaccttttcttttttctcatgcattatttacatttgtattcagtgttttccatattttactgttttcttgccatttccatatgaatttaagttccttacgttagtggtttctccttatgtgactttctcccgggtgcgagtcctcactgcaggatgcgataccggctgaatgcttccaaagcaccttttgcagtgtgaatgcccgggtgtgtaggaagtgcgagttccccgagcaaactctctcacccgcgctgtgttcctaggccctctccggtgtgggttctcagatgct

SEQ ID NO: 135891 - DNA, 1071 bp, Homo sapiens
aggggccatcctctggagccgtgggctctcgtgtggcgcacctggtgcatggatggtgtgaacacggtgtgcggcgaggtggtggagacccgtgcttttgcacactggcgttccttaggaaactgcatatcttttaaagcacatgactgttgtggagaatggggaaaagagagctttcattgagctctttttctcattgggaatgctctgtgaatgctgagattggagtgaggcctgttaataaaaatacttgaagcagactttttacagatgagaaatgtaattgttgcacccattctgttaggttgtttcatgcatactttgtgctaaaataactcagtctgcctttttctcccccaagtatcccacccccatctttctctgaagccttgctactggtgtgccttttccagagcgttctgggtcagggccattctcggtgcctcctgcactgcctttgtttggttgctcccatggcgttcccggtgagactgcgggtgccgtgcggtggttgaagagagtgtcattcctgtcgaatgaggaagctgcactaaggcgtggtgcagctgtagcaggtagagctctggactaggagccagaggcctctggtgggcagttggcctggggcaggtctcctgtctgccttcccacaaccacgacctgggagctgcaccgcctttcctgggagtcccacagggctgttgaggagataagaaaggacagtgtgagacagtgcactgtgggccacagggctggcctgcctgcctgagaacggactcctggttccagacggtcttgaggcttgaccagaaatgccaggcttggaacagtgatggtgcgggggaggcaggtctcaaatctgagtatctcttcagacggaaagggcgagggatgaagaaattaggccagaatgctgagtatgagcaggttccctgcatcagaacctggtaagaggggtgggtttgagggattatagctgctgcctctgcccctagagtgcccacatggcaatggtggatgccctgatgatggcctacactgtggagatgatcagcatcgagaaggtggtgg

SEQ ID NO: 135892 - DNA, 1001 bp, Homo sapiens
aaggtgattatatgaatcactttatattgattaattttaaaagtgggtcaccctatggcaaacgtttctacttggtagattgtaaaagagaaacttaaatcagagccatggttgctttttcctgtctggccaggtttctgcatctgtgaggtaggctctgccattctccctggggctcaccctgcttccatctaatgccagccctccacttacgtgcctgtcccgtctcccactctgcacagagccatcactctgaggggtcccctggggcctttctcctcagctgtgccagtttctgctctcctagggggactgcatcacagttgtctaagtgggaggagagggtggcttggaccaggccggttaggctcgaggtgcccccagacatctacatggagatgtcagataggcagttcagggaagtgatcagggccagaaatgtacatttggggatgactgtgtgtctgtggtatttctagccatgagactgaattaggtcattagggaggagtgagataggaagtgccccttccaatatttggagaagtgaggggcagctggcctaggagatggggatggagcaggcagcgagatgggaggaagaggccaggtaccccgaaaggagaaaggcagctccctccaagagccctgactaggtgggctgctggtgtggtcagttgaataagaggaaggctgagagtgactgtcgcatctttccccgcagccggtgtgaactgctgcaaacgttttcaggttatgggatcccttgctcagtgccctcccctgacttccctccacggcccatgggtggagggaacttggacaaacatgggcccacaggccgcctgtttgtccctggccaccttgctcttgtttcctgggacgtctcactccggcgtgtgcggggtggctctgtgctcacctctgcaggtcagctttccttgagcagtttgtaaggacagcagaagtcttcccgttgtgcttggcattggggcctgttc

SEQ ID NO: 135893 - DNA, 1059 bp, Homo sapiens
ctacacctctccattgcaaagctccccttgggtcccacaggctcatctctcctgtccccgactgccctcctcctccacactactggtttcctgtcttaggaaaagggaccgtcctgctccaggctggcaggaattataagtttggtgtttttgtcgtactgcatcaggcacaggcctgctgctcacgcctcctgggcagtggttccccttcccggggctgcctgcctgtgtcagcctccattgtctctcctggcggtgaccacagcagcctcctgggtccacgctcattctccactcttgtttacggggagctccagcagatgggatctcctcgtcctctggcttgtctgacccccttacttgatgtggtctcattgcattccttgtgtgcccgcctaagcctgtctcgctctgctgacagatcccgcagggcccaggtcctcccagcgcaggcacgcacaagagcctggtgagctaatgaatgaaacatccagtttgcctcttccgcgcaattctgaactgctgtcacttgctgaaattctcttaacagggtcattttcatgttttcctctcgctcctacccacccccctactggctgcttccttccctaagaaacttctccacctgcacatcccactgccccactgccccactcctcagtgcgggactggtgtctcctgcaccccagtcccccagcactcatcctgtgtgacaccctccacattgcgtggaaattacctgttgacttttcagttgtcttacgaggctcagcctgagaacagtgactttatctcttcctgtttgactccctggcatttttgtacattttctggctcacatgggtacttaataattgtcgaatgaatgtgtattaattctaacagtcttactggtttgtagaaaaaacaacaagaaactattagaaatacattgaaggcatcacaaagtttttttttttttttaagtaggtattgattttgatagaacgttaaacgttctagaactgtgcacatccagctctcgcagtagttgctttcactgaagccagttactcatgg

SEQ ID NO: 135894 - DNA, 1458 bp, Homo sapiens
tgtgaagcctgggttttagtccccatctcagggaccagcagtttcatgatataggcaacaagaagagtttacactccggtttgctaacttgacatgatgagcaaaatccctttataatcaactccagagggtcgccatattgtttccttgtagtgacttttcgttaaaatgaaatctgtgctcagagcccctttccacctccagaacttgccctcctgtgtaaaactgtgtaaaaattgagactctttatttaaatttacaggtgaaaccactgcgtgtcttcctccctgtgttggcaggagggcaacagtggttggagtcttggtgtgaagaggctgctcttgatggcagcacacttgtaagcacattgccacatttctgaaggtgatgacttgttcagattattggtttatgagtttagattgtatatttaaatcgtctttggttgttcttgacaagggatttgggtgtttctgacatgggggttacagagcatcttcaaatgcttcctgagcacctgttaggtggtactaaatactgtgggagttgctagttggtccagctagcatgacctttcctctgcagaggtgtcctgagaaccacctgctgcctagttatgtgtgcatctctgtgaggccagggattatggttgtcccacttactgctgtgtccacagtacagagtgctcaaatacttgttgaatggttagcccctaagagcagaggggagggcagctggctacagccctgtgcagaggagaggtgtcttcgggtgtactgagtagattaaccttgttgaggcggaggatttgtggactgaaatagtaagtgattagtttggaaaatagtctggggccagattgtttatggtgctcaggttggctggggatttctttgatgatgttcgcctgggagggtttttaagtagggggatgtcgtgccgagagagcgagcctgggaagatgtttttagcaggtttgagtgggtagaggccatagacaggtgttctacctgagagttgatgtcgttaggctggaaatgccaaagacttgcctgttcttgtttttatttttttgagacagggtcttgctctgttgcccaggctggagtacagtggcatgatcacagcttactgcagccttgacctccttgagctcaagtgatcctcccacctcagcctcccgagttgctaggatcacagctaggaccacaggcctgcacctcctggtccggttaattattattttttgtagaggtggagttttcctgtgttgcccaggcttctcaaactcctgggctcaagcagtgctcctacccaccttggcctcccaaagtgctgggatcacaggtatgagtgagtgagttagtccactgtgcccagatggacttgcctgtctgtcggcagagggaataggaagggtagatagagccaacagatatacaagctgaatctatggag

SEQ ID NO: 135895 - DNA, 1298 bp, Homo sapiens
ttttgtctttttagtagagatggggtttcaccatgttggccatgctggtctcgaactcctgaccccaagtaattcacccaccttggcctcccaaagtgctgggattacaggcatgtgtcaccttccagaggccctggatcttgatagcagcgctttgggactgggtggctggctggggcactgcgctttgggtgtggaccctgccattttgccccctcccacctcttggctgtgtctgccccgctcccctgccactgggtctccctgtggagggtgctggggtgccgctttccctctcatgagcctagggctcctggcccggggtctcaagcccagctctctgggagttgccggcaggactggatggcaggggagcacagggcagggtggcgggggatggagcgctagctcctgaggctcgctccttgtcccctgccaccgatgcagttctaggaggctggaatggtcttgcgtccatgctctgctcttggcctgagcctttgtagctccgctgatccctccatcctcgtcctctgccgtcttctgagaatgtgctgtcactcttccggttctgttcctctcccatcacttttgttctcgtgagtttctactgccatgactgcccttcaggagcttccagaaggagcagagatgagttcgtggttttggcctcggggctcagctgcagcctgggtggttcttctggagtcgcctcccttgccccagccctgccacggtccctgtgtggttgtcgttctgtgacccttgctcctgctctgcccctcacctaccgcttcactcttatttacgtcagagcagacgctgaggacacgtctgctgtccctgggccttgcacagaactctccaggctcccccagctcatcaaggagtttacacctctggctcctaaaggagacggagtctttcttgggcagagctccgctgattcagttgtcatcgtctttttgctgctcttacgttcacctcagactttctgattacgtttctgtgtagaaaaaacaagaccagaaagctccagataaagaggccatactgcgggccaccgccaacctgccctcctacaacatggaccgggccgcggtccagaccaacatgagagacgtgagtgtcagcccagagcggcggcgggtgcatggggtccccgtgtgggggattgctgtgggggggttcctgcggggcggggcagcaagaggagattctctgggaggatttggggaagccggtgagcgggtctgtaggactgcactattttgcattttttctgtaaatcaaaaatt

SEQ ID NO: 135896 - DNA, 1048 bp, Homo sapiens
agccaagctgagagcagtcatgccgagcgctcctcttatccccatctcaggctctctgtgagccagtcttctttctgggcagcctttctggcccctttcatgcgtctgtggaaaaaagaaaaacagctacccaaaacttaggtagatctttaggtcatcaggaaacaatggatctgctgttttcatttaaaattattttccagatctttctagaccaaagaagcaattctggtggccgcgaattgtcagtagggtgtggtatatcagagctgggagcttgcttcaggagtactccatgggctggggatcagctcactggtgctatgatgcttcatttggcatctaccattagtgggaattctttaatttcatccatggtgtaatttcttagctcataagaaaacccagtaaattcctggtgtagcttgggatgccaggtcctatattattagaattacgatttacttattttctaccttgaaatttctatttttccccagtgtgctcatgggagcttagaagatcccaaaagtataacccatcataaattaatccacgctgcctcagagagggtgctgagtgatgccaggaccatcctggaagagaacatccaggaccaaggtaaggctgctgtgggcgggcgggttggcagcaggcatcgtgcactgctgggggcgctggagccaggagggggtggtccacccacaggagtcagtgttctgagctggacacgagcacaaaaacgagatcgactaaaagcattctgtttttcctttattaaaaagagttctgttatagagtatttgtgaaaaacagcagaaattgaaattgaacaagcagcaggcatttgagaagccaaatgtgaattttgcttttagttctgtttcagagcaaagccagagactccaggggttctgcaggtttcaccttcgttgtggtgatgttggcatcccagtgcagtgttagacacacacatccatgtaattgcttatggttttgtgtctggaggcacttgaagagcagacatcagttttgtctgtgtcattca

SEQ ID NO: 135897 - DNA, 1020 bp, Homo sapiens
acctacccaggtgtccctcccttttgttttggaggcctgtgtccttgtccaggggcagccctccttcccaggtgtggccagaagaaccccccatcccaagacttgaaatgtctgttgctcacctctgtccctccagaactcggcttccccatcttcacttgcaaaacaagtgcagccctgcgcccatcagcaccccctccggtgtgcacacaggccagtgagcggtggccgaccagcgcaccccactcccccaacctccacaacccatcaagcggaggccgcctccgctaggggaggaccatgtgctgcaccctggcctggggacctacagggtgtgggttagacgcattcccactgggcggctcctttctgccccgaagcccacccctgtggcgaggccctaggagacctcccgtggggccgcctctacagacagcactcagcctcctgggctgcctccagccaggcccagcacatgcctgccctccagaaaaatacgttgctttccagaaggaggtgggggaccatgggcaggcactgtggacgctaacctcggcccctccacccattcctcagggcccacgtccagggggaccaagacctgcattcctagggctgcaggtggctcagtggtgcagaggcatccagaccttctgctgaactaagaaccacccagcctagagggagcctttctctgcctcttcctcccctgtcttgggcacaggtggggttggagcccccatggggcccgctgggaacctggaccaagccttcctcggagatgggaggaagccgcggggtggagcaggggcaggtaggtgaggttgagctgcacttgagttccctctggagtttccttcatctgccccacacccaaatttgcactttaatttgaccatccctgggggcctggctgctgacagaagggctctctctgccctccactccaaagtgggtgcccccccacccttggccaggacagggagggagccgctggctgctgccggaggtggtggctgc

SEQ ID NO: 135898 - DNA, 1075 bp, Homo sapiens
actcacggggcctctgaatggcccttccgggggccacgagggatgagccgtcctgtctctgccatgaacaagtctctctgcgggttctccgttaaagcccagttgtagcctggaccttgaagctcagctcctgcagagggtgagctgggggccggggaggtggaggctgcgtgaagacattgaggcacctttgcggacgagcttccactcggggcggggtgtttttagccagcagcacccggtgcacggcaaggcagaaatagaagaggcttttttggccgctctggtgctgacagtctctggctcttggggagctgggcaggggctggggaggggcgggtgttccaagcacaaacaacttctgctgtttagaaaaacatctcgagacgaggtggttgtggatggggaattatttctgttggtgaactctttatgtaaatgccacgcaccgtgcggcttctccgcgtgtgtaatcacagcaggctgcaccgggggtgggggtgtgtaattatgttttaaaataccacccgggttgttttgctgtgttccctgagcactcgggtaattctgggcttatcctgcgatgctctgccccaccgggaaatgctgcctgacccctgtagtggccgggcaggggctgtgcacccacctttgaggccccctttctggcctctgttctgttgcagcctctgcttgggtgtccctgggccttgggaagctccccttcctgggactgacaggtgcagtgcgtaccacgctcatcctgggccagtgggtccctggggagggagtgtcagggtgactccagggtgggtggtttcagaccccgcatggttctcaggagtggaacacctgctgccttcagtggggcgcccgctgtggattcaggatgtggggtcctcagaaaccaaggtttcagccccccagggctgggtggcctgcccctccctgacaggcgctgggtgcaaaggtgactctgggaccctccctgcctcctgccctcctcaggctgctccccagcagcccccttggcagcccccccacgccccgaggctcagccacccctgtagagttt

SEQ ID NO: 135899 - DNA, 1066 bp, Homo sapiens
tggcccttcctgagggcagagcacaccgggctccggctcaccacagaggccgtacaggatgtcagtgcttgtggacccggctggctgaggcctccggggaatccgccccatgtgcgctttccctctgcccctgctgacagccaccccagggaaggcaggggaccagccagaggctgctggggaaggctcccaaggcccacccagggcccctgttgggaaggagctctgtccatgggctccagtcccagggcagaaccccagacaggctgggcacccctacagtccctgaggacatcccccattgatggcagccagacagtgccctgccgacaatggcagccagacagggccctgccgacgggttgccgacgggtcagggagctgcaccatggagatggaaacagacccatcgtatccaaacatcttcccagggtcctccctgcacagccccctgctgctccaatgtgaccttgggccttggtgtgtttggggtgatgggagccagggctgggtgtcgggtttgctgggagcacggtgaagcctcgtgacttgtcccatgcatctgcccctgggtgctgggtcagccttaagccctcacatcgcctggacttcgtgagctagaagccctcacgcccacctgccttgatgggtttttggggagtcagcaggaccgcagccaggaagcggctctgtggagtcccggatgtgtgttgggtggggacgggaggcagctgctctggtgagtccttccctccaactcccccgtactcagaccacacgaggtacagtcccattggggctgaggggtggggacaccctcaaggccatgttcctgcagggctttgtccaggccgcaggtgctgcgcggcattctctgcctttgcacgggtgtcgctgatgccagcgaggtggaaagtgggcggctgggaggccaggcctgctcccgcccacctaccatacagtttggctctggatgccacagtctgggtttcttgtcatggtttttctgttcggcaagcccataagtggggcagagaaagggggtgtgtgatttcttggttaaaat

SEQ ID NO: 135900 - DNA, 1054 bp, Homo sapiens
ctgatgtggctgagattcaggtgcctgacctgtcccccagccattcccacgcccctttctgtcccgatgtcggggctgggctggcccctcttgcctcgcacaggtttatggcctaggagtacattcccctggagtcccgtctatgcatccaggtacggttccagggccagtgagcgggccacgtcccacctccaagcctcagttttctcatctgtacagtagggtaatggtatttctcctgcgcttactttaaggattaaatggaaaaacctgtattaaggattgccatttaaagattaaatggaaaagcctgggcctttagttcctgaaatgagagagccagaattatttggagaacctgcccccagatgtgcctgtccccctcatgaattctgcattccgagggactgagcttcgtggaattctggcgtcttctggcctgcaggcgagtggggctggccacaaggttgcggggggtgggggtcctggggacccctgccaggtggtgggtatgcacccggccttggggatgagggtttgagtgggtgcctggtccatcccactctctaccactgtgtctgtaaactcgtgcatggattgtttaaagatagtacggcaaacctcgtgattataaaagtatgattgggccggacgcggtggctcatgcctataatcccagcactttgggaggccgaggcgggtggatcacgaggtcaggagtttgagaccagcctggctaacatggtgaaaccccgtctctactaaaaagaagtacaaaaaaacccaaaacaaaactatgattggactgatattatttacgtggttttcactcccaaaggcacacctttgcgtataaagcacaagtcagtattcatcactgattccttattcacttttcaaactactttcacttaccttttattactttataaataattttaagcacaattttgttgcccccttgcctgctccccggtgtgggggtggccagagtccttggggtcccctcgcatttcccgggtgaccacacagctgccccctgctcaggtgtcac

SEQ ID NO: 135901 - DNA, 1011 bp, Homo sapiens
gaaggcaggcactgcgctttgctgctctgaaggcccatggagggtcctggccacattcagggagtggcttctgaaggtttttagaatgtccaacaagggtccccaggggtgacttggttttctccagcccgaggtgaagggcctggaggcggctcctgcccgtcggagctgccctgcgtggcgcccggactccgggctctgccaacccctcccatcggagctgccctgcgcggtgcccagtctctgggctctgccaacccctcccatcagagccgttctgtgcagtgcccagcctccgggctctgccagcccctcccattggagctgccctgcacggcgcccggcctctgggctctgccaaccccttgtttccacagtgagttcaggattgtggagggacctaccccacctggctacccagcattggcaggtggggactttgcttcagatgtttaagaaaaaaggtaaaagataaagtaattaaacttacagaaaaatgtcaagtattgtacaaagaacattttcccgaacgatttgaggtaaacctcccctgcatacctgtgtgtcttgttccagtgtgggcagagggctgcccgccacccgcctgtacccaccccctggcagccgcctcccaggcccctcctggccttacaccagcagatccagtgcagacccctcagtacagttacttgttgagtctctttaaatttaattaaaaactttttttttttttgagagtcttgctctgtcgcccaggctggagtgcagtggtgcaatcgcagcctcaaactcgggctcaggtgatctccccgcctcagcctctggagtagctgggactataggtgtggatccccacacatggctgatttaaaaaaaatttttgtgcaccaccacatctggctaattaaaaaaatttttttgggtcgggcacagtggttcacacctgtaatcccagctacacaggaggctgaggcacaagaatcacttgaaccctggaggcggaggttgcag

SEQ ID NO: 135902 - DNA, 1123 bp, Homo sapiens
actgcctaagagcagagtgtggtccagctagtggggagctgcgaggatcctgcaggaaagagccactcttgccccttcccatccgttttggcattgaccacttccgggggcctcccctggccactgtccccaaggccccctttccccagtgctgccctagaacaagcactttggcttccccaggtggtgggccccttggaagtatccttgggagggtttgtggaaaagagcccaggagtgcctgcagatcccgccctggactccattttcccgtagtcctggtgctggagtttgtgtccactttcgccagctgattgcctggggagggatccgcatggtgtcctcatactgacgtgggttttgcggctctccccgcaggccgacgcctccccccagggtcagctgcgggctcccaggcctaggcgcccatgacccctacgccaacagccgcctggacaccgccgccgccactgcgacctagcgccgccgccgccggggcccaatgccggtcatgcccattccgcggcgggtgcgctccttccacggcccgcacaccacctgcctgcatgcggcctgcgggcccgtgcgcgcctcccacctggcccgcaccaagtacaacaacttcgacgtgtacatcaagacgcgctggctgtacggcttcatccgcttcctactctactttagctgcagcctgttcactgcggcgctctggggtgcgctggccgccctcttctgcctacagtacctgggcgttcgcgtcctgctgcgcttccagcgcaagctgtcggtgctgctgctgctgctgggccgccggcgcgtggacttccgcctggtgaacgagctgctcgtctatggcatccacgtcaccatgctgctggtcgggggcctgggctggtgcttcatggtcttcgtggacatgtgagggccgtgggtgcgagcttgatgtatcgtcccggcctgtggctgtgttctctccatgggtggggtcggccagcgccttcccttcgcccatcccccaggcagtcgctgctgcccggcgcccacggagagaaaagaaagggctgagacttctgtgatgggggcgcggacaccacccctaggctggcttcctggacccaccctc

SEQ ID NO: 135903 - DNA, 1069 bp, Homo sapiens
tatgagagagagagagactttgacggttgtagatattttttccgctttgcctactttatgttgtataatcatgtgtttactaacaagttgatgacatggatgtattcataagaccatgtaatattgatgtgattgttgtcgcttgagaaaaaaaggcaacagctgattctttcaacaactgtcacagaatggctgggctgagaacgctgcccagggccctgcagctggcgggagaggtgtctggtgggagcggtgtctggtgcgtcagcctgctgcttcgtgtctcactcgagagttgcttctggtttcacactttttaacccctctgtgctttagcagccgtgaccttgccttcattgcttcatccagtgcaggcctgggttattgaagacaccaaagtgtttctcttccagtttgaaaaccaggcaggtttacacgtgggtttcagtgtatttgcctttgaacccttcaaactaaactttagccttttggctggtgttgaatgtctttagctggggtgacctggagtgacctgggacggtgttgtggtttaccgtctccagcttcagcctttccagaaacccttgtggagggcagtgttggctgcaggtttcatcatattgcagtttgaggtcaccactatttggggaacaagcttgcgtcctgctgaggggcaggattttcagcagagcgtcggtggggctgggccgtcgtggaggtggccccaggagtcatatggccatactcagacacaccttgtgtggcctgctcagagctggatgccacctttaggcaatgtttagagtctattttctaaagttttaagtattttaagaggtattgagactaatgaatataatagttcagtaatttaaatgcttatttattttcagtggaaggatttttattaaaaagaagctaattgacatggaaatgtcagtgaaatttcttacctgcaaggaaagtgaacattttgtatttaagtaaactataatgtgcacattttaataaagaaatctgacatttgaaaaaatggtgattcttttgaaatgtgaaccagctctaccag

SEQ ID NO: 135904 - DNA, 1060 bp, Homo sapiens
ctcacggcccacacaagcccataggcagttagccccggctgccggcgcatgtgcactgccgcgcgcccttcatacagtcagtgacggcagaggggaagcccagcgggcgggcaggcggggtcagcacagctcctcgtgaggaaggcagaataaatcagcaagcccccgccagctccatgatgagtcacacaccgtgaccttgcctgtcacctggccggagcgaggccgtgggcgcaggtgggtgagctgcaggcacgggctggagaaaggcatggccgtgggcacaggctgtcctggggagaggcgcaggctagatgcccaccccatggccccttgggtttcctgcctcccatcagagaaacccgagttatgagaggccccatcctaggttcagcccctctgcggatggagtgcttctctttggaggtgcggtgccccccgcggtgggggcgggcccgggtttgggtctgtagctctcaggtggctccttcctcatgcagctgttccctggacggccgccagtcaagaagctgttggagatgctgcaggagtggctggccagccttcccctggacaggatcccctacaacgccgtgcttgacctggtcaacaacaagatgcgggtgagccccagaaccctcgccagccacgctgcaccctccttccctcgccttccttcccttgcccttagctggtgcatctccctgctcggggcccgggctccgctgtgaggaaggggagcagtgacttactgtctccacgacagcatcatggccatggcctcctgtctgccttggcagcgtcatgctgggacttcagtttaaggacagctcaccaaaagtgcactgtgaccacctgtcctttggacaaaatggggttttctcaagcaacgtagtagttgggctttttaaatttttagtaagccaatctgacgaaaactgatgtattcagtaagtgtggcagcctttccagagctttccccaagaccaggtgccagcaggtgccagtctttgctcaggggaccagcaccccaagaggtcctggcactccgtcctgccat

SEQ ID NO: 135905 - DNA, 1024 bp, Homo sapiens
ggaggctcttctcacctttgccctcccctctctcacagcgtgaagcctctgcgggccttcttttcgtcttatttgaagtcattgccggatgtgaggaaaaaatcgcttcccttgcctgaaaagccacacaaagaagaaaattcagaaatcgtggtttggagagaatttgacaagcaagtgttcctcttgaactgaagcccccggagacagtgcgtgtagaccgaaggctgcgtgcttgcagggcgggtttactcagaaacccaccccagccagtgagggccgctcaggagccctcccaggggccctgggagtccgtggggaggagccaggacagggagacttgctgtggagggaaaggttgggcattccctgacgctgccatatcccgtcctaggtcgaagctgtacacggtggacctggagtcagggctacactacctcctgcgggtggagctggcagcccacaagtccctggccggagcagagctgaagacgctcaaggactttgtgactgtcttggccaaggtttgggacggtgctggtctgggctgcatgtgggaatttggctctgcacagagtgggccctggggggcgtcggacactgcgggggctccgccagctccgctgaggtgctctccaccttgctttgtcgcccaggcccacgccccaactcattccacccatttcccgagtgcctcctgcgtccactgctgttcccagcactggggctggggcggtgggtgtagagaggggcgggggtgtgagccgagcacctgctggaaaagcccagctctggctgcctggagagtagatggaggagggagcggaggcccacacacacctcagctggctctcagaggagcgctgcacgggggctggggggagagagagagggagaggcaagggctgtgcagatccaggtggggtgtgcatctgccccaccagccaggttcagggaggggtcctgggagcttcacgctcagcaccatcaccagcacagatgtggtgtctgagaccactgaggg

SEQ ID NO: 135906 - DNA, 1050 bp, Homo sapiens
ctgagcagaaccagacaggagcagggtggctggggaggagcggcagcacgaggcctgctgccccggccacgaagcttccacacgcgggacgggagtgcgaggccgtggggtgtggctgctgtgtgcagggactcacttgaccagtatcagtgttgtggggggcgcgctggttttagaaagtcaagtgcaaattcgcggataagtgttttctttgatgagtttgtaaaattgccgaataagaccgtggtttctgctcatggcgtgtgtgccgtcagttgccttaaagtgcaatgagagtgaagatttgagtgagggtcttgcctgcagggggacagacttcatgcccttttgtgaaaggttccctgcaaggccatgtgtctgcacgtcgtgttttctgagaaactgccagcccctgtggaagtgtcattgtgttctcatcccccaggtgatcttagacctgatcccgtatgaaagcatcgtggtgacccgagcactggacggggacaaagcatttctggagaaacttggtgtttcttcagtcccttcgtgttacctgatctacccaaatgggtcgcatggattgattaacgtgtgagtgcccgggtggggtctgggaactccgtgccgctcggagttaccggacagaggctccgagtagacagtgcaagtctggtgtgagatcgggggagccctggcccctccgcctcgcttccctgggcagatttgggccctggctctcagcccgtgggtattgctgatctgtgctgtgttttcgtggatttctgttttctcactgctgtgtccccgcacctaggaggagcctggcgtggtgacttaccaagagtcgcagaggaaaccgtggctaaaccagcacatgcatgagggctgctgggccggggctttgggagcagccgatgctcctaaaaccctgctctgggtggactcttgggatgcagtttgggtctgtgtctggggctggcagacaagcccacgtgcccacctctgcagaatgagaagtaggggtgggcaccaggccctgcccctcacgtt

SEQ ID NO: 135907 - DNA, 1048 bp, Homo sapiens
tatagaaattcccaataaacagaatgaaaccatgtggaattgtgagccagataaaaggccacagaaatgagacacttcgccaggatgcacgggctgaggagccggggctgtggaggggtccgcccgtgagctgcccacggcggggctgctgggagcacctcctgtttccgcgtcccgtgccgtctgctgcgctgactgggtgagagcatgaacccttcttcctcagttccatgtggtctgaggcttgggcaaggagtggccggggatgcagagagctcgtgtcgcttctccctcatccactgaaagtggcctcaaaacctgaattggtttcacttagccagcgtaagcgggaacggtatttggtcattgtttctgaaagaggtttctttcttttttatttttaaattacagggagaaaaggccagtatctgaaacagagctgtggtatattatgtagaaaaatagcaatctgaaccgctaacacacacaagccttcatatttgtacagagtctggtgatatgttccgtctcttccaggcatgcttttaacagaacctctggagtttgagatcatagctcgctctcagaaaagactcttactctttttacatgatttatagtggaatcattgatttagacaagtgggcagaatcggaatacaaggcaaaaaagagcctcatcagtatctcagtgacaggcagacataacgttccctcccgttcagaaatcactgggcttccggtcacaaggctgtgccagggcagcaccccacgtggctggctccattcctccaggcaggtccatttgctgggtgcctgggtctcgcctctgcacctgcctctcccacggtgcggcgtgccctgccacactgccgactctgctgaggcctccaggctccaggatagccagcacccatcccttgacccagtggtgcccctttaggctgtcccctcaaagtctcagggcctggaaggacccctacagagtgaggagccaggaaatatttgtgaattgttggcagtgcaatttttacatcccagaggaagaa

SEQ ID NO: 135908 - DNA, 1036 bp, Homo sapiens
aggtgtcagcgggaaaagggctcttcggcaggctgtctgcccacacagccctccagtgtgcccgcccacaggcacggggagggggaggttcactgctgcacttgctgggggagtgtttacggagtgcgcctgtgtgtgagtgcgagcccacgtgcgtgtgtgtgagcctgtgtgtgtgcacgcactcaagtgagcaggggcgggcgctaggagggccgagcccttgcccagggtcctatttaagcctcaggcatcccagcattgaggcagcacttggcactttgggcagggcggtggtggccctgggcaccttgtgtcctgcctgcgctctgtgtggccaagcacccagcgtggctccctgctgctgtggagacagcctgtgatccgcgtgagtctggggtccctggggtcctaacaggtggaggctgagggagcacacgggcctctgtgaagccgggtggggtggtcttgggccgggtgcattcccctcctccgcaggagaaactgggcttgtgccaaagcaagagagactagagtcagactgcaggagggactctgaggcctccgggaaggagggagccagggcttggggcaagggagaggttagagcagggaggcggaaccccgagtcccactggatatgttctactgggacataaatgcaggggaaggtggccttggggcccagggtcctgcttctgaggggctccaggagccccaaactatccagagcctttccccgtaccaggcactgagccacggttttgcacctgcagtcgtgggcccctgcccccatgtgagggaggcatcagcccctcaacagctggccccagcctcagggaaggggagggctgcccgacataggaccctgagaggggctctgccatggggcctgggacatggcccctgacgggtcctgcctttcccaggagggaccttgctcagtccacctgggccccgggtcacctgggggagtccagattgggccagaggcagaggccccccgcggctgtgccctaggtcatcatagcccagg

SEQ ID NO: 135909 - DNA, 1457 bp, Homo sapiens
gcctcgggaggacgtggctgtgactgtgagaccggcgtccaggagtgggggcagggtgggcctggcggtgggcacagggccttagctcgcaccaggctggcactgctgctggggctcgggcgggccgcctgccccctgctccgggcccccggcgaggtccacccgctgctcgtccatgcgcttagcctgcaccctctgaatgaggctgaagaagtcctcgtccggcatggtagggccccggggcagtacgtcaggtggcgggcagcgctggtcatcgatcctggaggactgggtggacacagtgcagttggcggcctcacccccccagccccagtggtccggggctggtcagcagcggtggttccagaggccagcgtgcactgttcacgggcttccccctgtccacccaggaaattggttctggggcctgcctcgctctggggtcttgtgctgggagcccgggccctgagcgcagtcttctggtggccccgccaccaacccgcaggagcccagggcaggcccgcccaggaaaagcaggtccagcgattcccactgggcatgggtgtgccaggcccaggagacagtggctagggcggcgttggatgcctgctccccacatctgctgatccccagggacgggcatgcgtggccgtccctctgcccagccctggaaaccagcacagcctgggactgaccctggcaggcctgaggtctcagcttccagagcccgaagtgtggcgccccccagggcttccccttgtgtcaggtggctgaccccgtgggcctcgcctgctccagtgtgcaggccagggggccaaggggttgtctgggcttctctgaagcgcctggagcaggagggacgggagctggcgcaggcatgcgtgtggatgggggactctgggcctcttgggtggggctggtttggaggtggctggtcggacgcctggccccgggccgaggtttcctctctgctgtggggaggacggcagacctggaaacgtgctggcttggttcgtggtgggccaagcggcctccacccccagcctgttcccaagtctacggaccctgaaccccttcccagcaatggctgcaccccacagggatggcgagacccccagagtttgaggtcctagttgggatagcagttggctcagcagtctccactccggccaccctacctggctcacccccacacagatgaggaggtcattcctggcgtggctgccaggctggagccccggccctggctctgccctctggggctggaccctccgcccatgccgtccactgtgtggtccctggatggtccctgtttttgtcccaccagccagctggcagccctggatccccctgccctccccactctgggggtgctatctggcccgtgttttccctgccgggtgtggagggctggtggggaatccctgaggccatgagctccaggacctgtgaccccc

SEQ ID NO: 135910 - DNA, 1034 bp, Homo sapiens
ctcctgccacccgggggtgccgacgccctggggcgcagacttccccgagccgtcgctgacttggcctggaacgaggaatctggtgccctgaaaggcccagccggactgccgggcattggggccgtttgttaagcggcactcattttgcggaggccatgcgggtgctcaccacccccatgcacacgccatctgtgtaacttcaggatctgttctgtttcaccatgtaacacacaatacatgcatgcattgtattagtgttagaaaacacagctgcgtaaataaacagcacgggtgacccgcattcccgctcggacactcgcgcgcagccccgcggccgtccctcctcgctgcggcccgcggtgtcctcggggtgcgagctgcacgtggacgcagggccccctcaggccgccagggggcggcatagcgcagcgcgcccccgacccggaagacggaagcccaagaacgccgcttccgcccggcgcccacttccaagatggcggcggggcggggccggggcagggcggacggagccggcgagcgggatgctgcggactgcgctgcgcggcgcgccgaggttgctgagtcgcgtgcagccccgggcgccctgcctgaggcggctgtggggccgcggggcccgtccagaggtcgcggggaggcggcgggcctgggcctggggctggcggcgctcaagctccgagcaggggccggggcccgcggcggctctggggcgcgtggaggcggcgcactaccagctcgtctacacctgcaaggtaggcgcgcggcgggacggaaccggggacagacccgtatctgacgctacacggcctgcggggagaagcggcccgccggggatccgggaggcggcgtggtcaagtcacaggaaggagtggagccaccccttggggcttctgggagggagcggaggcggaccatgaggaggggtggagccgtccctggggcggggccttcccgggagagggcgaggttgggggtgggtggagctatccctcgggggcggggccttctctggagag

SEQ ID NO: 135911 - DNA, 1053 bp, Homo sapiens
cgctcctggccaccctggccccccaaggcgtccgcaccaccctctcagtaccttcgagggtgggctctgagagtgaggatgaagacctcctgagtgagctggaacttgcagacagggacgggcagccgggctgcacgacagccacatgccccattcaggtagggtgggcgcccagccccacttccccatggcaggcggcggtccctggggtgccctcgcctgcctggagcagtggggtgggggctggtggaagttgcgggcaggaaggctggctgctgggtgtcttaggaggaggaagctggttcctggcctgcccagttgcgtgtagattctgcagaagtggcctccctttggggcagtgtggaaaaggggagaagagaggcctcattctcgtgcaggagcctccggccatcctgatgctgcccagccaggtggccttgtctgagcgagaagctctgggatggacgctgacccggctctgagccgcacacgccacacacacgtgtgctcccagggtgggccatgggcacagtggagggtggtggctgtgtttgtctctggatttctggggtcccaaaggtccctctctgctgtcacctctctgagtgtccttggggagagttttccaatctctgtaggtgaaaccatgtttggaaccctggaaagcatgtggagctggggcccccagagaggcctcctcccctggtgccagggtgcccacttgcagcagctgggaggctggcctccctgagaaaccaccagaagcaggcagcctcagctggacctgtgggcctgtcatagggagtgtggcagagggccttccatctctccccagggttgtgtctcgcaagtccctgggctgaagtgtgggaggaagcaatgtccaagagttggggaggaccccggccagccaggggaagaggccctctgtgccccatccatgtacagcctcctgccctgcctgggtgtgatggctgtcccatgggggagtgggaggcccaccagagggatggcttggatggggtcagagcccccgagggagggagtgcacag

SEQ ID NO: 135912 - DNA, 1077 bp, Homo sapiens
ggtgtctgtcctgcaggaaggctccggttccctgttcatattggctgggggctgccaagagctgctcaacgctggggccctggggccctgggccgcccgagtctcagtcaggggaggcagcagagtggccagcagccctgcggggccaggggtccctgctggcctgggaaggctcaccacagctggtacaggaacagggagaagcccctgggctgtgagcacccaggtgacaggcagggggacactggtcgccacatgtggccctcctatgtgcgtcaggctgaggggctggacgggcagtggggtggggctgggggctgcggggagaaagggtggcgcctcaggcaggccctgcttccgggatgcagcgggggcctgagactgtccgagaccactctcggggcagctcacagagatctggccggggcccagggcaggggcttgggaagcagcaggggctgtgccctcggcctctgagaagacaggagcgaggggcagggcttgcatggtggagagtctcttgtccttggctgaagtcccagcctcctgccaggagccagaagtgccaggtttggctgccgcgggggccccaggcccagagagcggtacatttaagacggtgggacccggggctgggcggccgtgtggggtgtgtggtagagggggctggaggatcacagacgaggagaccagcagctgggacgggagcaccaccgggccccgggtggcctccctggcacgggcctcctgaagccgcttctcctgaagcagctccgacacagtcttgggcttgggccgggggccggttgaagccagcagggacgcctggggtagggtgcgctccacccggctggacgccagtcttcggctccctttgtggctggcactctttgaggcttcttgagccggcacgtttgggaagaggtggcctgtggggaggaaagacccacacttgataagccccaggcatctggcccagggacagcccctcgctgccatcccctcatcaggagggaccatgtggggagcctggggtcttgagccaagagagggtcaagcggcacatcctgggtctcc

SEQ ID NO: 135913 - DNA, 1060 bp, Homo sapiens
gaaagcagctatggttaggttgcctcctgtgtcccgcagctgttccacatcgatactgccggctgcttggaggtcgtccgagagaggaaggccctgccacccaggctgccccaggctggtgctcgggacccaccagttcatcttctgcaggtagcaggcacttggggtgagaagtgaggatggccactgcccgccccggcgttggagtgggtttccacggaggctggctgcccgccccacccgctccaccgcagcccctcagggaggcatctgcacttcccacctgaggggacgcagccttgagaggccctggggaagtcaggcaggtgcaggtcggggctgacactggggcccacgtgcctgttttcccccatagccccgctgggcggtcatggacatgggcgctgtctgccggggatgcctggttcttgcctttctgctccagaaaccaaactcacagaagttcagcgaggcctcctcacccttgagccccgtcacctgggggtggggtgacaaagcagtgtcactcattggaggagcaggaacagcagtggggtacccctgggcctctgtgcttccagcccccccgcctctccctgcagaccccaccctgcccccaaccccccagaagagctcttgagggcacccttaggaggagctgcactggcagggggaacaaggccaggcctttgcctgctgtgcagggcacgacaacgtcccctacccaaggggtcacagccagcagcagcctgcggttcaggagcctccggtgcagagcgtgtctccagcaccgctgcccactctgggtggctctgtgccgtagccactggacatgggatcgggccacatgcttggctccttctgtggccccggagttcctacagaggcgtgtgggaggccagcaccagcccttggggcctcgtcccatttcagggagtggcaggggatagtccagatgctaggagaggtggtccaagccagcagaggacacctgagctgctgactctcctctctttcatttccaggcatcctcaagtgcccagagcaccccaggtaactc

SEQ ID NO: 135914 - DNA, 1037 bp, Homo sapiens
tccactctgatggggccacggcgagtctcctggggaacagcaagcctgtcctggggaagaatctttggatgaaggcatttccatggggtttggcttttgcaggtcactgggcaaaaatagcttctgagctgccccatcggtctggctcccagtgtctgagcaagtggaagatcatgatgggggtgagccactcgctccttctttatctgaaaccagacaatggcctggtcaactggggggtccagcaggcaggaggaggggaggggaggggggcgttcggtttctggtcttggcatttcttcttctgggtggccaagggcaaagggagaccctgcctcggcagcggctgctcttgaccccggaggcgcccccgcttgggcctctccccaaagggctggcctgcttgctgccatcatgggtgaaccgggcttgccaaggcctctaagtagctctttcctcccctcagaagaagcagggtctccggaggcggcggcggagggcccgtcacagcgtccggtggagctctaccagcagcagcggcagcagcagtggcagcagtggagggagcagcagcagcagcagcagcagcagcgaggaggacgagccagagcaggcgcaggccggggagggtgacagagcgctgctgtccccacagtacatggtcccggacatggacctgtgggttcctgccaggcagagcaccagccagccatggagaggaggggcaggggcctggctgggaggccccgctgcctccctcagccctcccaaggggtccagtgccagccagggcggcagcaaggaagcttccaccacagccgcggctcctggagaggagacgagtccggtgcaggtccctgccagggcccacggccctgtcccgaggtctgcccaggcctcccactcagcagacactcgcccggcgggcgcagagaagcaggccctggaggtaggccccggccctgggtgtaccacgggaagtgcactttcggcactcgctcgccagggctgacgcttggggatagtgcagcagcagg

SEQ ID NO: 135915 - DNA, 1054 bp, Homo sapiens
acagtacgggagaacaggaggcagggggagcccgagtccttttgtgggctctggagggatgtgctgggcctgcagggagcacatgtggcctgtgcttgtggtgatgccgtgcaccctgacaggggccacctgccaacgaggacacacgagagaaggctgcccaggggatcaaggctttcgaggagctccttgtgaccaaatgtaagagccctggccggccctgcggcacccctgagcttgggacacctccccatggccctcctttccccagtttctccccaagttctcagacctctctctgttgtgacctcatggctccttcaggccttgaccactgggactggccccttgactcctgcctttccacactgagcaggtcctttccagaacaccagtcacgaggggctagccaggccgcaccccaccctctggctcagtctccccgcccttgtcttgggccgcaaagccctgtggctttacgtgtgagctggcgccaggcctcgggtggagctctgtcagctgggtggaggggccacgtcagtaggtctggcgtgctgcttactcgctgtggggccccccaccactgcctcgggaagtgcacaccaaccgtgggggctgggccgtggagaggatccagacccccagtgatgatgctgtggcttctcctcagggaaaaactgggaaaaggccttgctccgaaagtcagtggtgagtgaccgcctgcagcgattgcttcagcccaagttactgaagtaagtctaaaaccataagtcaaaaacggtcttcaggctgggcatagggctcatgcctggaatcccagcactttgggaggccaaggcaggaggatctcttgaacccagttcaagcccagcctgggcaacatggtgagaccccatctcttcaaaaagtaaaaaaattagctgggtgtggtggtgcacacctgtggtcccagctactcgggaggctgaggtgggaggatcgattgatcccaggaggtcaaagctgcagtgagccatgattgtaccactgcgttccagcctgggtgacagagcga

SEQ ID NO: 135916 - DNA, 1019 bp, Homo sapiens
gagcctaccccaaccccaccagctgctgccctgacaggagacccccccagccttgcttcccacctctcccagacccagggcctgcctctgaggcaacctgctatctttctcctgtggtgagggcctctacatccgtgcctcccatctgaccggctaagctcctgaaggagaggtccgttttctgctaaactttccctgtctctccagtaaagatagcttgtgccatccagtgaaccctgtgtagctttgtcctgtgtgcctggaggtccccagtgtgtggtcagagttttctctatctggctaacccggccttggtccagtgcccaccccgctgtcagggagggaaggtccgctcaccgccagcctcagcctgaggcgctgtcactacctcacaaccccaggtctgcccaagaagcagtggtgagctgcgcccccaccctgcccaagacgctggttaccaacacggtgttgcttgtgtttctgacagattcactgccttctgaggacttggatcctgccgatcccccgatctcggtaactgttggcctgatctggctgtgccactgggtcaggcctgccaccaccttccaaagtagcctgggagggggcgtggtttgaacccatattggtttttctgcattataaaaatgattcacgtttgttataaaaaaattaaaaagcatttgtcattgaaattgtccccagaaataaccactgttaacagcttggtgatcacaccccttgggttttttctgagctcattgctgtatgcctctgtctcctgtgtggcatctgtcacttgcggaaagctgtgagttgtgcacctgcgtcctgcccctcacagctcgcctctctgtgcctcagattcctgtggggcagcggggacgtttacagcacaagtcagttaacacgagcagctatacagaaattagctggtgcagtggcacgtggctgtggacgcagctacttgggtggctgaggcaggaggatcacttgagcccaggaggccgaggctccag

SEQ ID NO: 135917 - DNA, 1014 bp, Homo sapiens
tgtgaacgtttctcaaatgccctctgtggtccggctctgtgtcatgggagagcaggatggccaaagtgggtcacgggctgtgtccttgccctgtagtgactttgccactgcaccccacaccttctacgctgggtggccagtttccatgtggcttggtgtgggagcagagacgggacagtggggcctgtccttgttcatccactccctgcctgtgctggttgcagcctcagagcaggcgggagatgttcttggggcttaggctcctggcagagcacatagcaggagtttgtggggtctgaggttcctgtcccagggttccccgattctgtgcctggcctattaatctttctctggggagcccagtgcccactgccgagcaggctcctgccatcccccatgggcgggtgtgtctgaaggagaatgggatcccggcacggtcttggtttctaacatctcggggtgtgttttggaggcaggcgggagtcatggatgtagatgctgaaagagagaagataacacaggagatcaaggagctggaaaggattttggatcccggctcctcgggctcccacgtggagatctcagaatcaagtctcgagtcagattctgaagcaggtaagccccttgtacctagcctcctggggtcctggtaagaacagctggtctgcctcctgggttcctctcaggcacattagggagtgatggtagccgggtgtggtttctcaggcctgtaaacccagggactcctgaggctgaggtgagagcattgtttgatcccaggagttcatgtccagcctggacaacgcagcaagaccctgtctctaaaaataataataataataataaacgatggctggtgctgcttggaccagacccaattttttgccaacactggtgtctttctgtactccagccagagagcttctgacaattcctcctttgctagcccctgaaccagctggctgtgtgtgtacactgggctctaggcatcccagggtctgggcctggcctcct

SEQ ID NO: 135918 - DNA, 1038 bp, Homo sapiens
gagtagctgctgccacccatcctgatatccatgcttgttttcaggcaactggtttccggagctgagacactgaatcttgttgccgaaatccttaaatctatagacagaatttctgaagttaaagacgaggaggaagactcttgaggacccctgggtgttctcagcatgaagctccgtgtataccctgaggtcaccaccgctcgatctaaatgtgcagttgtgtccttaaatatgcagtcttcacccagagtaaagtgttgatcgcaagagtccagtgtcgtgccctcagccagttcttggccaccacaatgggagcagccctggccgagttgtctctgtggtttctatgcagcccttcttggcgaaattcctgcgatcttatagattctaatgagctcttggaagacattgtcataaaagccagtgattttaagaaaaagagtggttctggaatcaatgttttccagtcccatcccagaacatcagttgtaagataagtacaattggttgtccttgatttcataagtagaacaaacactaaatgtgcctctgagatggccaccccgggcagggacctgtgccttccgccgatgctcagggctccctctggctcccgggtcactcttgtggccccagtgggtggtccctgcagtcatggcctgagtgcgcaggggccaccgcgtggctgctgctgtcctcctccgggacccacggggaccaaggtcacacgttccgtgctgtgaagctgtccagatgtgcctctttggctgggggttctggtggacgtttcaagtggcattttgtacaatgcaggttagaattcaggaatttcaagtatgtgcccgggtctgtcaggtcccagttgcctttctgacggcccccctcagagggacggcgatgagcactaaatgcttttttgactattttcctatagattttttttaaaacttttttttcctcctgttccaattgatagctttcttatttaataaattctgtagttcaccgcactgtctcttctctgctgacttagccagt

SEQ ID NO: 135919 - DNA, 1013 bp, Homo sapiens
gctgggggagacaagaccggcgctcatagaacgctggagctggaagcaacgacaacagcgactttactgcgtgccggggcggccgccgcccacctggaccgctggactcggcccctgccccgctcaccgtcgggaatggcgaggctccgggctcgggacagcggggtggcgcccgggcggcgctggtagcccgacatcgccgccggcccggcggggcacgacctgcctagcccggcagcggcggctccatggccccggctccgcccgtgccgcggcccgcgtcgcccgcccccgtcgcccgcccccgtcgcccgccgctcggccgcccccgcgcctccgagcctctcgccgctgcttccgctccgagcaccgaaagcgcgtgcctgaacgccttgggccgtcggcgagggggaggggaagccgtgggcggaagcggaagtgacgactgaagcggggcggagacgcaagatggcggctgtggtgctggcggcgacgcggttgctgcggggctcgggttcttggggctgttcgcggctgaggtgagccaaaggcgaaccaggcttcggcctggggcgggggcggctcgagtctttctggacgctccgtcttcggtttctacaggtgacatggcgcccgtgggacgggctcgcacttcgggacactggtgtccccgaggcgacgggggccctgccttgctttgcgcctcgagcccggggacgcagtcccatctgtctctcctctccccggctgctgggtcctctccccccctcacttcccgggtcgacgggccttctccgaggccatgcctcatatttgcccccgcgcttcacctaccgcgtgctccttcaggaggctgagccggtgggggcccagctctgttagacccgcagggttctgacaccagggtccaggctctcggttgctgcggtctgtccgttgatctctgacgtttaagaaccctttccgtacccaccgctcctcccacccaagtgaccgggcctgcctttccccac

SEQ ID NO: 135920 - DNA, 1032 bp, Homo sapiens
caagacttcggtggtgctgttggagggcagagctgttaagtgctttatgtgtacaaactgcacttagagtgagttactgttaataagccctgtttttacagagatagcaactaagacccaaaggacggaaccagcttgctccaggtcccgtggctgagcctttgttgtcagcctctgctttgtcttccaaagtctgtagaaataagtcctgtagaaaggcagatgctcacttttaacccagacaaaacataactaaccgcacctaacaggtcatcacaggtttgttgtctcaagcctgttgtaactgggccgctttctctgttttaggtttggacctcctgcgtacagacggtttagtagtggtggtgcctatcccaacatccccctctcttctcccttacctggagtacccaagcctgtttttgctacagttgatggacaggaaaagtttgaaaccaaagtaaccacattggataatgggcttcgcgtggcatctcagaataagtttggacagttttgtacagtaggaagtaagtactgttgtgttgtcgtgggtggtcccgcagttttaacatgcacatgctttagttgactgttagttgtaattagcatgccaattatgaattgtaccctgagtggaaacaaagtgtacgatttcataaatgttgagctacacatatacctgtgaaaccatcagcacaatcaccctcatgtaattaaatctgattatcatgtcatattgacatcttaaaatgtttctcttgattaaatcttattttgaatatctgatgtaacctgtcaattttctttttactactagttcttatcaattcaggatcgagatatgaagcgaaataccttagtggaattgctcactttttggaaaaattggcattttcggtcagtacccagttttgtaattttttagactatacttttgaaggatgtttgagatttttcttgtctataatggttattttaataaattatcaagttgctaagttaatgttaataaaagacttttaagttaaa

SEQ ID NO: 135921 - DNA, 1022 bp, Homo sapiens
agtgggttcgttcagtcaacaggaggctgggatgaaacacttcaccttttgagagagagtatagttacaaaaatctgtatcagaagtggctccattttgactcaagctgtgtgtagctgtgagtcctgcctaccaagcattcacactgtaagacaggaaaagagaaaggggaaaagtgtctgctgttccccgatgaagggtaggaggtgtcccctggcacgcaaagcccaagcgtccctgaaatgtctgctgggccccaacaaaaggtaggtgcccctggcatgcaaagcccaagtgtcccctggctgttgagcagagtgtgagctcagggcctggcattgtccacctggcacgcaaagcccgagcgtcccctggctgttaagcagagtgtgagttcagggcctggcattatgggcttgtgttttcttccagagacaccaccatgtatgctgtgtctgctgatagcaaaggcttggacacggtggttgccttactggctgatgtggttctgcagccccggctaacaggtgtggatcccagccgctggcgtttgaggtgggcttggacatagggaagaccggaaaggtttgcagaagccctgtagccatgagggagagcaccatgtaattggagctttaggccaacacaaagtgacagcgagatctcataagaaatagcgctggggctgggcatggtggctcacacctggaatcccaggactttgggaggctcaggcaggcaaatcgcttgagcccaggagtttgagaccagcctgggcaacatggtgaaaccctgtctctacaaaaaagatacaagaattagctggctgtggttgcttacacttagagtcctagctactcgggaggctgaggtaggaagatcgtttgagcctgggaggttgaggctgcagtgagccatgattgtgccactgccctccagcctgggcaacagagtgaggctttgtctcaaaaaaagaaagaaaggaaaaagaaatagtgctagtagccaggcgtgctggctca

SEQ ID NO: 135922 - DNA, 2048 bp, Homo sapiens
ttttagtagagatggggtttcacagtgctggccaggctggtcttgaactcctgacctcaggtgatccacccacctcggcctcccaaagtgctgggattacaggcgtgagccaccgcacccagcgtgtgcctctgtttctaagcaccttcatgtctggtctcgtgtcctcacagcagcacttgggacagacaggtccagtgtcttcggtgcctttcaccagcaaggaagccagggcttagcaggctcacgtggctgcttcatggctgaggcgggatgtgaggcccaggtcccctagctcctgctccctgtagcagtccccctcactcacacaagcacccagtctgcccctagatgaaggcagaggtgactgccaacagccaccaacaggcgacactcaggccagcacacaagctgtgggtcactgctgtgttcctcatctctgcctgtgcagactcagccctggcctttgggttctcttgcagatgaagaagtcgagatgacgcggatggcggtccagtttgagctggaggacctgaacctgcggcctgacccagagccacttctcaccgagatgattcatgaagtaaaatgtcaaactcgagaatgcccccgcatctcgaacagtggtcctcgggacaccaggggtggtggggagggtgcctccgtgatgttgtccttgcaggttatggatatatacagaacatttttttgttttttgagatgaggtttctccacattgcctacgctggtcttgcactcctgggctcagctcaggtgatcctcctgcctctgcctcccaagtagctgggattacaggcgtgagtcaccgcactcagcttagaacattcttgatttctgagtctgctgtttatacaatgttcgtattttccagtttttatagtaactaggtctttactactaaacacaattaatcttaggctttttgtgaatttgtattctggagaggcagattttactctttataaatacgcacgcagctgctattgccagagtgcaagtaaaatatcagcttgcgtcggattttcccagggctggctgcagatgggcgctggtgctgcttgttggaggaagcctggtcatgctgtcttcagtcacctgtgtctgtggctcttccccattaggcggcttacagggagaacacagttggcctccaccgtttctgccccacagaaaacgtagcaaagatcaaccgagaggtgctgcattcctacctgaggaactactacactcccgaccgcatggtgctggccggcgtgggcgtggagcacgagcatctggtggactgtgcccggaagtacctcctgggggtccagccggcctgggggagcgcagaggccgtggatattgacagatctgtggcccagtacactggggggattgccaaggtgaagtagcgggaacgtctcatggcctcgggtggggaacacgtcccctggcccgtggtgtgacctgtttttgtattgattctgagggtgataggtgttgactgcatgtgtagctttgccttaacacatgctgtagtcccacagcagggcatggactgtgtcccctgctgagaatgagtgctgctaggcctgagagcaacacaaaaggtggatgcggttctttctctaggggagtgggtctgccactgcgtgttgcattttttttttttttttttagagatggagcctcgctctgtcacccaggctggagtgcagtggtgcaatctcggcttactgcaacctccacctcccaggttcaagtgattcttctgcctcaacttcccgagtagctgggattaccaccacgcccggctaaattttgtatagagatggggtttcactatgttggccaggctggtctcgaactcctgacctcatgatctacctgcctcagcctcccaaaatgctgggattacaggcgtaagccaccacgcccagcttatatgtatatacatatgtttttttttttttgtctttttggtagaggtggagttttgccacattgcctaggctggtcttgaactcctggactcaagtgatctg

SEQ ID NO: 135923 - DNA, 1043 bp, Homo sapiens
aagtcctcctcctgcagggacggagggcagagctggctgaaccacccacgccacgtcaggagcaccgtcagacgccagggacggagggcagagctggctgagtcgcccaagccacgtcaggagcgccgctggacgccagggacggagggcagagctggctgagccacccatgccgcgtcaggagcgccgtcggatgccagggacaaagggcagagctagctgagccacccacgctgtgtcacgagcgccgtcagacgccagggacagagggcagagctggctgagtcgcccacactgcatcaggagcattgctggatgccagggacagagggcagagctggctgagccgcccacgccccatcaggagcgctgtcggatgccagggacagagggcagggctggctgagccggccacactgcatcaggaacgccatcagacccagcaccaggactcaccaggaaggagcagctctccagtccaaccatgatgtgcgtgagctcggggatgggggtcgggcccaggctgacattggacatgtctctttctagctgtaaccaagaaaacaagcaagtgtcgccatgtgaaaaacaatgagggctcgcaaaccccagatgagatcatcttcagagtggttacacagaaatccaatgccagccaggcacagtggctcatgcctaaaatcccagcactttgggaggccaaggtgggcagatcacttgagtccaggagttcaagaccagcctaggcaatgtggcaaaactccacctctaccaaaaagacaaaaaaaaaaaaacatatgtatatacatataagctgggcgtggtggcttacgcctgtaatcccagcattttgggaggctgaggcaggtagatcatgaggtcaggagttcgagaccagcctggccaacatagtgaaaccccatctctatacaaaatttagccgggcgtggtggtaatcccagctactcgggaagttgaggcagaagaatcacttgaacctgggaggtggaggttgcagtaagccgagattgcaccactgcact

SEQ ID NO: 135924 - DNA, 1221 bp, Homo sapiens
gggcctcgttttctgtagaaaacagacccacctggaccctatcactcctgtcctggggttcctgggtgcagccctttggccttctctcaccccacccttctgtccatgcggccctcgggggctgggggttttttctgcaggccgtcctaaagtgagttcatcagacacggagctcgctcttctgtaagtgtaactcttcttgggtggctttgtcctatatttttaagtcattgccatgtccccatttactgagaactcaacgtctgtcacttgtggactcacccttggctacacccagtggctgcctttgggcccaggtgcccccatcagcagcacagcgtgagtgagtggtacagaccagccgccccctccgtgtgtttactgatgcagcctcagcgtgggggccgtggcgcgctcgtgtgacacgcgtttgccctctgcactaggcaacgtgaagccggaagatgtgaagagagtcgcttctaagatgctccgagggaagccggcagtggccgccctgggtgacctgactgacctgcccacgtatgagcacatccagaccgccctgtcgagtaaggacgggcgcctgcccaggacgtaccggctcttccggtagaaccgctccccggcctgacagacccagggagctgcagctggagcccgttcccgtgcgtgttagtttggacacgaatttagtctaaaaagctgtctggttgtataaacggtgcaaacaatgtcgccacagcacccacgcggtttgcattcttttggaactcaatgtgccgatcagtggagtcagtatcgagcctgaccaccgcaagccaggaagcaggtgaagtgcccagcgctggagtgcagcgtgccacgaggagggcggtcggtgcttccctcctcgggctgtgggcacatggggccccgcaggttccttggaggagccctgagctgggaggcagcaaaggctgacctatcaaagcctcccggaggccaccgtgctgggtaccaggactcacctctgacaagcaggagaaggtaagggcccggtcagctccaaggagcgcgctccacgcgcgtgcacacagcttccctggtaataaagagctggcatctttcttagcacggtgttttccttctcgcctggggaggggcggttcttaagggctgtctgaattggcagcttttctaacatggaggccttcctccctgtcagtcgtccggtttgac

SEQ ID NO: 135925 - DNA, 1070 bp, Homo sapiens
tactttttaagatgctgctaataaaagttttctattattcactgaattgttgataaccagcgtggttcatcaggtctcaagtatttgtgttttcctcaaaagactcttttccatctaacgctgatctcttgggcagtgaactaggaatgcaggattttatgtatttatttattttgagatggagtcttgctctgctgcccaggctggagtgcagtggcgcaatctcggctcactgcaacctttgcctcctgggttcaagtgattctcctgcctcagcctccccagtagctgggattacaggcgcccgccaccacacccggctaatttttgtaattttagtagagatgcaggggtggtcgcaccatgttggccaggctggtctcgaactcctgaccttgtgatttgcccaccactcagatgatccatctgcctcagcctcccaaagtgctgggattataggagtgagccaccgcacccagccgaatgtaggattttaaagatagcagagatgaaccggacaagatcatagtcagctgttgagggttgagaccaaactttttgcctgtggattttacagcctttcaaacaaggacattgtgagaacgggatatgcatgtatattgttgcttccaggtttcagtctttggccagaaagagattttaagactcaatatatgcatttatttaaaaatataaatatggaaaaataatttaaaagactagattgaatgtccctagattttcacacattcaaagactacattttttcaagagatggaatgggacacaaagcaagaatgaacggttctatactctcgaagaaagaaacccgggacatggtggggatccctggcctaggtgttcaaggtggtggcatcctgaacttccagcagttccctagcccggttccactaatgtcattccgcggctggagttaaagaagcaaacggtctacgtcaccaagaccatgagacggtttcaaaaatggtctacgtcaccaagaccatgagatggtttcacacaataggcttggcctatgagaggaggggaagcagcttcttactcagctg

SEQ ID NO: 135926 - DNA, 1003 bp, Homo sapiens
atttgggcttcatttcgtgtgtaggagcacggttagactcactgttaaggaagctggatgcacttctctaaaaggctgcactttccgtgagcacttttcgtggtacaatccacatgacccactttctcccctgggggacgttggttcagaggttggtagcacttggggagagtatcttaacacagtttcttgacagcagctctggaacttagtatttctgccccgagttttgccacactgagactttgagtagctcctggtggactcaaccctgttcaactcagagacgggcctcctctcactgatgcaaagctttaaggcttctctgactgttctgaaactcttcgtattcttgtcaagtctaaagagactgaagaaaagatttaaatactaataaaaatcagtagataatttctgtaggttctgctggaggaatacaaactgtttggtgttttaaatttaagtgtagaaattgtagaatgtggaattagcacagatccttcctggctttctgtttcacttgatcatttagcccagaccacccaggatgttttccaaaatgttccacaggcgtgtcccgctggatccatttgtccttgtcacttggagaaaggccagtccctgtgacggggcagccctctctgtccctcggtcagctcgtgtgaatcctgggacctcttccggtcggctctgcccgctgttctggggtcgactgccacgacttttgattcaagaagcttcctccaggcgggagcggctatttttcctaaatgagaattgttacattgcaaattgttgaataaaatattttgcgctccttcaagcaccttcacctgtggttccctttggtttgctggaagcgagtgagtgcaggtgtccgcaggcctcggcgctgtcctggaccgcacccaggtcctctccggggacctgcacctgcctcgctgggacctgccggactgcggggctgccgggttgggaggggcgtgggagacccgtccgggtc

SEQ ID NO: 135927 - DNA, 1037 bp, Homo sapiens
ctagagtcaacagggttgtgcggctggacccacgtgtgaggcacttttcacttctctctgaggagcactttacgtggaagagggcgtttgtaacccaggccagaacagtttcatattttttggcctggtgtgagagacttaaattccctgggatttggttgctgcaattcttcttttcctcggcaggttttaagctctgcagcgtcactccctggctctgaactcccctcctccaggcctgagggttcccagggaggagaggtaaggagtgccgacgccagggccccccgcagcccaggcctccccagcagctcactgtccaggcgcctcttcctttatggaggggcggtactgggtaggaagaggcagtttagaaacaagagcacctcgaaggtggtgttcctgggggaaaaaaaattgcacttgttttaacaaaactgtttgggagctccaggaggggtgcagggggtttgagttgtcgcctcagtcccggtcctctcccttcaacagcacgggaattgtcttgaattgtgaggtgtcaggaggtgaagctggcttaggccgaggctggacttttcctcccagccctcccctaagctaatggttgtttcgggataacagctttacattaagacaggaatcttaagctaacactggcttttttttcccttttgagttatgttgattctaatggcatcacaaagcttttgaaatggaactgacagcttggattggacagtgacgtgcatgttgactttcgtccgtgttttatgtgtgttcttgctgttttgtagctttcgcgctgtagttcaatgagttcattatcacgtgaagtgagccagcattttaatcaggtacctgcggctggtggtcctcactaacatgagagctggcgtgtgccgcctgtgttcctgagcacgcggtgccggttcgccacgtgcgctttgccactaacctcgcccgttgtctccctcagcgtcacgtgaccaagggtacagggttccttttttttttttttttttttttgagacggagtt

SEQ ID NO: 135928 - DNA, 1072 bp, Homo sapiens
cgttgacgtcctgaacccaagcgggacccagcggagcgagccggctctcgctcctgcggactttgtcgctccactcgcgccactcccaattccttctaacttgttcgtgccaaccccaggtaggtagcacgagcaccagcccctccaggtcagcccccagtctcctgacctttgatcctctttctatgagtctctcctaaatctcccgttaaaagaatgacctggccagcatgcagagagcctggggttggtttgtggttttttttttgatttgcctgtttctgcatgagtgtgccgcgtgtgcagtgtgaaactctcttcctctcggagtgtcttcagtgagaccccagggacgttcgggacggaatgatggcctcctcgctctctcatccccagatgcagaagaaccacagcttccagacgggactggcagggaagggcctgcagcagctaggggcctggccaatccagagcctgccccagagcccaaggtgagcgggtacggtgggaaaggggaaaggtacccagtgaggaggcacctccccatcctgccagacagggccttgccttctgcaagtcagtatccaatgtgtacgtagagtgttccgccttaaacgcctcacacttatgtatggtagagacggaaggtagaatgcagggtgccgggcgggacagagctgtttgggaagacggagatctggggatagtggcggtgatggttgctcagcacggtgaatgtgcttaaaacttaaaaatgattaaagtggcaaattttacagtatgtatattttacaatttttaaaattggaaaaagtaaaattaattactctaagttacagagaaattacctaccgataataaaagttaagtatattttcatccaaaaaaaaaaaacaaaaaacaaatgactcccatgtgaagtagaacagctcagaccagtcgggagtggtggatgatgcctgtaatcccagctctttgggaggctgagctgggcgggtcacctgaggtcaggagttcgagaccagcctggccaacatggtgaaaccccatctctactaaaaaaaaaacaaaa

SEQ ID NO: 135929 - DNA, 1023 bp, Homo sapiens
tctgctccccacctccatcctcctggtgtgtctggatctgctccccacctccatcctggtgtctctatggatctgctccccacctccatcctcctggcgtctctgtggatctgctcccacctccatcctcctggtgtctctgtggatctgccccccacctccatcctcctggtgtctctgtggatctgctcccacctccatcctcctggtgtctctgtggatcgccccccacctccatcctcctggtgtctctgtggatcgccccccacctccatcctcctggtgtctctgtggatctgctccccacctccatcctcctggtgtctctgtggatctgctcccacctccattctcctggtgtctctgtggatctggcgactctggggcctcacagaagtgggtcatgtagaatttgtctttttgccctggcttatttcatggaacataatgttttcaaagttgttctcgtgttttttatatttagggtgaatcctggttctttcgttggctacctggaaagaaaaagacagaagcttatttgccagatgacaagaacaaatcggtgagtgctgtcaaatacgcacgggacgtccgaagaattgtaatgatttttctgtcactttcagagcagacctgagtaggtgtttcctgaagttttgaagtgtcatcattaatcagatgctaattctgtttaggttcagtctgctgaccttttttctttttaaaatcttggcagattgtttgggatgaaaagaaaaaccagtgggtgaatttaaatgagccagaagaggaggtaaattgtcattctagttcctgttgggtgtgaggtgtgagtggagggaacagcctcatgtggccctgtgatatttgggtggctgttgccccttttggagcctcctgactgtgccatcccagtgggtttctgtgcacacagtgggtgtctgaagctgtgtttccctctgcagaagaaagccccgcccccacctccaacctcgatgcccaagactgtgcaagctgccccgc

SEQ ID NO: 135930 - DNA, 1050 bp, Homo sapiens
cattaggtgttttaccctttaaaatactgtgtccctggaaaagtaaaaatgagggttgagctattaaaaattgggacttgacccaggaataaatatttttaaaaatcattgtatctttgagaacacccatcgcccccctctggccagtcttccctcagtgcatgctcacactccgtttcttccagcccggaatctccatcgaacgccctcatttgcattctgagtgctgagtgctcccagacggagctgcttattaagtgcggctggctcttctctagtcaggccaggtagaggctctgggaggcccagtcagggggctgctctccccagcccccttcctgcctccctctggtcaccagagtcatccggcctctcagtgatgtatttaggaaacacgcctggggaattgcatccccctctctctttcggttcctgtgaggagccccaggagagcctgttctgcatttccttgcgacagaccccctcgaggacggtgccagactcggaggcccccccagggtgggatcgtgccgactcgggtcccacgcagccacctctgtctctctcacccgctcccgaaacaaagagacccggacaggcagccaagaaagaaacgaaggaacctaagaaggtagtacagcctgcccacggtgcgcctggcggccgggagggtttgggcaggaggcacgcttcccagagcgccatcctcttaattcaccacacatgcaaatagcctcctgatacaaacagccgagtgtctacagtgcacacggcatgatgggtgtctgtgtatttgtgccttcagataataggataatagcccacccaggtcagcatggggacacagcccggcccccagaggtcgcctctggccactacctgtcagacccacccgcaagggaccagacggcagccgctgctttgtcactgtggtgtgtgcctgctgccggctcacagatcctttctcccagccgtggactttgggactgctttcagtgtggggctgggatccgtcaggccccaggagcctccttgcctatctattggcga

SEQ ID NO: 135931 - DNA, 1519 bp, Homo sapiens
tctgttggacctcccttataaaagaaatggggctgtacaaaataacttgtcataaacacgtcgagtgtcagctccttccagtaactcaagctaccctcagtaaccccagacctcttctccaccgttcccatgcagctccgcagacgctccctgacggcccattggccagtcctgccagagtgccgatgttcccagtgccactgcccccggggcccctggagccgggtcctggctgtgtgaccccagggcctgcacttggcttcctggagccctccgggcctggcctcccacctggtgtgccacctctgcaggaaaggagacacttgctccaggaagccaggagcccagacccaggtggggctgcagagatgctgtctcgagagcagaagcagcatggggtgtggtgtttgtggggattggtggaagagattgaagttatttgagcttgaaacaacttacattacttgtcttaacgtagaccagaaattctggaagttacagactggatgggttcagagtctcactacaacagcagtgttaatgccagttccttttgtaacttggctttttgttgtgaagcttaaatggccatttggggcagggcatggtggccatgggtctcctggggtctgtctttagacggccctgctggacgcctggtgagatgcacaggggcaggtcatgaactgtctggaactcgatttggtggatcttgtccctggtctgtgcctatgtctacatgtgtgtatatggacaaagcaaaacataggcctagttttaaaaatgaaagagtgtgcacacatgtgggaagatgttcagccttggtttctgcagatcatgctggtgtggcggtagctgggtgggaaggtggtgtgcctgttgatctgtgcgccacacacacgtcccgccttctcgtgactgagatcatagttgctctctttcccgttgacagggatagtgccgcaggaggcgcctgttggaaactcactttccgagctaagcgaagaaaattttgatggaaaatttgctaatctggtactttgtcacattttcttaaactgtttgttttccataaagttcatcgagtgggcacccagactccttgttgagttgtaagatgatggtagtgaggactatgaaattgtttctaaaattgtttcttaaagtgaaagtgcttctaaatagctttcatccttaaaatatgaagagttggtgaaaacactggcagggaaagatggggaagagagaattcagtagtgtaaaaacagttactttaagtagaagaaatacccaaatatcatgaaatccccttattaattttaattcttccaaaatgggtaccttctctgatttctacatctctttttcttttttttttcttttttttttttttgagacagattcttgctctgtcgcccaggcttgagtgcagtggtgcgatctcggctcactgcaacctccacctcctgggttcaagcagttctgtgcctcagcctcacaagtagctgggactacaggt

SEQ ID NO: 135932 - DNA, 1061 bp, Homo sapiens
aagctatgaaatgtttgcagaatgaaaacttaattgacaaagagtctgcaagtcttctttggaattttattgttctcttatgcagacaaaatggggtatgtttctttctacttctagagtgtttcttcttgctggtcttcatttcgtcttgggaatgctcagcctcccgaaggagcagggcgggatccgcgtggccagctatgggagcctcgagggcccccttaggaagcacactgtagtggctgggtagggagggagagggaacgtgcggttgggatgggatgaggtttcagcccagccttgccagcctttcgggtagttgtgggtctggctgtgtccagggtggggctttgtgcctgtggtggtccaacgcgtcctcacctgagagccgttgttctccttcctgttcctgttgacccaaacagaccgtggtagggaccgacattgcggagcttctgttacgagaccacagaacagtgtggcttcctgggaagtcgcccaatgaagcaaacctgattgatttcacgaatgaggcagtggagcaggtggaagaggaggagtctggtgaggcccagctctctttcctcactggtggtccggcggctgccgccagctcgctcgagagagagaccgagaggttcagggagctgttgctgtatggccgtaagaaggtgcgcctcctcatcatggcacctggcgcctgcacatgtccactgggtcgggcctggtgcggggttgcagccttcagggagggacgtggccccctcttgggagcatccgcgctgcagtgtggggcttcgggtcttgctgtttcctgaacaatgcctgactcttgtatgccatccttctggaggtgttaatgttggtttccttctaactgtttccagtgttggagacctgcagattaaattttcagttattcgataaatgcacatgttgagcacaggccgtgcccctgctgtgtgtgccaaatctcggatgaaatgtgcatgacacaagttgtggcattctcacaaagtcagactcgagtccacagcccagaagtcattgggagttgggag

SEQ ID NO: 135933 - DNA, 1770 bp, Homo sapiens
agcccttttaaagtaaccttttaatattgagattatttttgaaaaccttatgagtcacattaaggagaagaaatagtagtaaaatttacagttaggggattaactagtcaaaagcagcaaccgtgaaagagaactggctgggcacagtggctcacacctgtgatcccagcacttagggaggctgaggtgtgggagaagcacttgagcccaggagttcaagaacagcctgcgaaacatagtaagaccccatctctgtttaagaaaagaagaagaaaaaggacttaataaagaaatcttttagcaccttttctaaaaatattttttccttttaatctaaaacacttgtattgagagaaaaatcagccagttgcctttaggtagctagggccctccagatctcatggcttcctggtgtcgtgctggtttccaggaagaagctgggtttctcgaggagtccttggagcataaagtcctggggtggtgtcgcttctttagtgatatctgaggcatttcttcttttgcatgttactgtattaatcattaattccttgctcacagatccaggtcactgggatcgttaccactacagtgctagagtcagggacccccgcacctatgaccggaggtattggtgtgatgcagagtatgacgcatacaggagagagcactctgccttcggggacaggttggtggagcacccctggggaggcagaggctgggggcagccagggcgcgctagtgcttctctgccctcatgtctgggttttaacaaagagctgtggtagtttgggtgagcatctgcctgatgttttggtccctgtctgaaaggaaggagggagcagaccctcccagggttcccagcttggactgttagaggagaactggcctcagcaagaggactgttcagcacctctgggagcacctgggagattgggctcactctttctcatcgtcccttcttaccggtcgcgccctgcagcccagagaagtgaccacactggagacgcattcgcagtacttctctaacgttgcacgtcagagggccctgagtgtcgggtgtgctgtgttgtgcctcggccccaggggtctcggtctcagctcctgggcagctgcgtggcacatggggacggggcctccggcactcccattcctctgcctctgtcccccggcttcctctaggcccgagaaacgtgacaacaactggaggtacgatcctcgcttcacggggagttttgacgatgaccccgatccgcacagagacccttatggggaagaggtggaccggcgcagcgtccacagcgagcactcggcacggagcctgcacagcgcacacagcctggccagccgccgcagcagcctcagctcccactcgcaccaggtacgcggcggcgcctcacagacacgcggacggttgtgtttagaaccaccatcctgtttgcaatgtacctaaagttttactgctgtgcctggggaattgattttgcccgtttgctttgttttctaagagtcagatttacagaagccacaatgtggctgccggttcctacgaggccccgcttcctccaggctcctttcacggcgattttgcctacggcacctaccgcagcaatttcagcagtggccccggcttcccagagtatggctaccctgccgacaccgtctggcctgccatggagcaaggtgtgtgctcagcaggacagagggataccggctaaccccactggggcggccacccagcctggcatctgaacacgggagtcagggctggga

SEQ ID NO: 135934 - DNA, 2366 bp, Homo sapiens
agaaaatgaggagaatctctcatctgaaaaagcaggcttatctggtcaagcggactttgacgatttctgctccagccctgggctaggccgtccgcccgcacctacacacgtgggggcaggcagcctctgccaggcccttctcccaggccccagcaatgaggctgctggtgatgtgtggggtgacacagcgagcacaggggtgccggatgccagcggctcgcagtatgagaatgttgagaacttagaatttgttcagaatcaagaagttctgccaagtgagcccctcaatttggacccttcctccccgagtgaccagttcagatatgggccccttcctgggccagctgtgcccaggcatggtgctgtgtgccacaccggagcccctgatgccacactgcatacagtgcaccctgacagcgtgtcatccagctatagcagcagaagccacggaaggctctcaggctcagccaggccccaggagctggttggcacattcattcagcaagaagttggaaaacccgaggatgaagcttcaggtagtttttttaagcaaatcgattcttctcccgtaggaggtgaaacagacgagaccactgtgagccagaattaccgtggcagcgtgtcccagccctcaaccccgagccccccgaaacctacaggaatatttcagacaagtgcaaatagttctttcgaaccggtaaaatctcacttagttggggtaaaaccatttgaggcagatcgcgccaacgtggttggtgaagtaagggagacctgtgtccgccagaagcagtgcagaccagctgccgccctgcccgatgcttcccctggcaacctggagcagccaccagacaacatggagaccctctgtgcaccccaggtctgtcccctgcctcttaactccaccacggaagctgtgcacatgcttccgcacgcaggggcaccgcccttggatactgtgtatccagcacccgagaagaggccttcagccaggacccaggggcccgtgaagtgtgagagcccagcaacgactctgtgggcgcaaagtgagctgccagattttggaggcaacgtccttctggcccctgcagccccggcgctttatgtgtgtgcaaaacctcagccacctgttgttcagcctccagaagaggcgatgtccgggcagcagtcacggaacccaagctcggcggccccggtgcagagccgaggtggcattggtgcttctgagaaccttgagaatcctcccaaaatgggagaggaggaggcccttcagtcccaggcgagttctggttatgcaagtttattatcctcaccgcccactgagtctctgcagaatcctccagtcttgattgctcagcctgatcacagctataatctggctcagcccattaacttttctgtgtccttatcgaactctcatgagaagaatcagtcctggagagaggctttggtgggggatagacctgcagtcagcagttgggctctcggtggtgattctggggagaacacttctttgtctgggattccaaccagctctgtccttagcttgtctctgcctagcagtgttgcccaaagtaattttccacaaggttctggtgcttccgaaatggtttctaatcagcctgctaatttgctggttcaaccaccatcccagccagttccagagaacttggttccagaaagtcaaaaggatcgtaaggcaggaagtgctcttcccggatttgctaatagccctgctggaagcacaagtgtggtgttagttccacctgcacacggcaccctggtgcctgatggtaataaggcaaaccattccagtcatcaggaagacacttacggagccctagactttaccttaagcaggactttggaaaatcctgtaaacgtgtacaacccgtcccattctgacagcctcgcttctcagcaaagtgttgccagtcatcccagacaatctgggcctggggcgcctaaccttgaccgtttttatcagcaggtcacgaaagatgcccagggccagcctggcctcgaaagagcccagcaggagctggtgccaccccagcaacaggcttctcccccacaactacccaaagccatgttttcggagctgtcaaatccagaaagtctgcccgcacagggacaggcccagaactcagcacagtcaccagcaagtctggttctggtcgacgcgggtcagcagctgccccctcggcctcctcagtcctctagcgtgtctctggtgtccagtggctccggccaggcagctgtgccgtcagagcagccgtggccacagccagtgcctgcacttgcccccggcccaccgcctcaggacctggccgcctactactactaccggcctttgtacgatgcctacc

SEQ ID NO: 135935 - DNA, 1029 bp, Homo sapiens
gcactttgggaggccgaggcgggtggattatgaggtcaggagatcaagaccatcctggctaacatggtgaaaccccatctctactgaaaagacaaaaaattagcctggcatggtggcaggtgcctgtagtcccagctgctcaggaggctgaggcaggagaatggcatgaacctgggaggcggagcttgcagtgagccgagatcgcaccactgcaccccagtctgggcgacagagcaagactccgtctcaaaaaaaaaaatgtgtggattaaactacagagtcctcccctttggtttaatttttcctttgattggctaaacttatctgtttgttcatgagggtggtgctgacaagaagaaagactgatagaaagaaaagaactttcctaaagatatagtccttgaatttttgccttaagaggccaggttaactattcaagtttgtatctactatgttttatttaaaaactgatggaggtttttgcccctttcttttctgtaagaggtttcttggcaattctgcctgttgttgaaagtgttggaatccagtctgtgccttgtaaagctgctttaagtttcctgggagtttccattccaggcacagttacggctccagttcaaaggtaacatcttgctggtggtcctttcagaccttaagccagtcacagtacaaaaacggagacctatgaagaggtgtgataaaaggcatttagatgaatatatttattttgcagtgctttttaaaaaaatgattgtgtcactttttatttatttatttttttaaaatagagaccgtcttgctctgttgcccaggctggaccgcggtggtataatcatagctcactgcagcctcgaactcatggacacaagtgatcttccttccttaaccccctgagtccctgggactacaggtgtgtgccaccatgtctggctaactttcttcttttgtagagacaaggtcttgctatgttgcccaggctggtctcgacctcctgggctctggcagtccttccaccttgacctcccaaag

SEQ ID NO: 135936 - DNA, 1028 bp, Homo sapiens
acccccagccaccagctacaggtgcctgagcaccccttcctcaccccgtcccctgagtcccctgaccagtggtccagctcgtccccgcattccaacgtctccgactggtccgagggcgtctccagccctcccaccagcatgcagtcccagatcgcccgcattccggaggccttcaagtaaacggcgcgccccacgagaccccggcttcctttcccaagccttcgggcgtctgtgtgcgctctgtggatgccagggccgaccagaggagcctttttaaaacacatgtttttatacaaaataagaacgaggattttaattttttttagtatttatttatgtacttttattttacacagaaacactgcctttttatttatatgtactgttttatctggccccaggtagaaacttttatctattctgagaaaacaagcaagttctgagagccagggttttcctacgtaggatgaaaagattcttctgtgtttataaaatataaacaaagattcatgatttataaatgccatttatttattgattccttttttcaaaatccaaaaagaaatgatgttggagaagggaagttgaacgagcatagtccaaaaagctcctggggcgtccaggccgcgccctttccccgacgcccacccaaccccaagccagcccggccgctccaccagcatcacctgcctgttaggagaagctgcatccagaggcaaacggaggcaaagctggctcaccttccgcacgcggattaatttgcatctgaaataggaaacaagtgaaagcatatgggttagatgttgccatgtgttttagatggtttcttgcaagcatgcttgtgaaaatgtgttctcggagtgtgtatgccaagagtgcacccatggtaccaatcatgaatctttgtttcaggttcagtattatgtagttgttcgttggttatacaagttcttggtccctccagaaccaccccggccccctgcccgttcttgaaatgtaggcatcatgcatgtcaaacatgagatgtg

SEQ ID NO: 135937 - DNA, 1059 bp, Homo sapiens
gaacgggcagggggccggggtggttctggagggaccaagaacttgtataaccaacgaacaactacataatactgaacctgaaacaaagattcatgattggtaccatgggtgcactcttggcatacacactccgagaacacattttcacaagcatgcttgcaagaaaccatctaaaacacatggcaacatctaacccatatgctttcacttgtttcctatttcagatgcaaattaatccgcgtgcggaaggtgagccagctttgcctccgtttgcctctggatgcagcttctcctaacaggcaggtgatgctggtggagcggccgggctggcttggggttgggtgggcgtcggggaaagggcgcggcctggacgccccaggagctttttggactatgctcgttcaacttcccttctccaacatcatttctttttggattttgaaaaaaggaatcaataaataaatggcatttataaatcatgaatctttgtttatattttataaacacagaagaatcttttcatcctacgtaggaaaaccctggctctcagaacttgcttgttttctcagaatagataaaagtttctacctggggccagataaaacagtacatataaataaaaaggcagtgtttctgtgtaaaataaaagtacataaataaatactaaaaaaaattaaaatcctcgttcttattttgtataaaaacatgtgttttaaaaaggctcctctggtcggccctggcatccacagagcgcacacagacgcccgaaggcttgggaaaggaagccggggtctcgtggggcgcgccgtttacttgaaggcctccggaatgcgggcgatctgggactgcatgctggtgggagggctggagacgccctcggaccagtcggagacgttggaatgcggggacgagctggaccactggtcaggggactcaggggacggggtgaggaaggggtgctcaggcacctgtagctggtggctgggggtgttgtccacaggcgaggagtagctgtgctgcgaggggggcgtcaggaactgggctgcggtcacgggtggg

SEQ ID NO: 135938 - DNA, 1323 bp, Homo sapiens
ggacgctggggtggggtcctgaggagcagcctgcctgcccccaccccgcggaggaggttgtactgctgcttcctctggtgatggaaccttggggagggtccccacgcctggcctggcccccctcaccggcccccgccctcatcccccaggaggagacacccctgtttctggccgcccgggagggcagctacgagaccgccaaggtgctgctggaccactttgccaaccgggacatcacggatcatatggaccgcctgccgcgcgacatcgcacaggagcgcatgcatcacgacatcgtgaggctgctggacgagtacaacctggtgcgcagcccgcagctgcacggagccccgctggggggcacgcccaccctgtcgcccccgctctgctcgcccaacggctacctgggcagcctcaagcccggcgtgcagggcaagaaggtccgcaagcccagcagcaaaggcctggcctgtggaagcaaggaggccaaggacctcaaggcacggaggaagaagtcccaggacggcaagggctgcctgctggacagctccggcatgctctcgcccgtggactccctggagtcaccccatggctacctgtcagacgtggcctcgccgccactgctgccctccccgttccagcagtctccgtccgtgcccctcaaccacctgcctgggatgcccgacacccacctgggcatcgggcacctgaacgtggcggccaagcccgagatggcggcgctgggtgggggcggccggctggcctttgagactggcccacctcgtctctcccacctgcctgtggcctctggcaccagcaccgtcctgggctccagcagcggaggggccctgaatttcactgtgggcgggtccaccagtttgaatggtcaatgcgagtggctgtcccggctgcagagcggcatggtgccgaaccaatacaaccctctgcgggggagtgtggcaccaggccccctgagcacacaggccccctccctgcagcatggcatggtaggcccgctgcacagtagccttgctgccagcgccctgtcccagatgatgagctaccagggcctgcccagcacccggctggccacccagcctcacctggtgcagacccagcaggtgcagccacaaaacttacagatgcagcagcagaacctgcagccagcaaacatccagcagcagcaaagcctgcagccgccaccaccaccaccacagccgcaccttggcgtgagctcagcagccagcggccacctgggccggagcttcctgagtggagagccgagccaggcagacgtgcagccactgggccccagcagcctgg

SEQ ID NO: 135939 - DNA, 1375 bp, Homo sapiens
tcattacggctttttttaaagaaaaaaaaagagagagagagaagaattgatcggtgtcatgtgaagtgttgaagtttgtatcttgaaaatccctctaaatcctttgtcttaacagctcagtgcgagtgcagcgatttgaagttgactaatcctccttccttaaaggagaaaaaagtaaaagccgtctccagatagagtcggctggtgcaggagagaatttagcgatagtttgcaattctgattaatcgcgtagaaaatgaccttattttggagggcgggatggaggagagtgggtgaggaggcgcccggacgcggagccagtccgccgccccccggccaccagcctgctgcgtagccgctgcctgatgtccgggcacctgcccctggcccccgtgcccgcaggtgagaccgtggagccgcccccgccggcgcagctgcacttcatgtacgtggcggcggccgcctttgtgcttctgttcttcgtgggctgcggggtgctgctgtcccgcaagcgccggcggcagcatggccagctctggttccctgagggcttcaaagtgtctgaggccagcaagaagaagcggcgggagcccctcggcgaggactccgtgggcctcaagtgagcggacgccgcccctgcttctgggtccccggtgggaggtgggacctggccgagcatcctcaccgggagtctgcccctcccgacccagggcccacctcccacgccaggcccgggccaggggtctctgggggcttcctagggagctcgctcagcctcacttctcgacccctcaccccccaggcccctgaagaacgcttcagacggtgccctcatggacgacaaccagaatgagtggggggacgaggacctggagaccaagaagttccgggtgagtcgcgaggctcccgggctcctgggctcccgggcacctgctgccgggctgccctgacaggctctgctcactccctctatgtagttcgaggagcccgtggttctgcctgacctggacgaccagacagaccaccggcagtggactcagcagcacctggatgccgctgacctgcgcatgtctgccatggcccccacaccgccccagggtgaggttgacgccgactgcatggacgtcaatgtccgcgggcctggtaagggtgccagcagccagggcttccctagccccgtggcccacctgcctctctcccctaagccccgaggctggggtacagttgatactctggaaacttagaattgggggtgagagctttcatccttggggtgtttcccattcagagtagacgtgggggggtcctggagtcctcctgttcttccaccaaccccttcctggggtgataccgcagggccactctgtccctgtaa

SEQ ID NO: 135940 - DNA, 1031 bp, Homo sapiens
tctgtagaatgggttgcagcctgggttggagtaggccccttggcagatgtgcgttctgagctaccggggaaatggccggggcgcgggcacccagctgaccccaatctgtccccagaaccttgtgcactggtgtgactcctcgccctgcaagaacggcggcaaatgctggcagacccacacccagtaccgctgcgagtgccccagcggctggaccggcctttactgcgacgtgcccagcgtgtcctgtgaggtggctgcgcagcgacaaggtaacctgctgtgcccacccagctcgggtcccagcccatcaaggtcctctgtgggcctgggcctcacctgtctaccaccccatcccccgcaggtgttgacgttgcccgcctgtgccagcatggagggctctgtgtggacgcgggcaacacgcaccactgccgctgccaggcgggctacacaggcagctactgtgaggacctggtggacgagtgctcacccagcccctgccagaacggggccacctgcacggactacctgggcggctactcctgcaaggtgggggtccctcctagggtaagggttgtggccggcacgagtgttgccacacaccaggccctggctgggagctggcccagtggagaaaactgaacctgataggcccatgcactgttcagtctcattaggggagggctggggtaatcagggtagactgcctggaagaggtggcctgtggaaagcctgaaggagggtacctatactgagaagtgggatggggttttcccttcccctagattgtgtctgggcttggccaacacctaccctgaggccctcacctctatcctatgggacggggtccacccacccccaacaggcagtgactccggtcaccgaggccccgccagggtctgttgggctgggtctctctccaggtctgacaggagcgaggggcccgtggcttcgctggacctgagggcagctcatgtggccctgtcagccctcacagtggggtgtgggagcactgcatcctggcgccggctgag

SEQ ID NO: 135941 - DNA, 1873 bp, Homo sapiens
gccgcagtcttgggtatgggaagcgctgcggcccccacttttttctttattttgagacagagccttgctctgttgtccaggctggagtgcaatggcatgatctcagctcactgcaacctccacccctcaggttcaagtgattcccctgcctcagcctcccgagtagctgagattacaggcatgtgccaccacacctggctaatttttgtatttttagtatatatggggtgggggagtttcgccatgttggccaggctgatcttgaactcctggcctcaagtgactcagccacccccgcctcccaaagtgctgggattacaggtgtgagccacagcgcccagcctgcccccactaaaggactctgcgagtctgagtggatgggcacctccgccagcccatagggcattgcagacccgggagtgcccaggccccggccgtgctgctcgggcctccctcgacctgcagtgtggtcccccttgcaggtacaagtgcgactgtgaccctgggtggagtgggaccaactgtgacatcaacaacaatgagtgtgaatccaacccttgtgtcaacggcggcacctgcaaagacatgaccagtggctacgtgtgcacctgccgggagggcttcagcggtgagtgggctgcgcgtttctcagtgcagagggccgccctcgagtctggggagctggagacacaggatcgggacccaggtccagccagcaccatgcatggtgtctccctcccgtggcaaagccttagctccaggcctctggctcttggagatgaggaggggcctggggtggggagcaggcccagggctgctgttgtggggccctgccaaggtgcctgggagtgctggacatgccgagtgctgtccccttccctccaggtcccaactgccagaccaacatcaacgagtgtgcgtccaacccatgtctgaaccagggcacgtgtattgacgacgttgccgggtacaagtgcaactgcctgctgccctacacaggtgaggggtgggtggggcctgtgctggagggggcggggcctatgtgggaggggcgggacctgtgctggagagggcggagcctgtgctggagagggtggggccaggggtgggggcggcctgggaagccgtgactggagggtaaagtggtggctttcttggggcggggccttccagaaggttctgcgcctcactgagtgccttaggcccctgcagtatgtgggccttctcccgggggtggggttggcagattagcaaagatacaggatgcctgggagaaaattttcatgcaagcatgtgttttacctggcaagcctgccgcaagacacaggtaagatgcaggtgaatccttagcagggccgggcctgggtcactgggctccgtgctcccggcgcccaccctgctggggtctctgggggccgggcttccccacccccgccagccggacctgagggattcctttgatggcgggctctctttgtgtgagcggaacaaggagccctctgtttgggctgagcggggagggggatgttcccccaactgtccagcccctgctatgaacccagccaaggggatcacaggaaatgatctcctctagaaaagacaaagaagagtccacaagcaccggggtcctggcgctccccaggagcgggcagagggtgctgccacggggcctggtcagggagggcctgcctgggccaggcagccgggctggaggtcccacgcctgcggttcccatgacatccagcagcctgtggccagaacgctgttttctttgaccgaagttaaggacctgggttttctctcctgtgtcagtcagtgaggaccctccctccacggctgggcgcccctgtccctttcagacacgtcgatcggg

SEQ ID NO: 135942 - DNA, 1048 bp, Homo sapiens
cagacagggccctggttggtctgtgtgggccgtttgcaacctggctccaggcagcccctgtgcccagtggggtgtcctggcattgagggccttcagcaccccactcaggccacgcttcctgggccagtcacagggatgcctggatgaacagacaggccctgtgttcgggaattaccctctggtggggtgacgggcaaaggtgcaccccgacgcagcagtgtccacagagcacaaagaggaggcaagactccatggtgctgggcctgcagaggaaggagtgatttaggctggcggtgggtggaggagtcagcccaggaaggcttcctggagggggcggcattgccaccctgcgtcttaggggacagggagctcagggagtggcagctgcccggggccgacagctcctgttccctgcaggtcagtactgtaccgaggatgtggacgagtgccagctgatgccaaatgcctgccagaacggcgggacctgccacaacacccacggtggctacaactgcgtgtgtgtcaacggctggactggtgaggactgcagcgagaacattgatgactgtgccagcgccgcctgcttccacggcgccacctgccatgaccgtgtggcctccttctactgcgagtgtccccatggccgcacaggtgagtgccttgaggcccaggtgggcgcagggggctcacatgggccaggcctgagctgtgtgacctcacccagggactgtggccctcctgcacccaggataacctgaaagggcctttctggtcagggaggccggtggtcgctgtgagtcccccggaacgtcccaagtgtcacgggatgcccgacggggtcacggcgggcagctcctcctggggtgtcagtggggttggaccccagccgtgggtggtgtgccatgcctggcccaggggccgtgcccactgaccgccgctgcctgcccaggtctgctgtgccacctcaacgacgcatgcatcagcaacccctgtaacgagggctccaactgcgacaccaaccctgtcaatggcaaggccatctgcacct

SEQ ID NO: 135943 - DNA, 1052 bp, Homo sapiens
gggtaggctgtcacacccagcacctccaggaggatgtccagctgcctgctgggtggtgcgctttagctttggacaacctcgtgtctgaggcctggcctggccactagctctgtgaccttgggtcatcaggtcatgcaagcctcagtttccccagcatgtcagccgggctgatacacgctggatctcttggtggtgtgtgaggattgcatgagaaccgtgtggagagggcacctggtcagcgctcctttcttccccgccttctccccgttggctgacagtgctggtttccagagcctccttcctgaatgtttaattgattgacgagtgaattcagagaatcctaaaggtgctgcctggtgggctgggcctggcactgcctggggagggacttgccggctctggggaagtccatctcccaggatggctccagctccggggaagtccatctcccagggtggctccagttcacagacacgtttgagcgcctgctgtgtgctgcgttctgctccaggccaggcccccggtggggacagggcagacatggcccctgctcctgtggagttcacttcccagcaaggcgtgagagaggcacctagctcacatgtgggacatgttgggggtgtgccggcccggtggtggcctggcatagctcccggcagccccgtaaagctgtctggatcaggcaccgataagtgagaagaagagacccagagaagtcgccatcagccccagggtcacacagcagtggcagaattcctactagccctgcccctctccttctcccaagcgaatgtccctaaacacagccccagccagcctgagctgccccgtcatttcccgactacaagcggactgggggcgtggcttccccttaaaagaagaggaaggaggctcaggcgggaagtgacttggccctgcagccggcctgggaggctggggagggacggggtagctcctgtcacccggtctggctctttccattgagtcacctgcctcgtcttgggcgtggccaggggaggaacaggttgattctcctcctcatgctgagctga

SEQ ID NO: 135944 - DNA, 1074 bp, Homo sapiens
tcccctttgctggggcctggcgccccctccttcttggcgggaagcctgcttcagtttggcctgacaggcagccgagctcagcccacagagaccccattgtgcacaccccacaagtccaacgagaagatgggacggaagcgcgtcctcaggctcctgcttctgggccgcagagttggaggccagggccacagccgagcccggcttgtggaggcacaggtcagggctcacacagcagtctgggggacattgcagccgcttcggagaaggccccgggctccctccctgggcttgagccccacccaacatacacccctcaggtgcctctgccttcccgttcctgcccatccttctcagaaggcccaggaggtctgtccaggagttagccagggcacctgcaggaggcctggctcccccagcaaggggagaaacccacactgtttctcgaaagagtctggggtgcaggctcttggagccctgccagcctgagtgggaatcctggccccgtggtatccagctgtgaccccggaaagagctttggcttttggtgccatttgctgcctccgctgtagaaggggcatggtcatgatgggcgtcacagtgcctggctcactagtactgggtgaatcatttctttccatcccaaagagaaggaaccttcaccggaagctgccaatcaggtggttgcagggcccgggattggaaaaagtggttttgttggtgcaaaatgccttcccaggaggtcagagtgtcgccgtggcctggtcagccagtggccaggtagaaagcacctggcagcacatgctggtgggcggaggatggttggtctctgggcagctgctgtgcgaggtgtggccgtggtggctgtggtcggagatggtggccttctgagcaggcccagggggtcactgtggcccttggctcttctctagccccctcatcagctccgtcagtgtgagcaaggggtactgaagagggctccaccttttttctctttgttttgaggagagctgggaagagctgcagggaccctatctgtctgggtgagactacgtccttggtctgaaacgctctccc

SEQ ID NO: 135945 - DNA, 1049 bp, Homo sapiens
accaagagctctggacagcgtcaccccccctgtgcccccaggctgtggccccagctgtttgtgcctggcgagggtctggctagctggaagagggggccagcggaggagagagtgggcgccaccgtggggctgtcccaccggtggaggctccagcggagatgagctgggcaggcctcgcggagcaagtgcaaactgcacccgcgtcctgggggcatctgcggggagacttaggggtcatgctttgtgccccaggccacccagaggagaaggccaccccgcctggaggcacaggccatgaggggctctcaggaggtgctgctgatgtggcttctggtgttggcagtgggcggcacagagcacgcctaccggcccgggtgagccaagccctagcctgggagtgctggggtggggggaccgggagccctcagcacctcctagaggcggccctcagcacctgtcggggactccctgggggctcctgctgagggtcctgccccggccacatgttcccatcattcttgggtcctgctctgggactcctgggctgaccccctctccacccccgcagccgtagggtgtgtgctgtccgggctcacggggaccctgtctccgagtcgttcgtgcagcgtgtgtaccagcccttcctcaccacctgcgacgggcaccgggcctgcagcacctaccggtgagtgccccaccacaccgagctcacccagccccagcctcccaagtcggccacacatcagcatgtcaggggcgaggcgggggtgaatcctgggacccaagatgggaaactgaggccagagccatgagagggctgcctgagatgggcgacccagggcggccggagccaaggggttccacgatcacctccagtgtcctaatccttgctcttgccccgacacgtctcaaaggaccgcacctctaagagcatccccatgtttagaggggtcacccatcctgtctgcacccctccacttccgggggactaacccctccctaccctggcatccctggctgcaagttcccatatacacagaatggtgcct

SEQ ID NO: 135946 - DNA, 1040 bp, Homo sapiens
gtcccaggctccagcagggagctcgtaccttccctcagctgagggcccacctggccttgggatgccgttggggtagccagggtgggggtagccaggggtggattcacagagaagatcccagcccatcccatgccagggtctggggagcctcccgaggaaggggaggaggaagaggaggaaggccctgcctggccttccgctcagtcaccccgaggtggtttctggacccccagcatgttgggcaggggcatgggggctgcagggcggcgtgaggggctcagtccagcctggggcgctgggcagtcacgagtctttcttgcaggagcctagggttggatgaggcgaaggtcagagatcactgctccccacagcctccccgcccagctagatctgactggccccttggcctttggtcgcccccgacccccaagcctgggtagcccctctaggcccactgggcccagacccgggaggagggctctggagggtgggggcactcacaggaccccagctgctcctccaggaaggaaatctgctcgctcagggagtcgatgcggccgagctgctggaaggagtgcaccaggaggctgccggggtccgggagcccatgctccagtgcctgcgaggccaggctgtgcagtggggccagcaccagctgcagcttctgtgggtgcagaagggcagtgaccctgggccggcccccgccctctctgctccaccggggtctagggaggacccctgggaagggctccacaagcctccagcccccgcctccgcggcagggctccaagtgtccactagagggggctgccgtggcagaaaagcttgccgcagagtgggtgcctggggcatcaggctggcggggtggtcccagccttggggtccctggcaggagaactagggggacagctggaccactggccagtgggaagactggcaagagctctttgtcctggtggggacaaagatgggggggtggggaggtctcgtctgggtccaggctctgtgtattgtctggggggctgtcaagcttggttcct

SEQ ID NO: 135947 - DNA, 1014 bp, Homo sapiens
atgtggccctgccttgaggggccagtgaccttccccagggtgtgtggggccccatttcctctgctggggtgcagaggctgctctccccgacgtgggtccttcatagcggacgtgagagccagtgccagttcctttccggctgggtcccctgtggggtggatgagggctgggtgggccctggatgtggatttggaagtgggcgccttcccatgctcctagcatccgagttccagaggctctgggttttcctctgttgctggggagacggaggcagggcagccgtccaggtgggtgagccgggcccgggactctgtccgcttcaggggctccctcccctgtgtctcccggtctcctgccccgtgccaggagggcccctccccagcctcctccacaccccacccccaggccttcgcgccccagcctcggctgcgggatctgtgggacccgtgttcatggtggcctcccctgcagcatcatcggctggttcgtgcgaagcttcaagtacttttacgggctccgcttcgaggtgcgggacccgcgcaggctgcaggaggcccgtccctgtgtcatcgtctccaaccaccagagcatcctggacatgatgggtaggccgggcctcgggggtggcttctggggtttgagtggggccggctgagctggggctgtgtggggctgggtcccggggacgaggacacagggctgcctgtgcctgggcgagctcggcctcagtacctccctcagggccagacacagaggctcggaggccacacgacccgtccaggtagccagggagaaggcagggtgccaggcaggcctgtgggtgctcagcagctgtcttccagcgcacgctgtctccccctctctctctgtctctgtctctctgtctcccaggcctcatggaggtccttccggagcgctgcgtgcagatcgccaagcgggagctgctcttcctggggcccgtgggcctcatcatgtacctcgggggcgtcttcttcatcaaccggcagcgctcta

SEQ ID NO: 135948 - DNA, 1094 bp, Homo sapiens
ggcccagaccatggggggcagcgccagagcccgagccaccggcaagccatgatgggggggtcccctgggaccgggagggtgggagcagagcgccagagcctcggtaacctggcagaaggctgtggggagggagcgtggaggggaggtccgggccgggtgacccagggcgggaagggggggccgtgtcggggcggggttggggacagtggcggggcggggcctggtgaggggaccgtgtcggggcgttgttggggacagtgtcggggcggggcgccgcacctagcccttccctgccgcgcgctcctcccccacgccgcgccccgccccgcccagccccgccgccctcgcaataaggggcctgagcgcgcgggggagaagcgggagcgggagcgggagcgagctggcggcgccgtcgggcgccgggccgggccatggagctgtggccgtgtctggccgcggcgctgctgttgctgctgctgctggtgcagctgagccgcgcggccgagttctacgccaaggtcgccctgtactgcgcgctgtgcttcacggtgtccgccgtggcctcgctcgtctgcctgctgcgccacggcggccggacggtggagaacatgaggcaaggccgggggccgccgggaggggccggggaaccgccgcgccgcttccgcttccctaactttcttctgggcttccctccttcctgccccgcccgtcccgccccgctccggggctccggggagagcgcgcctgggccggcggcaggcacaggagggggtcccggagtcagggggtcccggagtcacggggtcaaggagccggcgtcacagtgcccagcaccccaccccccgccctggccccgggcgtctacaccggtttcggcctccgccgcgtccctgcagcccggcgtggggttccgggggtggagcagctttcggagagaaagggggccggtccgcgctgggagaggctcagccctgcttcctgagcggggaaaccgaggccggggcggcggggacttgccccagggctattgatcagggcgcacgacggcgtgggggcacccctcggcctccctccgaccccctcctgactgtccg

SEQ ID NO: 135949 - DNA, 1031 bp, Homo sapiens
gaggtcggcgggcgcgccaggcagcaggtagccccgtagcagtgcgcacaccttggccaggttgggctggatgaggtcgcccttgcactgcctcatgagcctgtcacacggggccctgcagtcgcgcccgtaggtgcagtcggtgctgtgctcgcagcggcggccctgcaggaagcggcgcacggtggcctcgggtgccacctgctgcaggtcggccatcttgaagtcgtaggtggctgtgtagcccacgttggccagtgtggtctcacacatgtagaaagtcccgtaagagccgtggaagagctcctccacgaactccagcaggccgatggcgatcttggcccgccaaggccacgcaggccccagccactgctggagagcaccctgcagggcaggcggcagcagtgggcgcaacaggggtggaagggcggccgcgtgccaggcgccatgcggcacgccctcggtgaggtagaggtccccacagtagcccagcagtctggaggcgtgctccttctcctgcagggacagcagcagcaggaactcgttacgctgcagcagggcccacacggacttggcttccgccagggacacccggttgtccttgttgaagtcagccatgagcaggacctggccaaccagcgccggcagggaaggcaggtctcccaggttcgcctggcgtttgggaccaaaagaaaggaaaagccagctgatttgatgtctgggagcacgacctggcctttacctggtcctcctggcggggtggtctgccggccagaccagcacatctgccaggttaggggtcccagcccacagctacacgggtggaggacgcagccagcaatgtgtcagctcactctgctggcctgtgtggctgctgccagacagacctcccgcctcctggcagccttgggtgcacctggggagctcgggggtgggcacctgggcagagaagcctcagagcttccctgaggatgagaatcggcacagggcagagggcacgcactggctgaagccctgggaagcggcccctt

SEQ ID NO: 135950 - DNA, 1779 bp, Homo sapiens
agtgcagtggcgcgatctcagctcactaccacctctgcctcctgggttcaagcgactttcctgcttcagcctccagagtagctgggattacaggcgccagccactaggccagctaactttttttttttttttttttagagagacgggtttcaccgtgttggccaggctggttttgaactcctgacctcaagtgatctgcccgcctcggcctcccaaaaaacgcagtgtttatgtgatgctcctctgtggtgtttgcaagatttatacaaaattgcggtttctttttttctctaggacgtctgctcactggagatgacacgtgcgtggggtgttgggtaagttggtgcattggagctggaacagggtcaatcctccaatgtaactaagccctcctgtgcaacatcttaagtgactggagggaccagtcggtcttgtgttcacattgaggctagaagctgtctccaggggagtaaaaacggattatttagtcttcaacaggacactgcccctagaggcgttgcagctgtggctgccgtgtcacatctgtgtcattaggtggcagagattagagaggctatgtctacgctcagcgttctgccccgtgaacgtttgaatgtttgatagtctcacactcctgttttgtggacaggcatctgttttccttcgctggtatctgggagagagggtgggccctgtgagtgggctttctaactctcgcgctgggctaggctggcctctaggggtctgaagggatagtgggaaggtggagggtgccttcaccaggagcagccttcatgagtgagttttaagaacctgtgaggatcggtcaggtcaggtgaggtacgcgctggatcatgccgtacaccgtgtcaggatcacgcaggacaggactggggaagggtttgctggcgtctcggttaatagcagtaacggcagccgcttgtgttcttgattctttgccaagcattcttgttatttaacacgggaaggaggtgacttcgcctgtgatggacttccagtgtgagcactggccagagtgaccaggctgaccagcaccagccctgatccaggtaagaggtgaggcggaggcttgccctccttccctgcctgccgggtgcgtgtgagcggctgccctgcggatgctgtcctggacctgttggcaccacagacagttgctctgctgtgcctgtggcctcggggcaaagagaaagtggcgatttctacactcagtgctcgggaaccagtgggcactgagaatggtttatggcctgacattacttgcaaccaaagccaggcagcatttggattttcgcttttggaaaccaccttacctggtttgctccatgagggaggggcagcaacatcgctgggaaccctgaggtgtagatatgtataaatgagctgtgtgtgtatctgaagctcgggcacttgtggggttaccaggagtgtgcgtctcactcccaggcctcgttctggaaacgattctgtaggtctgtctgggaggccttaggcaagtttgattaagaacagtcgagctggataaacaggctgttccttgtccagcactagtcatcccaggggggcgggggcggggctgcaactcctgtgcacaaaggaagggccctgggtaggggtcaggagctgccttgcccagagatgtgtctgggtcactttggaaacaggaatcctctccccaaaatgggtagcaatgggggtacagaggccaaagacgcagctgcatgtcctgcagtgcctgggacgccccgtagtgaagagtga

SEQ ID NO: 135951 - DNA, 1065 bp, Homo sapiens
gggcaagcctccgcctcacctcttacctggatcagggctggtgctggtcagcctggtcactctggccagtgctcacactggaagtccatcacaggcgaagtcacctccttcccgtgttaaataacaagaatgcttggcaaagaatcaagaacacaagcggctgccgttactgctattaaccgagacgccagcaaacccttccccagtcctgtcctgcgtgatcctgacacggtgtacggcatgatccagcgcgtacctcacctgacctgaccgatcctcacaggttcttaaaactcactcatgaaggctgctcctggtgaaggcaccctccaccttcccactatcccttcagacccctagaggccagcctagcccagcgcgagagttagaaagcccactcacagggcccaccctctctcccagataccagcgaaggaaaacagatgcctgtccacaaaacaggagtgtgagactatcaaacattcaaacgttcacggggcagaacgctgagcgtagacatagcctctctaatctctgccacctaatgacacagatgtgacacggcagccacagctgcaacgcctctaggggcagtgtcctgttgaagactaaataatccgtttttactcccctggagacagcttctagcctcaatgtgaacacaagaccgactggtccctccagtcacttaagatgttgcacaggagggcttagttacattggaggattgaccctgttccagctccaatgcaccaacttacccaacaccccacgcacgtgtcatctccagtgagcagacgtcctagagaaaaaaagaaaccgcaattttgtataaatcttgcaaacaccacagaggagcatcacataaacactgcgttttttgggaggccgaggcgggcagatcacttgaggtcaggagttcaaaaccagcctggccaacacggtgaaacccgtctctctaaaaaaaaaaaaaaaaaaagttagctggcctagtggctggcgcctgtaatcccagctactctggaggctgaagcaggaaagtcgcttgaacccaggaggcagagg

SEQ ID NO: 135952 - DNA, 1180 bp, Homo sapiens
ggtgcagtacaacagtgagtgcggcgggccgggggggcgcgggagcgccgcgcgggtctccgaacccaggccccgggcgccgcgcggtggtgggtgtcggtctcacctgcttgccggttgtggggtgcgctgggcccgccgggcgctccgggagcgggggcgcgggccaggggacgcgaggagaggccaggccagggccgggtcctcgcggcccccgagccgcgggtcgtttcccagccgcactcgcctgccgcgtgtcgctcccgccgcgctgtgcagtggagcgggtcggcggcggcggggttggcccggctgcccggcccgggggtgattacataatgccaagcagggcccgccggcccggggcgccgcgcccccgacgctccacggtgcccagccccgggcaccactcacctgcaggaggtgcggggaacccagccggccttggcgctttcagcgggatttttctttgttgacttcctactgagtttgaagacagaatattagctacgccacacattctcgcctttttttttaaaagaagcgtttgtaagagacgtatctagaaaagctccagaaggcacgggctgacttgcgactgtaggagacatcccatttctcgtaggaaggaggagtcatttacggactcctgagtgcctgggacgctccattcctttgttataaattgtgtaaattgtcctcgacctcttatgagtttttccatcttgcgggctctttcccagtagtttttgaaagcttttatgtggttccctgttttgacattgcttccctcttagccatttccgtatgtttctatgaggttttaggacgctacgcctatccagttttttggtcactttaaggggagccttagagcctccgtgatatttccatggtaatgtagaattttaagaactaatgatcagaaagactcttgtgcaggtttaaaagcaagttcatgaattcgcgtgccgtgtgcacggagagaggccgtagttcctggggctggagctagtccaggaggacagtgaagatgtcgccttccttagtcccccggcctgtgagcaagaggaagctgcagaccactcgggccaccctcacccagacacctttagcagtaagcaagataaaacaacttcttaaagataagtctgagcatctaggtatgaaagttggtgtc

SEQ ID NO: 135953 - DNA, 1132 bp, Homo sapiens
cggacccaaggagagcagtgaggaaggtgggtgggggcaccagagtgcggtcagcctgctggagtttgggtagaacgtgggcctcctcccagctgctggccgctggccggggtcctctcctgagtccaggatgctgtgccatgctcctggcagccccctgcaggagctgatgtttgcagtgtggtcctgtccatcagcagggcctcctggagggctggggctcgctgctttgtgagtttctagagaagtcctgtcacccagcttggggtccccgttggcctgagtttgagccactgtctgtcctgtctgtgcaggtaaggagggcaaaaccccctctaaggagaagaagaagaagaagaaaaaaggcaaagaggtactggctactccccttcctggcaggccaggactgggtggcatgcggtcctgggaccagggctgtggcttcctgtgactccatggcgccccatccttgtgctcctcaggaagaagaaaaagctgccaagaagaagagcaaacacaagaagagcaaggacaaggaggagggcaaggaggagcggcgacggcggcagcagcggcccccgcgcagcagggagaggacggctgccgatgagctggaggctttcctggggggcggggccccgggcggccgccaccctgggggtggcgactacgaggagctctaggccggcgtgggcagtggccgccctggggcggggggcgtgcctgtcactgcctggggaggcatttgcctctgtaccatcgcctttgccgctgccccgtggctgccgtgtgcgcttctgagctggaagaggccgggcattggtggtccccaggctgggccctgcaggtgctgggccttcaggcccagtgtgagcctgctctgcaagaagggaggggacagctggcttcagccaggctcggtggacaccctggccctctcggggcagagccgccagtgtttctcagggatgtgactgaggcccaggagggacctgtgagggtctgtttacagaggctgggcaggggccgcttggctgtggggtgtgcgctgccccggcacctgcttgccctccgcgctcatctggggccgcagcatgcctatggttccgcttccggccgggagccctgaaca

SEQ ID NO: 135954 - DNA, 1488 bp, Homo sapiens
gacagggtctgagcaggggagtgggcaggtgggggccctcccgggggtggaacaggaagaggcggtgccttactgggcagaccacagtcccagaactctaggtcatctagagccacagcgcccctgtgggtggcatttcgggtggcagagaaggtcacctgaagagaacaggctcttaggacctaagtcagggcccagacccctcctcaaggcccccactcgtccagaccctcccagctcactcggaagtcaccccggatgcggcctgtggtcactgccaactcctgccagccagggccccagggccctgtgctctgccacagggtcagggtctctgcgccatgggtcagctccacccgcagttcagccacatctgcaatgtcaggggtcccagggcagctgcggccctgcttgtccccagctgcccacccgccctccccttgggcaccccccacgagccttgggggtccagggtgcacctccagaggccgcgtggtaccagagcctcagcttgcaagaggaggctgcctctcgcagggttggcgagcgcagggctgcggtggatgcctctttccctcggtgggttccaacggccatgtaccagcctggcgcaggtgagaggtcaggagacggggcagggagcaaggagggtattgggacaggggcgcacagagacttgccctggcctcacccaagtcggtgcccagtgtgtggtctgagtgaggcccaggaccctccagtgcggcccctgccctgtctcggagccagctgtagcctgaggtactaatgtcccgccagccgcaggggtcctgctcgaagtcacaggcgaagggggcgcccagggtgggcgaggccccgtggtaacctgggagagtgggtggtcaggtgtgtgccagacctgctcgcactggccctgcccgcccatctggtcttggctcaccacactgggcctcatctgagcagtccctgcagtcacacacgaagttgcacacggcctggccagggctcctgcagtggttggggacccaggcccagcctgaggaccctgctgctgggaggttgacagccaggtggcctgggggcagggtgaccagccatcccagcctgcctaggactattcagttttagcactggacatcttttgtccggggatgcccctcagaccaggagatggagcagggaggggctgggacccacagagaactcccacccggctcaggaccaagcacagcacgttcctgtttccagccctgaagaggctggggagggggacccggccatggggcaccccaagaaaggtagcaggaacccagagtgcccagcagggaactgggcactgggagggcgacccccaatgggaggcatcgacgggcggcccagggcctccacaagctccacccagtccaagggtggcagatgaaggctggcagagctgggggcacctcctgagccctcttgtcccagactgggaggggagtcgtgcctctt

SEQ ID NO: 135955 - DNA, 1092 bp, Homo sapiens
cgcaggcaagatgcccctgcttgcaggaatcctggagccgcgagctgggcggcaggggctggggggctggggcccggggcccaggaggcagcggctgcagggtggacacctctgtgggggcagaactggtgtcaggaggcagggatggggagtgctgtgcctctccagggcaaggcagggtagggcagagtcagcaggctcacccgagactggtctgcagtggtcagacaggatgaggtcgtccagacccacgacgccccccgggcctgtctgcccggccaggaggatctgagggcagaggggctcagggggtgcccagcctatttccccctggggtctggtccctgtccacccgcagtgggtaccttgtgggttcccctcccctgcccacagtgcggctccccagaccccaccctcttgctgttccctacctggaaggggtaggcgctctggatgtcaacacggtctcggacccaggcggtccccagctcccctcggcgcctccgcagcaggacgggggcccggggggcgccgggccccagagtctgcaggaacagctggaggcagccagcctcagacccactcaggtactgatagaagaccagctgtggaaccaagagctggctgggggcctgcaccggggcagccagcacggagagcagggaggccctgtgagccccacccatctcaccgagcagttggaggtgcctgaggcttggaattcggggctggagagtatagcaggggtgccaggctcggccacggagaccaggaaggagcctgcgggaaaggacgggagtgggccagggccactgggctgtggctgcgtgggcagggcctgggccgggtcctctgtgggcctcaccctgtgcactgttccggctgtggtcacggcgtggccaggaggggcgctcaggaccaccagcgcggtggttccgggaccagccttccgagcggttccatgggcccaggcctgtctcaaagtcggtggctatgtggcggcctagggcaggaggtgggcgtgtcagggccaccaggcagtgcttcctgaagccgtatggccccagctccaggggggccctggcaaccaca

SEQ ID NO: 135956 - DNA, 1030 bp, Homo sapiens
ccaggcctcagcatatcctgagacctgcagcctgtcccagcctgggcggggcaggtgtccggtccctggctagggtctgaccaagtgctggatgtcacgtgaggaagcggggccttgtctggggtggtctacggatcactggtgacagatgccgggagggtgacaccatcctaggaggaggaagaggagctttttttttctttctttcctgagacggagtttcgctcttgtcaaccaggatggagtgcaatggcacgatcttcgctcactgcaacccctgcctccctggttcaagcgattctcctgcctcagcctcccgagtagttgggattacaggttcctgccaccatacccagctaattttttctagttttagttgagacggggtttcaccatgttgggcaggctggtctcaaactcctgacctcaggtgatccgcccacctcaatctcccaaagtgctgggattacaggtgtgagccaccgcgcccggccaaggaggaggagctttgacagtggtggctgggagaggcagggcagggagggcaaggatgggccttgcacaggtgggggctcctccccggggggttgtgtcccgccactgcccgccctccagcgtcacagctgagcacagaggctcctgcccacccatccccaggggctcctaccgcattgaaaaggatgttgtcaaagccaggggctgtggcctctgtgttgctctggaaggggcagctccccttcttctgcagccagcgccgtcccccaagtcccagcagcaccaggagcatgagcaataggagggcactgccaaccacagctggcacagacccgggtgcggctgtgttccctgtgggccatagggacatgtgagccctccaaagcagcccccacatctggggctaaggaggaagcctggggctgcatggtccctcagcctctgctggctcctggggttcacccctatttcaaaggcagagggtattggttctgctaccacaaggatggggcctggcagacaggcagctgctgtc

SEQ ID NO: 135957 - DNA, 1161 bp, Homo sapiens
attagcgcggaccccacagcgcagcacctcaccagctccccgcaccaacgccccggcgcgctctttgaggaaaaagcagagggcgacttaggtacccacgccgtctcagcgccgaccaatcggcgcacgctgcggctcctgcgggctcgctggttggctccggcgtcagtccgtcaggcgcgctcggagcggggcgtatctggccaatggctctcgctacagcttcctgagggctggctggttggctcccatgtccgtccgtcaggcgcacgcggcggagcggcggcggcggcggcggcgttgggggcggtagctgggcgggcccttagttccgggcgcgctgcgaccgttgggtgaggcgagcgcggggtcgggtgcggggtcgggcgcgggcgcggggtcgggtgcggggtcgggcgcggggtcgggcgcaggcgcgggcacctctcagggagactccgggccggagcgggagcgggggcgggagaggccgcggggcgggggcggggccagcccgaggggatttctctgagccgctgggccggaaaccaagtccgagcgtggctggcgcgggaaagttcgggaacgcgcgcggccgtgctcggagcagcgccagggcacggtccggggttttgcgcggggtcgcggctcccagtaccgcctgaggcccgtgggcggcccacccggccctgccccgtcccgggtccgtcgctcccccgcaccctgtcgcccctccacgctcagctgtgggcccctcgtgtccccgaagccccgcaccctcagccggctgcgtgctcgggagggtcaggggcgcctccgacccctgagtttgccagcgccccccagccaggggtcggggaagaccagtgaggctgggggcggagccgactctgctgccttcctgcccagtggctggggagacccaggctgagcctgggtgaaaagtccctctggctgctgggagggtcgggggcagcaaggagccagtgcggggatgggctgcggtggaccgggccgggatcggggccggggcctggtcctggcagtagcaggggatgtttgtggaaggtagagccgagaaaaagaggagttgcaatgtctgcaagaatctggcgtgagcagctgaaggctggtgcttcctaggccaagatgaaggagtca

SEQ ID NO: 135958 - DNA, 1071 bp, Homo sapiens
tgagcctgagtttccatactagcggcgggagatgggactagagggtctccaaggctccctgaagctctgcgattctgcttctctgagtcttgaccgcaggtcagtggggacccggcccctcaccatcgcctgctactgatcaccattggtttggttttgtctcgaggactgttctggaattgaggtgtaacgtgctgtgtgttcttccttagggctttgttcgcgggggtcacagctctcatggctgcagctagcgtgaccccccctggctccctggagttgctacagcccggcttctccaagaccctcctggggaccaagctggaagccaagtacctgtgctccgcctgcagaaacgtcctccgcaggcccttccaggcgcagtgtggccaccggtactgctccttctgcctggccagcatcctcaggtgcatggggcctgcaggctgggaggaggggcaggcaggctaggctggttttagagccacgctgcccagcctggtagctcccagcagagccgggtccagcttagatgtgctccagttatcgatactccctggatttcggaggtttaccacaaagaatgtaaaattaataattttaaaatagcaatttgaaatacgattttggatacatggggttaaatatagtacgtcattacagttaattttatctttttattatttttaatgtgagtactggaaagtttaaagtgccacctactgctcactttttggctgctctaggcagctaagacagccgccttccttgcagcgagtggtctgagaggtgtggcctgtgcacatcggcagcagctcggcctgtcgggagagccggcaatacctgagttactgcagcagatgtccttggcggttcaggcgtgccttcctcacaaacggagtgataaaaacagtgtgctgtgaatactggggtttaaaacatgtcctgttaacatttgcctgctgttggtttcactaaggatgagaaagtttaaactgtggtgtggaggtaggtttttgaactgaagcaaatggtgtttgttttttgcattaggtttcacagtgggttgtt

SEQ ID NO: 135959 - DNA, 1028 bp, Homo sapiens
gagtggagacgaggacacactgatctgatctcctcctgccctcccacctgtgggagccctgagagctatctgcagagggcggcccccaggaccagcatgcggacaccaagccagcgctacatcgccttgtgtccccgggtgaagctgtggctgcccaaatgtcccacgcgagttctactgacgcttcctcctttcgttgctagagctgccacgaaggccgctgcccgctcatgctgaccgaatgtcccgcgtgcaaaggcctggtccgccttggtgaaaaggagcgccacctggagcacgagtgcccggagagaagcctgagctgccggcattgccgggcaccctgctgcggagcagacgtgaaggtgcgtggggtggagcagcagcctgtgtggctgcagccatgcggggctgagctggggagctgcgtgctggccactgcggctgcgtcggcccctttgcactcgttccaccccctcggccctttccctggagacacgcgggcggatgtttcttggcagaactgggaatgggtgtgaagttaatgccgaggcctttcaaaagcatttttgtaagccgggcacggcggctcacgcctgtaatcccagcgctttgggaggctgaggcgggcggatcacgaggtccggagttgaagaccagcctggccaacatggtgaaaccccgtctctactaaaaatgcaaaaagttagccaggagtggccaggtgcggcggttcatgcctgtaatcccagcactttgggaggccgaggcgggcagatcacgaggtcaggagctcgagaccatcctggctaacatggtgaaaccctgtctctactaaaaatacaaaaacaaaattagctgggcatggtggcgggcgcctgcagtcccagctactcaggaggctaaggcgggagaatggcgtgaacccaggaggcggagcttgcagtgagccgagattgcgccactgcactccagcccaggcgacagagcgagattccgtctcggaaaaaaaaaaaaaaaaaaaagcc

SEQ ID NO: 135960 - DNA, 1001 bp, Homo sapiens
gatagaatcttaggttctaggatcaaggccgagatgctgtaggcacctttcctgtttgaatttagcctggcactgctcgtgaaactcagcactgggggccatggcagtcctgtgctctggcgccctcgaggcggaaagagacccaagcgtcatctggaggggccgccacattgtgtggtgcctgctgccaaggccttcagcagggaccagaaacaaaactcacactctttcttctctgagttgagactggaaaaatgaaagattgttttaggggaaacttgagggaacagtctgggcagcctgcagggcatggccctgttcctccagggctgggaaagtcagcactgctttctggtggcgaccttccctctgcagctgctggctcagccgattgtatatgctgggagctctgcactaagcgttgggtgaagggtcagcattgtggaggccctgccacggaggtggtcttcttgggagctgcactcaggcaagaggacctgtttgtgtggaacatctgctttaagcaatgctggtgaacacagcttgtgtgcggcacgcgtgcaggctgaggacaggcagaatgggcctgggggcacggtggaggacgaggatggggaggatgggcctgggggcacggtggaggacgaggatggggaggatgggcctgggggcgtgtggaggacagggatggggaggatgggcctgggcacgtggtggaggacggggacggggaggatgggcctgggcatgtggtggaggactaggacggggggaggatgggcctgggggcatgtggaggacgaggatggggaggatgggtctgggggcacgtggtggaggacgaggatggggaggatgggcctgggggcacgaggtggagaggactaggacagggaggatgggcttgggggcacgcggtggaggacgaggatggggaggatgggcctgggggcacgcggtggaggacgaggacggaagggtggtcctggtgctgccacagt

SEQ ID NO: 135961 - DNA, 1029 bp, Homo sapiens
tggcaggccgtgtcgcgggacgagttcctgtggagggagcagttctaccgctactaccaggtggcccgcgacgtgccccgacacccaggtcagtggcgtgtggggcccctacccacgttctgcagccagggccccgggcccctgcgcttgggggtcagcctggctgggggcccgccccgcggccccgcgtgtccatgctcacccccccacaccctgatagaggcctgtcaggacacagcgcaggcgcccctcagagcttggaggccagagggttcattgggtcacttggggggtggggggtacaggggtctctgtgagctacagggttgaatcccccagccgaggcctatgccatgactagtgggttccaggggcaccacggggcctgccaggactgctggggccacactcggctcatggccgtgactgcgaggaaggcccgggcccaggactgacaactgcccacccgcagcggccatgtcctggtacgaggagttccagcggctgtatgacacggtgccctgcgtggaggtgcagacgctgcgggaacacacagaccaggtcctgcacctcagcttctcccattccgggtaccagttcgcgtcctgctccaaggactgcactgtgaaggtgaggacggccaggtgtcctgcacaccccacccagctctgccgcagcacggaggtcccaggacccaggcgttccaaccaggtggtggtgggggggggggtgggtcaggccagaggtgacagcagcctccctgcatccagcggagggaccacagaggatcaggagcggtgcagggtggccctgagtgctgaggagagggtcccacacacagccgcctgcttcaggggcaggctcctccgctctataccaatgccccccgagtggatgacagtggctggaaggggtccctgctccctggtggcctctgagtagggctggcagagctggggcctcatggctgtgtagtagcaggcccccgccccgcgacctggccaggcgatcactacagccgcccctgcc

SEQ ID NO: 135962 - DNA, 1014 bp, Homo sapiens
tgtcccagttcatccgcaagcatgtggcctcctgcctgctggtctcagacacaagcacggagctctcctacatcctgcccagcgaggccgccaagaagggggctttcgagcgcctcttccaggtgtgagggcgcacgggtcggggggcagttgcaggtggtggaggtgggcgcactcctgcctgggcgtccctgccgcagcctccccctccaccgcccctgcagcacctggagcgcagcctggatgcactgcacctcagcagcttcgggctgatggacacgaccctggaggaagtgttcctcaaggtgtcggaggaggatcagtcgctggagaacagtgaggccggtgaggggcctggaccacttgctcagcccaccccacccacaaggccccagctcgggcctgcgctgtcactcctgcctggtgtctgggggcgccaccctggtcctgggtggaagccaggggacgccccggggttagcctgcggtcctaggtgggtggtcctggtggccagaggtcccggacaggtgtatgagcctgggaactggggtcaagaccggggatgggggtcctgggcaggcctaggggccagtagccctgagtgtcccctcggcccttccactgcggcagatgtgaaggagtccaggaaggatgtgctccctggggcggagggcccggcgtctggggagggtcacgctggcaatctggcccggtgctcggagctgacccagtcgcaggcatcgctgcagtcggcgtcatctgtgggctctgcccgtggcgacgagggagctggctacaccgacgtctatggcgactaccgccccctctttgataacccacaggacccagacaatgtcagcctgcaaggtgggggtggcagggtgaggctgggacagcaagggagggggagcagggttgcgggggagcggcatgagggcagccagtagggagagggtagcgtgcaaccacctgctcagcctctacctctctgcacagaggtggaggcagaggccc

SEQ ID NO: 135963 - DNA, 1051 bp, Homo sapiens
acggcctggcccggccccctgtcccctaccccagcaccattgaacccgaggcgctgcggcggggcaacatgagctccctgggcttcacgagcaaggagcagcggaacctgggcctcctcgtgcacctcatgaccagcaaccccaaaatcctgtacgcgcctgcgggctctgaggtcgaccgcgtcatcctcaaggtgcacgggtctgggacgctccatgtttgacaggcagagtgggagggggtctctgcaggcctgggacccctgggcagagggtgtcggcagaattgacacgggaggggtacggggtgcagcttcggatgggacacaggctctgcaggtgggggaccagggggtcgcttttcctttcgggagctccaggggctgctgtgggaaggcactggagagtctgctctggcagggtcctccggctgggggtggccggtccagggcagtgctggtggaggaggggtgtgtccagagaccttccagagtgtctcgtgggcgggcagctgggcagtttgggttctgggtgaggggtcctgtctggaacaagcagaggccagggctggacattggcctgggaggggagggcctgtggacgaggccaatcctgggtgtagagggggtccctaggatgagggtgggacagatgagggtggagcattgggtgcttaagggacacatggagacaggtccagcaaaggagctggtgggcacagctgggcagttgggggtccggaggccgtgctgccctgggagtggagggcaaagcaggtttcacctgagcgccgcagaaaggagtggagagcccgggcgtgggactcacgcttgaaatcccagcactttgggaagccatggtgggaggatcgcttgagctcaggagtttgagacaagcccgagcaacatagcggaagcccgtctctaccaaaaatacaaaattagccaggcgtggtggtgggcacctgtaatcccagctacttggagggctgaggcgggaggatcccttgagcctgggaggtggaggctgcagtgagctgggactgcaccac

SEQ ID NO: 135964 - DNA, 1053 bp, Homo sapiens
ccagggctcagagcaggtgggggcctaaggcagacatcctcttgcccagccagggcccgggcgggaccccttgggctgcaccagtccgtgcctgtttatctttcaacatgcactgcaggaaacccaggctgcagtcagctggggtggccatcatcaccatggctggcagaattcccctgggcacctggccttggcggggagcctgggttaggtacatgccctggccaggcacctggagctggctgagtggggtcccatggatcaggcctgcagcccctggcattgagtcactggggacagcagagcagggccaagggaacagggatgtggcatgtggcatgcattagtattagtccccgggggtggttgtcaggaaggtccccactgggcttgggagcagaggctggaatggtggcccctgttccagtggggacaatgctcagggaagggagtgtggcctatgagggcagctggcaagcaggtgggaggtgtgcactgtcctgaccgcaagagtgactcccagctgctggtttgggctgccccccaggacctttttgggtccccaccctacagggctcccagaggcccactgggccacagtggaggtccttagcccatggctggagcaggtggggaactgtttcccccagggaggctgagtccttgccaggcttgtgatgtggggctggggctggctggacactgggcacactcctgctgggtccccactttcctgggaaggatcttggacatcagagctggactcttggggccaagcttggatgacagaggtttgccctgtgtgccatgcgccctgctggggcaggggtgcaccctgggcagagctccaccctgggcagagctcagggtctggagggtgggtgccaaggacctctgtgctgctagcaggctcctccaagctctttgcctcagtttccctgtctgtgagtgtggcctatctcctcttagttagctggacttgggtctacccttgggctacaggctgctcttggtgcagggacagggtcactgtcatgaagtcactgggatggc

SEQ ID NO: 135965 - DNA, 1025 bp, Homo sapiens
tcgccagcgtccgctcggcgcgccccggggacagtgaaggcttggggcgcctctgcagagtcgccagcgcggtgggcgcagccggatgcctctgggagaagagcgcagcgcccgagggtcccccggcctacgaaggctaagccggggtctcggattcgatgtgggcgcgtcgcgtgacgcccggcgaggggcggcccggaggcttcccggcggcggcgcgcgcagggtctcgggcccgggtcggtcccgggcgcggcgcgggcggcgggcgcctcctggcgggcgcggacggagcgcggcgcctttaagcgggggcgggcggggcgcgggcagagtcgctgtcgccgcggccgccggggcggagccagcgcggatcgggtcccggacgcccgagcgccccgcccccgcgcgggcgatgcccagcggcgcggcgggctgcggggcccggcggggcgcgcagaggagcgggccgcggcgctgaggcggcggagcgtggccccgccatgggcttcctgcaccagctgcagctgctgctctggaagaacgtgacgctcaaacgccggagcccggtgagcccaccccacgcgcccgccctcagcccgaggccgcgcgcaccgcggccagaggcgcgctccccgcgcgcacgtgcggacggccgggcgcgcgcagaccccggcgggcgctgggggcggcgcgggcccgagccccctccccgccgggccctgccctcgcctgccggcgctgcggcctccggggaggtggctcggtcgtgtccagtccggtcccgcgtccgctgacatcgcggtgctcggctgagtcacggcacccgcgccctctgcagcgcgctcgctggggccgctgtgggcggggggcaagcggcgctcaggactctggctcgagggaggccctggttcccaggacagaaggcaggcctggggggctccattcagctgcgaggctccatggtccttgggcccagcctccctggggtcccggaggagaccctgtcccttccctccgtccac

SEQ ID NO: 135966 - DNA, 1899 bp, Homo sapiens
ggggtatcagcacaggagcggggactgcctcactccccaggtgccaagttggcgggtgggcccaggtggacctgctggcacaggtttaatgtttaacgtgcccaagtcccggcccactgatactggaggctgctgccccaggttgtggagggtgtgcggtgcctggcgttggctcctgtgcccacctgccactgcggctgctggaactgccttgaaggaaggcggacagcctgagggccctgagtgtcaggttaccaaggaaaccaaaccagccaaccaaggtctggagaaggatgatgccccgtgtggcccccgtggccctgcctgcagtgtgcagtgtggggctgggcagagaggaagagtcctggttagccagaggtgccaccgcagactccccaggcagggttgatggccctgctggggttcccctggctccactggcttgctgtgactggggacattccttagctttgaggcaactcagctatatcccagaggggaaactgaggcagagggccattgccccctcgccccgttctccagcaccaggataagactgattagccacatgtgtcagctggcaccgtggcctgggcccctcatcagcgagatgaaagtgtggttaggaactagggaactagggcctggcctgccatccccagcactgccaacctcggcctcctgaggccctcgggtgccacctggcccctgactgcagcccctggtgtggtggctttgggagtgacctgcctgggttctgtgtctgaggccagtgaggtcagcagactccatcttaggtgtcctcggtgcctgggggacaagccagaggctggaggagcagcatcccttccaggctgcacacttgtcagtgccgggttctggggagagccgcacgggaaggagaggtcgctggcggcatcgtttgctgctccccagagacagacctgggcccttccctctgggactcccaatctggacggggttcctggcttgctgtggggcatgttgaggccggaggctgggcttgtggggctgcacggccctgcccaggagaactcagcactgcctggacggcgagactcagcttctgagctgagggctctatcaggcctggaagtggaccctggggaggggtggggcagggtagttctgataagtcctaggactgttcgcttccgggttctgagccctggcgtcagggaggaagggcatgtccagaacaatggccagaaccaggcccggccagctcggggggtgacgggggcgggtggctggggcagcgctgccgtgtgcaggggccgagccctgcggggccgtgagccggccctgccttctgcttccttcccagatgtagccgcctgtcccgggagcctggactgtgccctgaagaggcgggcaaggtgtcctcctggtgcacatgcctgtgggccctgccttcagcccttccaggaggaccagcaagggctctgtgtgcccaggatgcgccggcctccaggtacgagagcaaagggggaagtcgatggggggatgtccctgcatgaacctctccctgtaagaagcggccggctgggcgcggtggctcatgcctgtaatcccagcactgtgggaggcccaggctgttggatctcatgaggtcaggagttcaagaccagcctggccaacatggtgaaaccccgtctctactaaaaatacaaagtagccgggtgtggtggcacacacctgtagtcccagctactcaggaggctgaggcaggagaattgctttaacccgggaggcggagcttgcagtgagccgattcaccactgcactccagcctgggcgacagtgcgagactctgtctcaaaaaaaaaaaaaaaaaaaaagaaggccgggagcagtggctcacgcctgtaatcccag

SEQ ID NO: 135967 - DNA, 1017 bp, Homo sapiens
ttggggctgcagggagcccccgcccactggggcggctactgcccaaggtacaagaggtggcccggtgcctgggggagctgctggctgcagcctgtgccagccgggtgagtgtaccccaaacccccacacccacgctggggcccaggccagtttagtgcttccccgccctcgtccaggcctgcctaatcctgccctcccgcaggccctgcccccgtcctcctccgggcccccctgccctgccctgacgtccacctcacccccggtctggcagcagcagaccatcctcatgctgaaggagcagaaccgactcctcacccaggtagggcaggcgcgggaggggtgcaggggtgggggtgaggccccgcaggccttgaccaactgtgcacctgcccaggaggtgaccgagaagagtgagcgcatcacgcagctggagcaggagaagtcggcgctcattaagcagctgtttgaggcccgcgccctgagccagcaggacgggggacctctggattccaccttcatctagtccttgtgggccgcgtgggcccccagggccagcctggcactcagcccttcgagggtgggcgccccatcgcacccaccctctctggctggagacccccggcaggcccaggcacagtcccggagtgggcgccttcctgccgcccttgccagatgggctccccaggcctgcccccggctggtccccgcaccgagcgcttgactccgttttggctcctggtgctgacatgggctggggctctcttgagtccgcatagtccgcagctactactgccgctgtcagtggacagtggggtacccctccatgagttagcgtccccccgtttccagcggtgccgccctgggtcccatcttcagggaaaggcactgcccacgccaggctgcacttccaacaacgggcagcagagggcgcggggcggctccgacgcgggtccaagggcagcttcccgctcaaccagggcaccaggacgaggtggctgtagctcggacggacggaag

SEQ ID NO: 135968 - DNA, 1029 bp, Homo sapiens
ctgcccagggcctccgcgcgcctcccagggccactcggcaagaaaaaaaaaaaaaaaatcaaacctcctctcagcctatcagagagcagatgggacgggctcggccaatggccgcggcgcatgttaatgagggctgacgccgcgaggagggccccattcaaaagtagtcgctattgtcgccgtgggctgagctcgccgggccggcccctccgtggggccgcgctgggacgcacgcgggtggacgaggggaccgatcccgggcgcccatggccggggccgccatggccgagcggggccgcgtgcctccccccgcacccgcgcccagcacggaggggctgccgcgcgccttcctgcagagcctgcgcaccctgttcgacatcctggacgaccggcggcgcggctgcgtgcacctgcgcgagatcgagtcccgctggcagggcaccgacgcgcgggagctgccccgcggggtgctggagggcttgcgccaggtggccccggccagcggctacctgaccttcgagcgcttcgtggccggcctgcgcacctccctgctgagcgccgacggcggcccccgggaccccacgcgcgccccggcccggcccggggatcagccgccgccgccgccgcagcgcctggtgttcgctccggccgacgagccgcggacggtcctggagaggaagcccctgcccctgggcgtgcgcgcccctctggccggtcccagcgccgccgcccgcagcccggagcagctgtgcgccccggctgaggcggcgccctgccccgcggagcccgagcggtcccagagcgcggcgctggaaccgagctccagcgcggacgcaggtgagttccggacggcccccgggcaccctcgtagctctcccgggcccgggccagaaaccgcagtcccacagctgctgcccgtgcatttcccacaagggacgggaccggggagcggctcttcgtggactccggatcctggagggcgcctcggcgggtctggagggaaagggcttcatgcttgtcgcggtgagc

SEQ ID NO: 135969 - DNA, 1016 bp, Homo sapiens
gttatcctggagcggaaagacaaagttgccatggccccaggtgtggcccgttcctgagacggggagggaccgcccagactagaactgggagcgtagttgggggtccacgcgcccgggttcgcggctgccccgaggctgtgtggtcctgggttaggcgcctctttttctgggccttgatcgtcatttgtcacatggtacaccaactgggctgtctggttagtgaccagggctgccttaggcacaaggccggggcttcccccgcctccagcacgtcctagactcccagagcgatccctggcgggagccctcgcgatgcccattcccttctccgtctgcagacggcaacgggggcctctactgcgcgctggaggaccacaagatcctggaggacatggagcgccggggagtggagtttgtgcacgtgtactgtgtggacaacatcctggtgcggctggcggaccctgtcttcatcggcttctgtgtgttgcagggcgcagactgtggcgccaaggttagcgcccgactgcgcggcgccccgcacccgaggctggccccgcccctcacggagccccgcccctccgcccagccctcggaacccatccctggtcttggctgcaggtggtggaaaaggcataccccgaggagcccgtgggcgtggtgtgccaggtggacggtgtcccccaggtggtggagtacagcgagatcagtcctgagaccgcacagctacgtgcctccgacgggagcctgctgtacaatgcaggcaacatctgcaaccacttcttcacccgaggcttccttaaggcggtcaccaggtgtgcggcagcaggtggctgcggattgccggccagagccgcctgcgttgaccagggacccgcggggtcccagtgagctgagtgccctgggccacagcggctgtggtcaggagtggctgtggtcaggcacggctgatgggtcggggtggagaatggatcctgagcttgcaaaggcagaggtgctggagatcaggcacaagccgt

SEQ ID NO: 135970 - DNA, 1153 bp, Homo sapiens
ctcaaactcctgacctgtgatctgcccgcctcggcctcgcaaagtgctgggattacaggcgtgagccacctcacccggctatttttttatttttatttttcttatttgtatacatttgtggggtgtgtgtgcaactttggtcagtcaggtcagggcttttaggggatccatcacccaaccaacgttgttcccatttattcacaggctttgaaactgagccccgggcatgaatttagaaagtagcaggacagtttgatttcagggctgggaaagaaaaggacgtttggcttccatctccctgattttctagggccacccctaaatctagctgcctaggctctgcgtgggaggcctgtgggggtgctttctaccccaaatcaggtcctgtcacttggcagtgggatgtgtgctcagggtttggggtgtccagaggaagatgagcttgctgagacaggagctgtggggagccaggtgtgtagagctcagtctcctatcgggactgggggtgctgggggagggctctgggcaggtgctgcaaggagatattgacaagtggactttccctagcttgcccccaaatggagaccctccggccatctgtgagatatcgcccttggtgtcttactctggagaggtgagagctgcccatccctatctggggcttttctggtgtcaggtttggaataccatctggggagaggtggctgctcgggtggagacggcacagctctacctcggttaaccaatggggtcggtggtttaaatttgcagaagactttccaagatatgggttggggtggggtgaggcatccagaggcctttgcaggtcctgggagggcatggggatgagacagcccaggtctgagcccagtgtggggccagtcaggccttggtgggggccttgcggagggaggacaccggcctctgctacctccctgacctcggctgcccttgcccctttctctggtcaggtcagacctgtgcgtgacaggagggtcccctgctggcctagggtcttgagtgtggtcttgggtggccttgcagtgtgtgtctgctcctggccctggaagcctttctgtccccacccctccctgactccaggcagacctgggatcgcacctggggactgtggctcttggtgtggccagagggg

SEQ ID NO: 135971 - DNA, 1044 bp, Homo sapiens
ccagcaaggccacagaaagagcctgatgtccatgatccaggtggctctgagaagcttggcctggacacctgagcctgcggccggtactcctgccttctccccatctatccccaaggcctctgcctctcagcctcttccatggtcggtttaggctgctgagttttctgtgcttccccaagaaccagtgggatcaatgccggcggcctctgtgatggttgctgactaatccgggatttcatgagtcagaggcaccacccctcaccccagctgcctgctgcttctgacggatcttggtgctcaggctgcctggctctccgagtgaggacgcagcctccatatttggtgcactcaggcatggctgggacaagccagctgccccagggttcttcccctggtgattctcgcctgctttctcatctcaggggaggcagtggcacctccctctccctgctgacatgaagagagctatgatatgccactgctgccaactcatcctctgcccccacctcgaaacccacagtccccagtggagggccactactcatccccattggtttcccaggggaggggtgttgtctggaagggcaggttcagatgcagccttccagatttagaggcactgggaggacagtggctgagtggaggcgcccagacctgggcaggcagcaggctcaggcccacaccttgtgatttttgaaaccaaagcccagaagatgatgtttacttctctctccctggctctgcccttcttactgcaaaccatgctgtgccttagggcccttctcatagctgttcctcatggccatgactggaacagggatgcaacctctttctacacaagcacagttagttgggtgaagtctttttttttgtttgttttagacggagtttcactcttgttgcccaggctggagtgaagtggcgtgaccttggctcactgcaacctccaggccagcctcagcctccctagtagctgggactacaggcacccactaccacgcctggctaattctttgtatttttagtagagatggggtttgaccg

SEQ ID NO: 135972 - DNA, 1063 bp, Homo sapiens
tgcaaggtcctggcccaggcgcctgcccctcttggagcggaaaccggaggttccccgtggtgtatgctcccctcggtacagtgagaaatgagcccctcttgattggctcctggtctgttcgtggtggtctcaggccgaagggcattgataaccacatgcggactgtgcatcgcctgggcggtgcctgggctacatctgtgggagtcgcaggagtctttctccactgttgatgaaatgtgacagaaatgtttctgcttttttcttatcctcgtctcatctgcaccactgtattaacgacatctgtagtattgtcccagcaatgttcctactccctgctgagagggaacttctccccattcaaaataaatagagctggccgggcacggtggctcatcccgcgttccacccactacactccagcctaggtgtaacagaatgagaccctgtttccaaaaaaaaaaagaaatagagctgaacactggatcttccagaagaattccttattgtcctcacagtttgtgacagttgagacgttccgtgtgatatattcagtaagaaatgtcattctctgtacctcccttagaaatggaagcaactgtcgagattgcagcggaatatgattctcttcctccttgcctttctgcttttctgtggactcctcttctacatcaacttggctgaccattggaaaggtatcagaaacacgtgtacttgaaaacgatatctgtgttgagggttgattgggcagaagcaatcttgcattctaccttaaacagctccaggaggcatatatggcaacgaattggcaagaaatcaagataaagagaaaggtagagctgtatgtaaccacctggctagaacacagatgttaatttgatgctgtctgactactttctaggtctctggtgtaagtactgatatgtccagcctcccttatagagtaagtcagctggtgggcttgaacactcagcctaaataaccacacaaatttcgtagcactcattagcgtgtgtttggaaaagaccaggcagagttctggtgaggatgtggagaatctcttctc

SEQ ID NO: 135973 - DNA, 1014 bp, Homo sapiens
gcccccgtctgtgtggccatcctggcatcttggggccacctcactgtcactagtgctcctgtttggatgaaagattctctactcctccaccatagaggccccccgcctccggcctctgcagagggatttctcacgattctccaagctctggtctctgacctcaggccagccttgaccctggagcagtgctgtggtcttggctctcaggcacgggagctcaggactgaactgtgtgtttcctgccactcagcagcctgcacctcaggatgatggggccgctttgggtgcagggctgtgccttggccgtgggtatggagcgtgggggtgggaaacatggagccacaaatgtttgacggcagctgacacccttccttctcccccgaagctggaggggagcggtgatcgagcctgagcagggcaccgagctcccttcaagaagagcagaagtgcccaccaagcctcccctgccaccggccaggacacagggcacaccaggtgaggccacacctgcaccccttcctccccgggcgctcaggggctggtggctgatgggtgcaggcttcgtctcagccatggtgggtggcgcccccgccctggtgtgcaccttgcccttcagcatccccctgttgtctgagtcctcacaggctctgcaaccttggtgacaccatgtggctcttggcctgctgtccctgagcacatggctgcagaagaaggtgtgtctgagaggtttgtgtctgggccaggctgccccacgggatccctggagactgctgcccgtgctgtgtcccctgtctcggcctggccagtcccaggcagctctgggggccacttcattctcagcaccgtttgttgggggcctcccaggtgcgggccttcggccaagctcagtgcatgacctgaggcctctttcaacctcatgacaccctctgacacgataagccactcaccctcccgttctccagactgaaaagcagggctgaggacagccacccccagagtcgtttgcttgtctgt

SEQ ID NO: 135974 - DNA, 1452 bp, Homo sapiens
cattgcaaccttggcctcctggtttcaaacgtgggttttttggagacagagtctagtggtgtggcccaggctggagtgcagtggcacgatctcagttcactgcagccttcgcctcccgggttcaagctattctcatgcctcaccctccccagtagttgggaccacaggcatgcgccaccatactcagctaatttttgtgtttttagtagagatggggttttcccatgttgtccaggctggtctctaactcctgggctcaagcaatccacttgcctcagcctcccaaagtgctgggattacaggcatgagccaccacgcccagccaaatgtattttgaagatggatagataataggaaaacgttggagccatccatttgtctctgcatcctttactgttttatgtcatagaatttgaggaagccaggaagtgggtgtcgaagaagttacactttgaaaaggacgtggacgtcaacctgtttgagagcacgatccgcatcctgggggggctcctgagtgcctaccacctgtctggggacagcctcttcctgaggaaagctgtaagtgtcttggggtgtcctgcagggagatggtggactcgcattcaagcagttacccctttagtggacttgtggggacgtgactgtcttcctgtttcctcttcaaatgcactggagtctgtttctgagctcatattcgtgagctgatgaagccactttgatcaccactggccttgtagagacattcactcagtgcagagtgatgcccgtttccttgctgctgtgttgaccccagagagccttcagtgtctccactgaactgcatgaaagggtgtagacgaggcctctgggtgacctgaacgttggttctctactctgctcatataccaggaggattttggaaatcggctaatgcctgccttcagaacaccatccaagattccttactcggatgtgaacatcggtactggagttgcccacccgccacggtggacctccgacagcactgtggccgaggtgaccagcattcagctggagttccgggagctctcccgtctcacaggggataagaagtttcaggtaagggggcaggctttctggctggatgcgcctcccctggagctaccttttgctcatcacagcaggtactgtgtgtgtgtgtgtatgtgcatgtgtgttttcaggttttttactgtgataaaacacacaaaacgcaccaccttaaccatttccaggcgtggtcggtggtgttacattcacgctgttgcaggcgtgcaggtcggtggtgttacacacattcacactgttgcaggcgtgcaggtcggtggtgttacacacatttgggctgttgcaggcgtacaggtcagtggtgttacacacatgctgttgcaggagtacaggtcggtggtgttacacacattcatgctgttgcaggcgtgcaggttggtgctgtta

SEQ ID NO: 135975 - DNA, 1098 bp, Homo sapiens
gcccggtgtgtagcaggtcctcgggcggtgtgtgggggccgggttggagggcctggtccaggcagctccgctgttccatgccaagtgccctcgcgtggcctcccctcccagggtaccagggccgaggcagcgctgggctcccacgttggctgcccgtgcagctgcaggctgagggcagggcctgggatctggggctgaagagaccctctgattccaggaccacctggtgtgcttcctgccagggacgctggctctgggcgtctaccacggcctgcccgccagccacatggagctggcccaggagctcatggagacttgttaccagatgaaccggcagatggagacggggctgagtcccgagatcgtgcacttcaacctttacccccagccgggccgtcgggacgtggaggtcaaggtgggcctgggcctgggtcagggtccatcaggaggagggtgctggcagggctggccttgccctgagctctgctccgcccacagccagcagacaggcacaacctgctgcggccagagaccgtggagagcctgttctacctgtaccgcgtcacaggggaccgcaaataccaggactggggctgggagattctgcagagcttcagccgattcacacgggtgagcacctgtcctcgccccgcgtggtcacggccaccgggccacaggcacggctgggctgtggggctcaggctggctccgctcttggtggtggctgtgacctggatccgggaggggcgggcttgccgcagcctcggggtggccacactgcagcttgggggccctggcatccccatccccactgagcttcatggttgtgggacccagagtacttggaggggctgggcacccctcattttcatttctcagggcctgtctagggagggtctctgctgtgggcccagcatccccccagtttaggaggcacacgcacccatgactggggcaccatccccactgtggaccaggccctgttttaggtcacgccctccacgccagagtgtcacttcctggctctgctgtgatcttggcctgaggcccccgctgcctccgctcccaccgtctgccctgtgccctgtgccctgtgcg

SEQ ID NO: 135976 - DNA, 1027 bp, Homo sapiens
cagggggcctcacagttgccgcacagggcacagggcacagggcagacggtgggagcggaggcagcgggggcctcaggccaagatcacagcagagccaggaagtgacactctggcgtggagggcgtgacctaaaacagggcctggtccacagtggggatggtgccccagtcatgggtgcgtgtgcctcctaaactggggggatgctgggcccacagcagagaccctccctagacaggccctgagaaatgaaaatgaggggtgcccagcccctccaagtactctgggtcccacaaccatgaagctcagtggggatggggatgccagggcccccaagctgcagtgtggccaccccgaggctgcggcaagcccgcccctcccggatccaggtcacagccaccaccaagagcggagccagcctgagccccacagcccagccgtgcctgtggcccggtggccgtgaccacgcggggcgaggacaggtgctcacccgtgtgaatcggctgaagctctgcagaatctcccagccccagtcctggtatttgcggtcccctgtgacgcggtacaggtagaacaggctctccacggtctctggccgcagcaggttgtgcctgtctgctggctgtgggcggagcagagctcagggcaaggccagccctgccagcaccctcctcctgatggaccctgacccaggcccaggcccaccttgacctccacgtcccgacggcccggctgggggtaaaggttgaagtgcacgatctcgggactcagccccgtctccatctgccggttcatctggtaacaagtctccatgagctcctgggccagctccatgtggctggcgggcaggccgtggtagacgcccagagccagcgtccctggcaggaagcacaccaggtggtcctggaatcagagggtctcttcagccccagatcccaggccctgccctcagcctgcagctgcacgggcagccaacgtgggagcccagcgctgcctcggccctggtaccctgggaggggaggccacgcga

SEQ ID NO: 135977 - DNA, 1042 bp, Homo sapiens
ctatctggacccctgcctagggtggatggctgctggtgtggggacttcgggtgggcagaggcaccttgctgggtctgtggcattttccaagggcccacgtagcaccggcaaccgccaagtggcccaggctctgaactggctctgggctcctcctcgtctctgctttaatcaggacaccgtgaggacaagtgaggccgtcagtcttggtgtgatgcggggtgggctgggccgctggagcctccgcctgcttcctccagaagacacgaatcatgactcacgattgctgaagcctgagcaggtctctgtgggccgaccagaggggggcttcgaggtggtccctggtactggggtgaccgagtggacagcccagggtgcagctctgcccgggctcgtgaagcctcagatgtccccaatccaagggtctggaggggctgccgtgactccagaggcctgaggctccagggctggctctggtgtttacaagctggactcagggatcctcctggccgccccgcagggggcttggagggctggacggcaagtccgtctagctcacgggcccctccagtggaatgggtcttttcggtggagataaaagttgatttgctctaaccgcgatgtcgcctgtgtctttagggatctccatgactggaaagtctgggcggacgttggggagaaggtattcttcaagtcacgtctcagaattcggtttgctgagactggactctagctgtcccctgctggtgggcagggagaggccacggggaagctccgtgtccctggccccacggggcagatgcttggcgggaggcatccttgcgcctgcgtttcacacagggcctgtttccctgcagggctggcactgaggcgcacagctgagggatacacgggccctcaggtcaggcagctcccagcagcctggcatggctatggccccgagccctgggctgtggtggcagagttgtcctcatcatcactctactgctgtccctatcccagggctgaccctgggccttggctgggttccccccgaccctgaacc

SEQ ID NO: 135978 - DNA, 1034 bp, Homo sapiens
ccaccctgccccgtggagagcgggggggccctcaacagtcaggcccggggctggcagcacagacaccgccgacctccaagcaggtagcctggagggccttcctcactgggacctacagatcccagagccccagatcccctgcaggaccattccgaggggggacaggttggtggccggagcccgcggtgtgtctgtgtgtggccgctgggccccagcgcctctcctccccagggctggtctacaacgcctcgggctccgagcactgctacgacatctaccggctctaccacagctgtgctgaccccactggctgcggcaccggccccgacgccagggcctgggactaccaggtgtgggggtgtgggtggcctggaaccactcgggggcaagggtgggcgtgggctggcctgactcaggctggggcacctgcaggcctgcaccgagatcaacctgaccttcgccagcaacaatgtgaccgatatgttcccggacctgcccttcactgacgagctccgccagcggtactgcctggacacctggggcgtgtggccccggcccgactggctgctgaccagcttctgggggggtggtaaggctgagggggggtgggccagcgtcctgctttctgccccgagctctgcaccccctgcccatggctcacagcccccgtgaggggcccacatcacaactttctctgccccttgcagatctcagagccgccagcaacatcatcttctccaacgggaacctggacccctgggcagggggcggggtgagtcctggcctgggccctatgaccccgttagtttgtttgttttttttttgagacagggtctttctctggcgcccaggctggaatacagtggcgagatcagggttcactgcagccttgacctctgaggctcaagcctcccagtaactgggactacaggcgctcaccaacatgcccagctaatttaaaaaaatatttttttgtagagacacagtctcaccatatcgcccaggctggtctcgaactcttgggctcaaacgat

SEQ ID NO: 135979 - DNA, 1026 bp, Homo sapiens
gcgcccgaaacacgtggggcctggagggaggagcgcgccctggcggccccgtgaccccgcccacgtgacgggcgcccgcggaaggcgacatgggctccgctccctgggccccggtcctgctgctggcgctcgggctgcgcggcctccaggcggggggtgagtggcggcgccccccggcccattccccggtcccggccccgcctctgaggttcgcgtccccccacagcccgcagggccccggaccccggcttccaggagcgcttcttccagcagcgtctggaccacttcaacttcgagcgcttcggcaacaagaccttccctcagcgcttcctggtgtcgggtgagaccccggccccggcccggccgcccccgccgtcccgccgccccccggcaccctcgcctcatccgccctccccacagacaggttctgggtccggggcgaggggcccatcttcttctacactgggaacgagggcgacgtgtgggccttcgccaacaactcggccttcgtcgcggagctggcggccgagcggggggctctactggtcttcgcggagcacgtgggtgccgggcggggtcgcgggcggggtcgcggggcacgtgggtgccgggcggggtcgcgggcgggggtcgcggggcacgcgggtgccgggcggggtcgcgggcgggggtcgcggggcacgcgggtgccgggcggggtcgcgggcgggggtcgcggggcacgcgggtgccgggcggggtcgcggggccgggctcaatggcacgttcccccagcgctactacgggaagtcgctgccgttcggtgcgcagtccacgcagcgcgggcacacggagctgctgacggtggagcaggccctggccgacttcgcagagctgctccgcgcgctacgacgcgacctcggggcccaggatgcccccgccatcgccttcggtggaaggtgggcgcctcccccggcctccgcaccccctccctcccctgccccgacccagcgcccccagcccttctccccactcccctctgactcc

SEQ ID NO: 135980 - DNA, 1019 bp, Homo sapiens
tttttgaggcaggctctcgctctgttggagtgcagtggcagaatcctgtctccctgcagcctcggacacctgggcttaggtcttctggcttagtgtccctatgtgctgggattgcaggtgcgcaggccggccttgcgctcgcagctcctgctgctcccaagtaacgttgggtttatttgtttttaaggagtctgacgggcctgtgtttagtacatagcccatcaccactgagtgtagaggcagggtcggtggtgctggcctagatggggccgggactggaatgagtggtgggaggtgcgcgcggggtgtccacactgtgggccacagcagcactcacatcggcaggacgcgggaggacacagtgcggcagattgtggctgggctgacgggggactcggacgggacaggggacctggctgttgagctgtccaagaccgacccggcgagcctggagacaggccaggacagtgaggatgactcaggcgagccagaggactgggtcccggaccctgtggatgccgatccaggttagcttgccccacatggtccctttcaccagtgtggggggcgcttcagccaggccgtccgctctggactcatcccttgtcacagagcttggctgtgtcaggtgtcgctagtgtctcagaggcttgagggtgtcaaaggtcagggcagtgctccgccacctgccagcctgggcaggccggtgatgggctgttttcctctgtggctggtcactctggccgtgggggatgccctgcctcccaccgcttgtgagctgtggggtgtccctgccccgccactgcacctggcagaggagtgaagatgtgggtgacccctgagctctgtactgatttgggcctcaaagtcccgttagggtgccagctcctgctcagagcccatctgtgcctggccctcgtctgcgagggctctgagggctatggggcccaggcctggcccctgccctggcacagatggtaagtcttcaacacatctttagtctctctcagaggaaaacc

SEQ ID NO: 135981 - DNA, 1015 bp, Homo sapiens
cagtggggacctgtagaccacctaccggcatggccagctgtctactcgggtgttgcccctgggaggctgtggtcccgggcactgcatgactgctggcttctgccctggctgtaggcgtcaacacgtgtgacatcatcaccctctatatctctgccatcaaggcgctgcgcgtgctggacccttccatggtcatcctggaggtggcctgtgagcctatccgccgctacctgaggtgagggctgcagctggcccaggagccactgggaccctgggcatcctgctgagctcctcgtggtcctggggggcagccggagggtgtgttcggccgtcaggacacaaggtctcccccggctgggctgagtgcacgggatcaggcccgaggctctttcctttcctcttgcccgtgccgggcacctgtccttgtcacacggtgtcaccgtgccctctgtgtgcagctgccagaggcccaccacagcccttcctcagcctccccatctccagcacagagagaagctcttccacttggcctcgccttggtgctgaccagtccccaaggccgaccaggcaaggggagtgggctctgctgtcctggcctttcccacggcaaggaacagacactcctggggctgttcggtggagaatgtgttgggatgaggaccttgacatggctgcctgggaattcctcaggggtcgcagaggccctggcccggggctggcaggcacagtggcccccaggagccgagcagcaggagccggtggagtctggcccctacctggactcctttggtgctttgtggctgtaactggcctggcttctgagccagttctttgttttttcttttttttttgagatggagtctcactctttcgcccaggctggagtgcagtggcacgatctctgctcactgcaagctccgcctcccgggttcacgccattctcctgcctcagcctcccgagtaactgagactacaggccgccaccaagcctggctaactttttgtatttttaatagag

SEQ ID NO: 135982 - DNA, 1601 bp, Homo sapiens
cgaggaagccagagtcaggcaccacccccgagcgcccggcgcggggcctgcgagccagcgagggctcgggccacggacacccggcctccggcacggagggctctgctcagccgcgcgatgcccgcagcgaggcgggtccaggggcaccccgctgcgagccgggaacccggccctgcggccctcccgacctccccgtcccggctgcgccgctcacacttgaccagctcgttgttgtagttctgcagcgccgcgccctgctgggtcatggtcaacgccgcccggggccccaccaccccaaccgccgcggaagcagcgctgtccgcgcctgcgcacgactcccccacggcgcgccgaactagcgcgtcatcgctgagcgccttgtgcgcgtcatggctgcgcgtgcagacgtgcgtcatcgccgcgcgccgcgccgagcgaatctcggagtcggtgggtgcagatggcggcggcagttgtggtggcggagggggacagcgactcccggcccggacaggagttgttagtggcctggaacaccgtgagcaccggcctggtgccgccggctgcgctggggctggtgaggcctgggaagagaggggcggccccgcgcggagtttccgggaccgtacgcgctttggggccgctaccctcgggttcatacggctctgtccatcatccgcctctgtcctgtcctgccattttccaccacctttccgtttcgtttcgttcagctccgctgacagcccttccatagcttcggcccaacgtccgggcagcacggacagggggcagcggagtttttgcagcctccccctcagcttcttcccttccccgcctctccccacctctatgttgtgttcccctcgcctcacggttttctgcaccccaggtgtcttcccggaccagcggtgcagtcccgccaaaggaagaggagctccgggcggcggtggaggttctgaggggccacgggctacactcggtcctggaggagtggttcgtggaggtgctgcagaacgatctgcaggccaacatctcccctgagttctggaatgccatctcccaatgcgagaactctgcggatgagccccagtgccttttgctactccttgacgcttttggcctgctggagagccgcctggatccctacctgcgtagcctagagctgctggagaaatggactcgcctgggcttgctgatgggcactggtgctcaggggctgcgagaagaagtccacactatgttgcgcggagtcttgttctttagcacccccagaaccttccaagagatgatccagcgtctgtatgggtgcttcttgagagtctatatgcagagtaagaggaagggggaagggggcacagacccggaactggaaggggagctggacagccggtatgcccgtcgccggtactaccggctcctgcagagcccgctgtgtgcagggtgcagcagtgacaagcaacagtgctggtgtcgccaggctctggagcagttccatcagctcagccaggtcttgtgagtagtctgtcccgatggccatgcccttgctccttctggttccccgctgctcccctgggtccagctggcctcagcagaaagctggt

SEQ ID NO: 135983 - DNA, 1082 bp, Homo sapiens
gcctccctggcagggcaggagtgtgggtgccacagagacaagccccttgcagagctgacctggagcccaccatccccatagcctgtgtgagcatgaagcgaggacccccgggtgggctgtgccctgggcttgtcactgatgccagtggaggctggcacctgcccctctcggcacctgagacagtgagggaaggtagctgctgccgtgaagaacaaagatgctctgagcacacacttgctggggctgagctgaggggcacacggaggcaggccctgcccgtggtctggtcagctgtccctgccgccgctacttttctggtctggggctgtagccttggtcaggttcccagcttccctcttgagaacgctgagcaaagtctgggagctctccaggatctggggccagagaagtgagaaggttgttaatgttcacctgttggtaaggtcctaagccccagctgtcctcacactcaggtgctgggacctggctgggggtgctgtagccaagggatcctgtgtgggggaaggcggaagcccaaggggactggcagacggggtggcagggccctcttccctccggaatctgacccaaaacacttcctctccaccctcaaagccaggctgggttagcactggcccgtgctgggtgctctgcccaagacctggctcttcacactgagcagaaataaccacatggctagcgagaaccggataaagaccaggacccaggatgccccaggccccacagacagccccacagtcactcccacagcagcctgggttcctcaatgggcctggccacgctgcccctgcccgaaatgccagcgaggcacagactgcccacagccgggagccccagccggtcctgacgccttgccgtggcaacacccctgccgtgcctatcccctgatgctcggcctggcctcccgagctccaccttgaggtaggcggcctccgtctccgcgatggtccggtcgaactcgttgcgagaggcaatcttgcgtgccaggttctcgttgacgcgggccagcttctctgtcagctgcctcacctcattctgcagccgctgcttctcgtcctcct

SEQ ID NO: 135984 - DNA, 1079 bp, Homo sapiens
tgaggacagctggggcttaggaccttaccaacaggtgaacattaacaaccttctcacttctctggccccagatcctggagagctcccagactttgctcagcgttctcaagagggaagctgggaacctgaccaaggctacagccccagaccagaaaagtagcggcggcagggacagctgaccagaccacgggcagggcctgcctccgtgtgcccctcagctcagccccagcaagtgtgtgctcagagcatctttgttcttcacggcagcagctaccttccctcactgtctcaggtgccgagaggggcaggtgccagcctccactggcatcagtgacaagcccagggcacagcccacccgggggtcctcgcttcatgctcacacaggctatggggatggtgggctccaggtcagctctgcaaggggcttgtctctgtggcacccacactcctgccctgccagggaggctctggttgtctgagcaccatgggggccccctcaccttgtccctcctcagccagcagaggcccagggcaagggacaggaggacaggggttctccttcaccacagaacccaaacctcaggtctcacccctgtggcctgtgattatgaataaagattatctttgtaaagatccgtgccagcctgctgcttgcccgtatcaacagcatggggctgccagacacctgcagagccagagcctgaggctcccccttgggagaggagggaggagggtctggagtggcctccctgtgactgccccactagcctcagggacaccgctgagggtgcccaccctccccaggccagccccaccctgagccctccccagcagggccgccggtcctcttcccctgactggcccacggctcaccctcctctcaggagctctgcttgctcgtcctgttctctgccacaccctggtggccagcataggacccagcccagagagacagctggggatgccaagcatatccagcagctgcctcagattcaggtccctctcagcaaggactggggggagttcacaccccccacccccgtcggttcctcagttgcaagttttgcttggcctgatga

SEQ ID NO: 135985 - DNA, 1078 bp, Homo sapiens
cgagagcctgggcccgctgcgcgagaacccgttcatgctgctggaggccgagcggcggcgcggcgggggcgcggcgggggcgcggctgctggagcggtaccgccgcgtgcctggcgtgcgcgccctccgcgccgacagcgtcctcatcatcgagacggtgcccggcttcccgcccgcgccgcccgccccgggggccgcgcagatccgcgccgccgaggtgctggtgtacggggcgccgcccggccgcgtcagccgcctactggagaggttcgacccgcccgccgcgccgcgccgccgcgggagccccgagcgcgcccgccccccgccgccgccgccgccgcccgcgccgccccggcccccgcccgcggcccccagcccgcccgccgcgcccgggccccgcggtggcggggcgagccccggggcccggcgcagcgacttcctccagaagaccggcagcaactccttcaccgtccacccccggggtctgcaccgcggcgcgggcgcccgcctgctctccaacgggcactcggcccctgagccccgggccggccctgccaaccgcctcgcgggctccccgcctgggtcgggacagtggaagccaaaggtggagtcgggggatccctccctccacccgccccccagccccgggaccccgagtgccactccagcctcaccccctgccagtgccactcctagccagcgccagtgcgtctccgcagccaccagcaccaacgactccttcgagatacggccggcccccaagccagttatggagaccatccccttgggggacctccaggcccgggcgctggccagcctccgcgcaaactctcgaaattctttcatggtcatccccaagagcaaggcctccggggctcctcctcctgaggggaggcagtccgtggagctgccaaagggagacctgggcccggcctccccgagccaggagctcggatcccagccggtgcctggaggggatggtgcgcctgccctcgggaagagccccctggaggtcgaggcacagtgggcagtcgaggagggggcctgtcccaggacagccaccgccctcgctgaccgg

SEQ ID NO: 135986 - DNA, 1047 bp, Homo sapiens
gcgcgggcgagggccacggggagaggagacgcagccccgcgggtggcacgctcggccgggccccggcccgcgctcaacgggcgcgatgctcttctcgctccgggagctggtgcagtggctaggcttcgccaccttcgagatcttcgtgcacctgctggccctgttggtgttctctgtgctgctggcactgcgtgtggatggcctggtcccgggcctctcctggtggaacgtgttcgtgcctttcttcgccgctgacgggctcagcacctacttcaccaccatcgtgtccgtgcgcctcttccaggatggagagaagcggctggcggtgctccgccttttctgggtacttacggtcctgagtctcaagttcgtcttcgagatgctgttgtgccagaagctggcggagcagactcgggagctctggttcggcctcattacgtccccgctcttcattctcctgcagctgctcatgatccgcgcctgtcgggtcaactagcctcaccgaggtgccggagagggagcgctggacaactagaatgttgacctcgagccgaggccctacttgcagcgcaccggaggagaggctctctagtctgaaggcaccgccggcttgcgccgagctgagtgccgggtttccctattccaatcctgtttgaaatggtttcttcagcagggcttaaaagagcagccttcatcctgaaaatgtatttccttttgtttaatgctttgagtagataatcctgaattgaggtcatgaggaggccccccaggccagacagtcctgaacccctctgacacttggaaactgaatataagtaaaatgtccaggtggactctgagtatttcctgtggatcctgggaaagtactgttgcacaaaggctgcaaagctggactcaggaatgtcctccaaccagcagcgctgacctaagagctccctgtgccgtctatccagaccagacttcggtagatgcctttgttagatctatcacatgtaaacgagcttgtatctccttccctgtgccacgagagagattggctttttattc

SEQ ID NO: 135987 - DNA, 1050 bp, Homo sapiens
tcggccctgatgcgccggcaatcccccggccccgacccgggactcaaccctggccgcccgtgaacgcccgcctcgatcggacgccatgcccccacagggcgcgtccctagtgcgtcacttccggtcgacggcggaaggcggaaggcggagcggtccctgcaacccggccggcgggaactgccttctagtttttagtctcagaccagaccaccgggcgcaccccgatgccgagcccgcagcttctggtgctcttcggcagccagacaggcacggctcaggatgtgtcggagagactgggtcgcgaggcccggcgccggcggcttggctgccgggtgcaggccctggactcctacccggtggtgagggctcgctagggcctcggcgtgggggacgagcaggcctggcgtgcccgcctcgcggggtcatcgacccaaaaggcgtcgcattttctctgagagcgggtctttcccttatggcggatttagggaaggaggtttgggaaggggagttcagtttagcacctggaggaggttggaacctgaaagagaagacggtctggctgctcacataaatccctctgccctgtcagcctgagtaaaggagaagggggtcaagttttgggaaggacgcccggtccttacagccggaggtcttacgtgtgtgtgtctttttgttgaggtgaatctgattaacgagcccctggtgatatttgtttgtgcaactacaggccaaggagacccccctgacaacatgaaggtaaggctggcctgatgtggctcctcagatccctgccctcgaccctcaccccgttttcattgcctggcgtctaggtgcagtaaatagctctcctttatctcatgcaccttcagaggtggatttgagagaacgtccgtgagtggggctgggggctccggttgccctctctaataaactcgtcgtagccaccaaatagccttattatccgttttaacctttcttatttttccagggctatctatatgtgcatctagtctgggtcttgtgtgtatttctagactgtatgaccctcag

SEQ ID NO: 135988 - DNA, 1035 bp, Homo sapiens
gcacagtctggtgctggggatccagctgtgaacccagcagccatatttccatcctggcagagttcacactgtagcagaagcagctaacgggcaatgacagtgccagcaaacacctgctgctggggaaagtagcatatgtcacaggagcactgataaggggcatcgagccttatctcacccaaccttggggcccaggcagaggtttctggaagaaaagagtgtaagctgagtcacggaaggatgcgtgagggctagtcaggcaccgaggaagaaggagcagtcagcgcagaggaaaaagatgatttggtttgtgtgaaaagtggaaagcagctcagggtggccaagctgaggagtacactggggcaagaggggaggagaagagaggcaggaagccaggcccagtccaaagagcctgagtaaccacagcaaggcagatgggcttgaaatgaagggttgtcggaactgtaggggtgacacagtcatgttcctaagctagcaaaaccgcactggtctgcaggacagcaggaataatgccatgagatgcacaggacaggcagcagatgctaccgatctgagctgaagtggtggcagaagatagaagtggacacattgcagtggtgtcaggaagagagagtccccgggacatggaacggacccaataggtcaagcagaatcgagacagggatgtgggctctggaaccaagatggatggtggttccatccacagaaatcagagaacacggtgggagtagggggctgtgcaggaagggaacctggagacattgaagtggagaagtgcagtaggactagcgctccaaggaagatcctggggcggagataggtgttgaggtagccacaatacagaagtgtgagaagaggaagctcctctctccccacaggacaggctgcccagaacgttagagcccaggagggcaggagagtgaccaagcagctagaagagagggtgcagcaccccaaggagaggactgggggagtgagtgttccaggaagggctctggcatgtaaagctgcaca

SEQ ID NO: 135989 - DNA, 1962 bp, Homo sapiens
acggctactgcagcttgggggcagcgccctcctgcccgtgtgcctgggcgatgaccagcatgagctggggtgagtctgcgggcgtggtacccgcctccacagtctggtctggccacacgcagggtccgctcaggccagcgcacgtgctccctcccaggcccgacgctgctgtggacccctggctgcgagacttgtgggacagggttctggggctgtacccgccgcctccgggcctcactgagatccctcccggagtcccgtgagtgtgggccccgggtcacccacaggcgcagcagacccaacctggcctggggacctcgccctgggtccctcccgtgtgggtgggcggcccctggggagtgggtcctggtctgaccagcgtgccctcccacagcctgccctccaagttcaccctgctgttcctccaagaggcacccagcacgggctctgaggggcagcgggtagctcaccccggctctcaggagcccccgtcagagtcgaagcccttcctagcacccatgatctccaaccagagagtcaccggcccctcccacttccaggacgttcggctgattgagtttgacatcttgggctctggcatcaggtggggactgctggggaccgaggagggcaaggtgaggtgggccgtgggtctggggttcggaggaggctgggccgggctgcaggggatgacttctatccggggccccgacatcctccctgcggcgtccccacagccctggtggcttcttccacacagctttgctgctggtgatgtggtgctgattcagccctccaactcggctgcccatgtccagcggttctgccaggtgctgggcctggaccctgaccagctcttcatgctgcagccgcgggagccaggtgagcccagcctcggccaccctgactctctgccctctcccgtgccctgggcccccaccccaagggctccgccgcagcccacggaggcctcccactcaccctgcagatgtctcctcccccacgaggctgccccagccctgctccatgcggcacctcgtgtcccactacctggacatcgccagcgtgcctcgccgctccttcttcgaactcctggcctgtctatccctccatgagctggagcgggagaagctgctggagttcagttctgcccaaggccaggaggagctctttgaatactgcaaccggccccgcaggaccatcctggaggtgagatgggagggcggcaggcccagcccctgagctacagccacgctgcagccaccctgagactctctttgcctaggtgctctgtgacttcccgcacacagctgccgccatccctcccgactacctgttggacctcatccccgttatccggccgagggccttctccatcgcctcctcgctgctggtgaggggcctggtggttggagcccaggaccggccctgggaaagctgggaccggggctgtggggttttgtaagcaggggctgccctctgaccaggtgacgttcccccagtcggactgcctctgcgggaggtaggtggggcccacggcccaggcacaggtgagggcagccttgttccaccacccccaccccgccgtcctccccagactcacccctcacggctgcagatcctcgtggctgtagtgcagttccagactcgcctcaaggagccccgccggggcctctgctcctcctggctggcatccctggaccctgggcaaggtgacccctgctcccagggtgggggccgtgggcccatatccccttctctcccatgctcatgcaaatgctgggctagggccccagcagactcagcacaggtctttgatcctcttcatgccacctccttcctgcaataggacctgtccgggtgcccctctgggtgcggcctgggagtctggccttcccagagacaccagacacacctgtgatcatggtggggcctggcactggggtagcccccttccgagca

SEQ ID NO: 135990 - DNA, 1050 bp, Homo sapiens
ctccgggcagggttgttgccagggctccccagctgaacctcaaggacctgtggccaagagcaccctgtatttccctaggaaacttcttgttttttggctgccgctggcgggaccaagacttctactgggaggctgagtggcaggagctggagaagcgggactgtctgaccctcatccctgccttctcccgggaacaggtgtgtatgctcaggggctgggaaaggaggggagggagctccggctcagcccccagccctgttctctgccctacaggagcagaaagtatatgtgcagcaccggctccgggagctggggtcgcttgtgtgggaactgctggaccgccagggtgcatacttctacctggcagggtgagctggcctgcgtgcagcaggagtgggcccagcccctgagtgccaggcctcattgcgccttctgcgacctgcccctctagcaacgccaagtccatgccagcggacgtctcggaagccctgatgtccatcttccaggaggagggtggactctgcagcccggacgcagccgcgtatctagccaggctccagcagacacggcgcttccagacagagacgtgggcctgaggcccgcggctgcccgtgccccctctgacagccatcctcctgggagcccaggaaggcatccacgagggagctcctggccagcagccgtcatcctctcggaccagccagctggtcctctgggaacagccagctcccgagcacagccgcactcctgttgaccctggatcccaccctttgagcctgaccccactgcagcctctgcccagccagccctgcgctcccccaccctgacagtgagctgtgtcctcgtccccccacccccttcccagtcaaggtggtggcctgggccgctccacctcaccggtgcagtgacccaggacggcatcagcagcccagtgagcaccaggggtggcatagggcacccatgaggctgcgctgcactcctctgccctggggccacctcggctgctgcagcctgcccagcagcacattccagtcactgcccccgcactcc

SEQ ID NO: 135991 - DNA, 1029 bp, Homo sapiens
ggccgccgccggagccgccggagccccccgagctgccgggccgaggcgcgggcgccgcgtccgggcctgcctttgagacaacctctgcggcggcggcgcgcggccgggacgccaggctggggcaggtgagcgcagggggcgggggccgggggcggactcagcgcccctccccacgcgacgggggtcggccctcgggaaggtgcgtctggccttggaggcggggaccggggagggggttgggttctgaggcccgcggaggtcgggatcccacggctgaggtcagggtcagaggtcgggcgcccggtcctttgtgcagggcgagggctagggtgggggtggccggggcactgccctcatgccgtctctcacctgcagctcaggcctggcccaggcctcgcctctgctcctgccgcggagcctgccgccccggtcctcctgcagccagcgcttcggctagctgccttccctgggcgccctgtcctggagccatggggcccacccagcccctgcctgccccgatgtcccggcccgcggcctgctgacctcggctgcagggggagccccccccgcgccccctcgccagcctcagcagccagagaccctgggtgagaccctgggccagacccccagcccagggcagcctcccacccctccctgcccccgcctgcctccccctcccccaccccttcctcctcctcccaggactggaccagagaagccactgtggccactggggggggccctgcacccccaactctcgccggctgtccctaggagtccacgggccgtccggggccccccccaggcctggcgggaccaggatgctgccctgtcacctgccccccagccccacacaacgcccccacccacccgaacatccagtctgactggagacagccggatgccctctgaccccgggcccgaggcgggcagtggctggccgggcctcctcatgtcctgcctgaagggtccccatgtcatcctcaagatggaggccatgaagattgtccaccctgaaaagttccctga

SEQ ID NO: 135992 - DNA, 2116 bp, Homo sapiens
tggcggcagcagcggccgggcggcgcccccgcattgcggccgccgggccccctccgcggggaattggccgagccgggcgaccgaagcccccaggaacccggcggccagggcgcgcggggcgggggaggggcggggagggccgggctgccgcgcccgtccggggcggggctgcctccctgcgcaccggccgcggtgactcagccccggcccgcccgggcccgcccgcgtcccttgtagttttgggaggtgatcagcgatgagcacggcatcgaccccacgggcacctaccacggggacagcgacctgcagctggaacgcatcaacgtgtactacaatgaggccaccggtgaggccccggccccttccccgaccgccctccggggaccccgcggcccctgccttggctgacgccctcccgtccccgcaggcggcaagtacgtgccccgcgccgtgctcgtggatctggagcccggcaccatggactccgtgcgctcggggcccttcgggcagatcttccggccggacaacttcgttttcggtgagccgtggctggggactgggcggcggctcaaaggtcaaggggctgctccaagggcaccgccgtgggaactgcgcagccggggcccctggacgccctcctcttctctgagccactcaatcccctctactaaatcggctttgggagcaaggtccagctgtctgccgaggcgaggagccgccacacacgtaatctccctgcagggagctgagctggggcagtggctgttcctctgtccttgggaattggcagtggcccccccggggaggggtttgttaagctgtcaggtttggcccctgacttaattcgtagcagggcaggctgccgtcttttggctttgaagggtccgtttgctctacctccagggtgaattctgtggtcagctcacaccatgtcactcggcttttttcgcatggcggtgaccagtagtgctgtctacctggctgacaaatgattagctgtgttctctcacaggtcagagtggtgctgggaacaactgggccaaggggcactacacagaaggcgcggagctggtggactcggtgctggatgttgtgagaaaggaggctgagagctgtgactgcctgcagggtttccagctgacccactccctgggtggggggactgggtctgggatgggtaccctcctcatcagcaagatccgggaggagtacccagacaggatcatgaacacgtttagtgtggtgccttcgcccaaagtgtcagacacagtggtggagccctacaacgccaccctctcagtccaccagctcgtagaaaacacagacgagacctactgcattgataacgaagctctctacgacatttgcttcagaaccctaaagctgaccacgcccacctatggtgacctgaaccacctggtgtctgctaccatgagtggggtcaccacctgcctgcgcttcccaggccagctcaatgctgacctgcggaagctggctgtgaacatggtcccgtttccccggctgcacttcttcatgcccggctttgccccactgaccagccggggcagccagcagtaccgggcgctgaccgtgcccgagctcacccagcagatgtttgatgccaagaacatgatggctgcctgcgacccccgccatggccgctacctgacggttgccgccgtgttcaggggccgcatgtccatgaaggaggtggatgagcaaatgcttaatgtccaaaacaaaaacagcagctattttgttgagtggatccccaacaatgtgaaaacggctgtctgtgacatcccacctcgggggctaaaaatgtccgccaccttcattggcaacagcacggccatccaggagctgttcaagcgcatctccgagcagttcacggccatgttccggcgcaaggccttcctgcactggtacacgggcgagggcatggacgagatggagttcaccgaggccgagagcaacatgaatgacctggtgtccgagtaccagcagtaccaggatgccacagccgaggaggagggcgagttcgaggaggaggctgaggaggaggtggcctagagccttcagtcactggggaaagcagggaagcagtgtgaactct

SEQ ID NO: 135993 - DNA, 1870 bp, Homo sapiens
gggtaggattgtctgccatcctccctaccccttttggaaggggggtcactggacccacctaagtcccagacacaggccgagccccaaggttgggtacctggaacaggacaggcctgccttcaacaagcaagttccccaccaagcagatacccagggcccagggcagccccacacttctctgaagcctgggtgtccagcccatgctggtcctgggcacataagcccagctcagctgcagcctggctccccgcagccatgcaggacaactacgccctgacattcggcaacagcacccggagggcctactggaaggaatgggcaaagcgaaaccacacactatgaaaatgctttaatggtggtgtctgtacagcatggatgtggacagggaaaacagcaagtgcacacagtgggacaggccacaggacaggctgggagtgaataaagagttcacactgcttccctgctttccccagtgactgaaggctctaggccacctcctcctcagcctcctcctcgaactcgccctcctcctcggctgtggcatcctggtactgctggtactcggacaccaggtcattcatgttgctctcggcctcggtgaactccatctcgtccatgccctcgcccgtgtaccagtgcaggaaggccttgcgccggaacatggccgtgaactgctcggagatgcgcttgaacagctcctggatggccgtgctgttgccaatgaaggtggcggacatttttagcccccgaggtgggatgtcacagacagccgttttcacattgttggggatccactcaacaaaatagctgctgtttttgttttggacattaagcatttgctcatccacctccttcatggacatgcggcccctgaacacggcggcaaccgtcaggtagcggccatggcgggggtcgcaggcagccatcatgttcttggcatcaaacatctgctgggtgagctcgggcacggtcagcgcccggtactgctggctgccccggctggtcagtggggcaaagccgggcatgaagaagtgcagccggggaaacgggaccatgttcacagccagcttccgcaggtcagcattgagctggcctgggaagcgcaggcaggtggtgaccccactcatggtagcagacaccaggtggttcaggtcaccataggtgggcgtggtcagctttagggttctgaagcaaatgtcgtagagagcttcgttatcaatgcagtaggtctcgtctgtgttttctacgagctggtggactgagagggtggcgttgtagggctccaccactgtgtctgacactttgggcgaaggcaccacactaaacgtgttcatgatcctgtctgggtactcctcccggatcttgctgatgaggagggtacccatcccagacccagtccccccacccagggagtgggtcagctggaaaccctgcaggcagtcacagctctcagcctcctttctcacaacatccagcaccgagtccaccagctccgcgccttctgtgtagtgccccttggcccagttgttcccagcaccactctgacctgtgagagaacacagctaatcatttgtcagccaggtagacagcactactggtcaccgccatgcgaaaaaagccgagtgacatggtgtgagctgaccacagaattcaccctggaggtagagcaaacggacccttcaaagccaaaagacggcagcctgccctgctacgaattaagtcaggggccaaacctgacagcttaacaaacccctccccgggggggccactgccaattcccaaggacagaggaacagccactgccccagctcagctccctgcagggagattacgtgtgtggcggctcctcgcctcggcagacagctggacc

SEQ ID NO: 135994 - DNA, 1043 bp, Homo sapiens
ccctccgggtgctgttgccgaatgtcagggcgtagttgtcctgcatggctgcggggagccaggctgcagctgagctgggcttatgtgcccaggaccagcatgggctggacacccaggcttcagagaagtgtggggctgccctgggccctgggtatctgcttggtggggaacttgcttgttgaaggcaggcctgtcctgttccaggtacccaaccttggggctcggcctgtgtctgggacttaggtgggtccagtgaccccccttccaaaaggggtagggaggatggcagacaatcctaccccaaccaaggtgggaccctggtaatggtcagacaggtggtcctgaaccagcaatgaagggtgagcaggtagagccgtccctccccacattggccggggtgtgtccatgtgaccctgcccactctactcaccggggatgaaccccatgtagaaggggatcaggccttggctgctgtagatgtggttgctgggccagtgtgttccaggcagcttctcgcccaggtcacagtgggggtttctaaacaggaactggggagacaggaaggtgctaacaagctccctccccggcaggcaaacagatagtcaagttgtcccagtgggggcctggccggagggccggcactccgtgggaaagctgctaatgctcccagccttctgcatccccctacccccgactccaaaacttgagtgcagggatccaagcaagactcaggagagaggggttggggcggcacctccggggacaggagagagccaggcagagccccctcctcaggcttctcagggaacctggccttcaaggcaccctccagggaagctgccaggcaggagaggaagtgtgtgtgtgagctgggagcaggccctggatggcgctttcctacctggctcttgtcgaattcgtccatggcttgcatgacgccgtctcggtaattcaaccccattacccaggtgaaacggggaatgaagccagcatagcctgggggtaggcagatgtacgggctaccccaagcccccttagccttc

SEQ ID NO: 135995 - DNA, 1049 bp, Homo sapiens
ggaagttccggtggccgcctagctccgggagcttcctgtgctgcctgcccaagtgctgtccatggtgagctctgtgctgacttctcccacatgagccgcgtggagaccgaaccttagcactggagttagggtgtggggcccctcctgggaaagagctgttggtatttagcatgtctgtctgacatgctggggccggggaaccagtcataggtgccctgtggggtggagcttagctcgaggtggtctctgcggggctgaggcctcttggcttgtcttgaaggagacccagggacacaggtgccactcacaggcagcctgtggtgtcatgtaggttccggagaaaaaactgaagctggttatggctgacaaggagctgtatcgagcctgcgccgtggaggtgaagcggcagatctggcaagacaaccaggccctcttcggggacgaggtttccccactcctgaagcagtacatcctggagaaggagagcgctctcttcagtacagagctctctgtcctgcacaactttttcagtccttcccccaagaccaggcgccagggcgaggtgaggggacaggccgtgtgcggggtggggcacctcttggggatgccacggctagcgccttcagctgcctggggatcagcactctgctgccctgtgaatgatcgggtggttctgcttcttggctgggtggtgggggagggctggcttgtacacatgctggaaagaaagttggttgtttttctgtttgcattttacttttcgttaaagtgatatatggacaacatttaaaatctgcggaaagcccgctcatgtgaagttaatcccccctcccctactttttttctttttctttgagacggagtctcgctctgttgcccaggctggagtgcagtggtgtgatctcggctcactgcaagctcccgggttcactccattctcctgcctcagtctcccgagtagctgggactacaggcgcccgccaccatgcctggctaattttttttctttttctttttttttttttttgagacggagtttcgctattgtt

SEQ ID NO: 135996 - DNA, 1069 bp, Homo sapiens
tcacgtcagggtggggtggggcagggcccgggcccgcgcccgctcatggcctcccctcctcgtaggaggtagagctcatcaccaggttcctcccgatgctcatgtccttcctggtggatgactacactttcaatgtggatcagaaacttccggctgaggagaaagccccagtctcatatccaaacacacttcccgaaagcttcactaagtacgggctgtagggccatggtgcaggggtggccgtggcgcagggatggcactgttgcccagggggctgcctcagggctgggcaggggtcggtgtggggctgaggtggggctgaggtggggctgaggtggggctgatggcgccccgggcgcaggtttctgcaggagcagcgcatggcctgcgaggtggggctgtactacgtcctgcacatcaccaagcagaggaacaagaacgcgctcctccgcctgctgcccgggctgggtaagtcctgacgggcggtgcctggctgtgtcttccctgcggcagctgccgtatgcagtcctgcccagggtgcgggccccagggcccccaggagctgccttgtctccccagcccacctccaactttgctagctttgttttcaccttttttttttttttttttttgagatggagtcttgctctgtcgcccaggctggagtgcagtggtgcaacctcagctcactgcagcctctgcctcctaggttcaagtgatttctcgtgcctcaccctcctgagtagctgggattacaggcgcgtgccaccgtgccaggctaatttttgtatttttagtagagacggggtttctccatgttggttgggctggtctcgaactcctgacttcatgatccgcccgcctcggcctcccaaagtgttgggatgacaggtgtgagccaccactcccagcctcgttttcacttttacttttgtttgtagtttattttactaggaaagggagagggagttcaactttgtgctttcccacaaaaaggtgatgtaagagctgtctttatttcatcctaactggcgaggggcttgggacccctcaggtgctcagagaatgg

SEQ ID NO: 135997 - DNA, 1068 bp, Homo sapiens
ccctggctgccagcttctgctgacccctggacccagaagcatctgcttcccaacagggagggagaggcttcaggaacccctacttcacccagccaccgctcctttttgtctctcttagacgacatccctattcgtacctggttccccaaggaaaatcttttcagcttccagacagcaaccacaactatgcaagcgtgagtcttgtgcccacgacttggggtcagggttgggtggtctctttctgctgctcaggaaacagcactttttcccagtctctgggcctaccaggggggctgcttctgaacagacccacgtgcctatgctgtgccaggcctgccagggaggccagggctgactgctcttcccctcccatggctggtgcccagcccccccccccacacacacacagtcaggggacctggcccagggctgcagctgatgagctctcagtggggtgtggggtgtggcaggttctcctgctcctatccactctcctcagcctgtgtctgccctccctcaaaccccaaatagaagcctacttctgtttcatacgtgccataggtcatcacagtttcagggtccccgcagggacctgctcctctctgtcttgacatacatttggcttttctgttctgggattccttccagggaagttccctttgctgcattggtccccacaccaaagaagtgtcctgcccgggggagtccaccccacacccagcctcaggctgcctggtctcagcaaccagtccttgtggcatgggctgcagtgacatcagcttccgttgcccattcagggctggccagcagtgtagccagcatcctgctggtggctgggttacctgtgagggacctattgggtcagtgacaagaagggaactgtagggaccgggtgggggctgaggggaggcccggggttgagctcactgtgtcttctctctcacgccatcccttctggccctggcttcagcatctcgtaagtacctgtatgacttggtgcctaagggcacagctgttgtccctggggagaccctcccaccccaaataggtttgggcaggccagggacc

SEQ ID NO: 135998 - DNA, 1043 bp, Homo sapiens
cctccatgctccatccagggccctgcgcttgggccttcagccagtggcctcctcacagcagaactggacattctcctgggagacgtcttcatggctgccgcaggccgagagggccctgggcaaggcagcccctatccacagttgccaggtctggggtgctggagccctcagggtgcttggctgacaaggggaggagtgtctgcccgctccttgtccttgtggaagacccacgaagtgatgtgctggggcaaagctggagccagacagaaccaggggtggtgtgcagggctgccctgggaccaggtggctgcgtgtagggccccgggccaccttggaggcgggggtgggcatctgtggccggttctgcctctgagtgtggctatgctgggtacggtcccttccttgggaggggactgacgcagccctaccctcggtgccagacgaatctgactaccagacggagtacgaggaggagctgctggacgtccccagggatgcatacgcagacttccagagcacctcagcccagcagggctcagacttggtgaggagctgggcatggtcccacctggtgcccacagctgagccttggtgcctggccctgtgccggccactccctccctgtggtcccaccgggttaccagcgctgcagagcccctgccctgcctggtcctcacctggaacatgcggtctgcttgcaggaggacgagtcctcactgcggcatcgacaccccagtctggctttcccaaaactgtctgagggctcctctgaccaggacgggtagaggcctctgctaaagagcccggatgcagcgtcttccgtgggactgtccccaaggctgaggctcctgccaagtcctaggggcctctgtacctgccctgctggaagccctgacttccccggggccccaggctgtgttagggttctctgggcctcttctttgtaccagcagccctgcatacagggccctgtgagcccccctgcagtcctgtgaggcccctgaagctctgtgaggcccctgaagctctgtgaaccccctgca

SEQ ID NO: 135999 - DNA, 1035 bp, Homo sapiens
ggcaaaagtggtgatcgccattgacgtgggcagccgagatgagacggacctcaccaactatggggatgcgctgtctgggtggtggctgctgtggaaacgctggaaccccttggccacgaaagtcaaggtggggtgctaccgggcaggctgggctgtccctgctgctcctccctgcagctccacacctgtcctgcggcaggggagtgggggtcgctcctgggctctgaggccagcaggtctggggccacccctcaccacccctgcctgagcccaactcgggcgaaggaaggcacgaggccggacgggcctgaaggctgtggcagcccgcagggaggacccccggccgggtgctgctaccctctccccccagaacctacctaccccagaggatgggtccccagaacctgtcctgcgccacgggccaggctgggacggggtaggggccggggcaggagactcaggcggctgtgacggcagcaggtgttgaacatggcagagattcagacgcgcctggcctacgtgtgttgcgtgcggcagctggaggtggtgaagagcagtgactactgcgagtacctgcgcccccccatcgacagctacagcaccctggacttcggcaagttcaacgagatctgcgtgagtgccggccacccgcggcggcggaggcgggcggaggcactctggtggctgcccctcctcgcttcccccttttgagaacacaggaagtggggggctccccacacctcctgacggggccctgggggtgtgcacaggaagtgggctaccagcacgggcgcacggtgtttgacatctggggccgcagcggcgtgctggagaagatgctccgcgaccagcaggggccgagcaagaagcccgcgagtgcggtgagtacgggcgtccggaccacgcccagctccccggaccgcgcccagttcttcgggccacgcccacgcccagttcatcaggccacgcccagctcctcaggccacaggccctgcccccctggccaaagactccagggccaggacaaggattgct

SEQ ID NO: 136000 - DNA, 1045 bp, Homo sapiens
tcactgcaacctctgtctcctgggttcaggtgattctcctgcctcagcctcccgagtagctgggattacaggcgcgcaccaccacgcctggctaattttagtatttttagtagagatggaattttgccctgttggccaggctggtctcgaactcctggcctcaagtgatctgcccgccttggcctcccaaagtgctgagatgacaggcgtgagcccggaaagaggggttttaaactgcatctggagtccctctctgcgtcagcgtctctgcctgtggaggagttgggaactgaggatgagcacaaggcctctgcagggcgcagcctgggcctggtactcactccttgctctgtgtccctggctggtgtagaggctgtgcccaggtgggcgttctcaaggccttggcggagtgcggcatccctgtggacatggtgggaggcacgtccatcggggccttcgtgggtgccctgtactctgaggagcggaactacagccagatgcggatccgggccaagcagtgggccgaggtaagcaggcacccatcaccctcaccggagcacagcccccaggtccttgctggtgctgggggacgctggggccgttggcctctgcatgtggctctgcagggccctgccctcgaggaggctaccccctgaagcctcccagtgcagcttgtgaggcaaaggagcaccacagagaaggcacagatgcaggttggtggtgggaggcggtctgatctgtgcccaggtctgagttggtggagacggtggtgggaggtggtctgatctgtgcccgggtctgaggtgatggagacggtggtgggaggcggtctgatctgtgcacgggtctgagatggtggagacggtggtgggaggcggtctgatccgtgcccgggtctgagatggtggagacggtggtgggaggtggtctgatccgtgcccgggtctgagttggtggagacggtggtgggaggtggtctgatccgtgcccgggtctgaggtgatggagacggtggtgggaggtggtctgatccgtgcccgggtct

SEQ ID NO: 136001 - DNA, 1421 bp, Homo sapiens
cttcagggactttaaacccagatacctcctcccctgccttgtcgtcagacaccaccttctcctgaacttgaataaatacccttggaacagagatggagcctgggagccacgaggagggtgggacaggcatgtgcccctctgctgagccaggtgcgtaaggggcagggcggagcctcctaccgctgcccccaaaggaagggaggacatcgaggggtgcctgggcgggggtccaggccagggctgccttctggggtggggcctctccggcagcccctcccatctcccacggagtgccagcactgctaccccgggaaaagctcggaggtggccccagggcctcgaggatgcttctgctggccccagggcagggccctgtcagcctggggctgttctaggtgatgaggtgcccactgcatccttctgtctaagggactttccaccttgtcttgtgccacattttctcttgaaagctgcggaagttggcctacagcagttcaatggcttgcctgaggttgccaggctggggacaggacccaagtctctttctgtgggtctgggacagtgcagggacttggagcagttgagcccaggccacatcagcagcatttttaatgagaaagtagctttgatcaaggtaatacttagaagccatacggttctgtaaggcacgtaactgcagtcctttgccttccttccagcaccacctccagagttatcccagaaataaccatgtccagtgttttgagctgtctgcttgtctgtatttctaaatcatattcctattctactaagtttttggttttttttttagttttagattgttgacttcttaacccccttcaacacccgcaatcagagtctgctaactattgattaatcactcatctatgcatctgtctccctcctttccactcaatcccagtgtggtcccatcactagttagccagcactcactgtctgtgttgttatgacactgtgggtgtcactcagaactaagtcacatcctatcctatcctatgattgaagttccttccttggagttaataattgtcacatttgttcagttttctgggtatccttaatttacccgaagacactgaggcaggcattaacctcctctcggtatgttcggacataccactcatctctgtttacttttcaggagtcatcctcccgaaagccctctagcctcttcgtatctctactggttgttttctaacatgctgctgagatgttggcctggaattttctttcaccaccaccctggaaactgcctttgtttctctcctgtgttcaattccatttcctgtaatttcatgtcttctttattggtttattcctcattttggtggatatatgttctagaaatctccctaggagaagacgcatggggaagtaaacattttaagaccatgcatatc

SEQ ID NO: 136002 - DNA, 1039 bp, Homo sapiens
cgtggggtccctacgtccgcgtccagcagaggctgcccctccccatgcccgtcccatggggtccctgttgccagcactccctgtgtgttgcccttgacagctcctcctatctgaaccgggtggggcggagctgaccctgaactgtgacgcgtttggagggtacagcgcattgtcaagggcacaaggctgtcaaccccggctctccctcctcctggcggtgtgaccctgggaggcacttggccgggacgtgggacggtccccacctagccgagctctcgtgggaactgagtgagaccagggtttcgtgccctgctccatccccactgcccaaaacagtagcctgatatgcggagggctctctttagtcatggggcaagtggagctcggttagtaaaggcccagcacgcattagtctttagtatgtgcatttcagttggaaatcataattctgatgacattttagggcttgtcgtcttcagttgttgacattaagggaatatctttttgttttctacattatcttttgttttaatgaagagtattaaggttctgacaatttggggcagtatgttgacttgatcaagtgtttgagacagggcctagggtaaaagcaggctgagcttggttgccttaaacagaccagtccttttcttgaataactggatttctgggttgatgatcggcctctttccattgcctgaaatgtagcttaaactttgccttgagaggcccacacctgtcacacctttgagaggcccacacctgtcacacctttgagagtcccacacctgtcacacctttgaggggcccacacctgtcacacctttgaggagcccacacctgtcacacctttgaggagcccacacctgtcagtgggtgtggggtgttcctggggtggcactgaacttccttcttgtgtcccaggagagccaggccatccctctcgtgtctgtagccagtgtggctgccgggaaggccaagaagcaggtgttctatggcgaagaagagcggcttaaaaagccaccgcggctccaggagt

SEQ ID NO: 136003 - DNA, 1094 bp, Homo sapiens
taggagagttttctagagctcaccagaaccctggctcggatgcattcaggcagaaccaagcgctaggtccttgcatgaaacctcgcactggagcctgggtggtgtcctctgatcccatcctatgttcctctgctcggaaaggacgtaacaagctccagccagacatcggggtgtccagggtgctcactctgctccccggcagatgggcacaggtgcgctttgagctgtttggggcctggggtggaggcgtgggtgggacctcggcatctcgttgtgctccctgggacttgtgtatcttcacgtgacgcgtggcctgtgctggggaggctgccggcctggggagggagaagacacccacctcctttgagcaaggctgacctgccgttagaaggccggtgctcatcttcgagggagcccccagcgtggcttggggcagagtggggtcccagccaccagatccacctctgtgcacctctttggagcctctggttagtgtgtctctggagctgaggtgggcttctcagggactcctggatgtgtaaggggcacctgtgggcctgagaaaaactgggaaaggaccacaggagctttggtctacgtggacgtaaacccgttcagcacggggcatctgtatgcgacctaccttggatgattcgtttctctttaagcaaaaaatagcttcactggggtagaggctttctccattatttctttgttctttctgatcttgatcttgttgtgatattcaggttgggcctcacttatcacagtgcagccatgcctgttccaggagaggggagctgtgcgctgagacgggccgggttcctctcagctgctgcgatccgtctcatccgcgttggtgtcacagcccctctcccttaggggtgggaatggatcttccctgagtgtagtgggagtaaaaaatgggaggtgattggctgagcacggtggctcacgcctgtaatcccagcactttgggaggccgaggtgggcggatcacgaggtcaggagatcgagaccatcctggccaacatggtgaaacccatccctactaaaaatacaaaaattagctgggtgtggtggcgggtgcctgt

SEQ ID NO: 136004 - DNA, 1911 bp, Homo sapiens
gcccttccctggattttctggcacggatgggagtcctgctctctgcagtgaggcgggggtgggtgttgttttaggccttggctcttgtgtagaaactttcaggctgaaccagtggcttcccctgccctatccggttcctggctgcctgggaggaaggtgtgatgccagcaggaatggagagggctgcctgtctggctggtgtcgtcttctcgtcttctcgttttctctttcacttcttggaaccaccagcgtcctctgctgtcgttcactcaccatcctgccctcaccctctcttccctccctcccgcggacctggacttctgaagtcctgctgctccaggagactgcaggacacagagccttctcggccgctgcctccttgtttggcatgtgaactggtgttgaatgttctcagaatccagatggctcataggggttttgagcactgctcctgctggggctgaggcgacactgagaggggggccttggcctcccctttggccaggcctgctccctgagacctgcatcccaaggattgcatcaccagcatgtgggtgtgttagtgatgcctggggcagccgctggccctgccccactgtatcccagtgactgagggagccaggttgctctctgagtgcttcctagcagggggctcagaggaccccggcaccccgggcgagatcacttcttcccagaagtctccagggctgctgacttctcccctaactcccagctctcctcctgctgctctgaacaagttcgggctgggaagcctgtccatgcccacctgaccccatgctctctgctgcaggctgacttctgcctgggcaccgccctgcactcttggggactgtggttcacggaggaaggttcaccgtccaccatggtaatcacctcacgcttccctggagccagacctggatgggccgtggcctttttcacctctccctgtccccatcccctggctcattcctgcccagcctgtggttgggcagccaggggtgggggcaggcttagggctagggttaggtttgtggctttgctgatgggcgccgtgtttccactctcggccagctgacggggattgcagttggagccctcctggccctggccttggttggtgtcctcatccttttcatgttcagaaggcttagacaatttcgtgagtatcttggttccgactctggcccggggggttgggggaaagcgtgggtgtcttgggatgtgttttgagcccctgggaggggccctcaagcgcatggtggctttggctagaatctgatggcccgtctgggctcaggctgagcccgtcggttccaggaagccaagtctgttcagagccctttctgttctcctctcctgagcaaggcttcagtgggaagaggggagagccccctttgttggagatgagcctgtcactcaggccctcttccctcatgctgtctgagtatggccagttactggcagggacgagagtatgactgactgtgctgcacctgcatgtccaggaccaggcctgtgccacggctctacctcaggccatccctttactcccctgcaggacaagcacagcccactcctcagtaccggttccggaagagagacaaagtgatgttttacggccggaagatcatgaggaaggtagctgttgctcggggccccaggctgcacacggcttcctcgagcaggcccctgtgggagggaccccttctgctgtgggctcccccaggctgggcagtgcttggtgtgtgctgtcctctccccagcttcccagctctgccaccaggctcagggtttgggggaaattataaattgtgccgaatggtgtctgcttcctccagctgaatccagtgtgttttacccaagaataacccctcaccctctcaggcctctactccccctggcctggag

SEQ ID NO: 136005 - DNA, 1050 bp, Homo sapiens
aggccgggcagtggtgtggggggactcgagccctcgcggtgcccaaattaatcaataatcttggacccagcacgtccggcttgcgcactgagccctcctgcccggtcaccctcgcaggcgacctctcaccccacgcggaagtcgccccccagccgcaccctcacaatccggatccaccccctccccagctgcaccccgtccccagcggcacccccacagcccagatccatcccctctccagctgcacgcccttccccagcggtacccccacaccccagatccatcccctccccagctgcaccccctccccagcggcacccccacgccccagatccaccccctccccagctgcaccccctccccagcggcacccccacgccccagatccaccccctccccagctgcaccccctccccagcggcacccccacaccccagatccaccccctccccagctgcaccccctccctagcggtacccccactcgccggatccacgcgctccccagctgcaccctctccccagcagtacccccacaccccagatccaccccctccccagctgcacccactccccagcggtacccctacacgccggatccaccccctccccagctgcacccactccccagcggcacccccacaccccagatccaccccctccccagctgcacccactccccagcggtacccctacacgccggatccaccccctccccagctgcaccctcctccccagctgcatccccacaccccggatccacgccccgccagcgtcacctcccctccagccgtgcttctccagaaggcagcgctgcccccatccccgccgcgctgggcctggctcctcttgacctgcttggatacgccccatctggctgctgttctgggttccgggacagccacgtgagggctgtttacagagggaaggaggtggctcctagcagatgacagacacttctcaaaagacagcttttcttcctggagaacagactttttcagcaggattttcctttcagtgaaacataatttgacttgaaaggaacccaggg

SEQ ID NO: 136006 - DNA, 1027 bp, Homo sapiens
agactctgaaacagggcgtgccggaccctgcatgcttgggacgctccagcccactgtcactcactgacagtgccatggctgcctgtttgtggttccccgtgcgagccttggactttctcacctctgctgtacacatgctgcctgttcctcagacatccccttccttcccagctggctaaaactcctttgttctttggttttaagtgttaactgaggtctttccccctctctggcttttgccgtattcttcaccatcaagtgaggttctgtagccccgcttgatgcttctcttggaggcacacaggcgtgtgcactgcaagatgacggtctgtttcttctccaacatatgcccaggtcttgctggttcctttgcatgacacaacggctcctcaggaaacacttgctgacctgtgaggggctgttcttggagtctccctgtcaggtgtgacaggttggggagaggctctgggtgatgttgtgtttcctgggttctcccatctctcactccagaggagaggcaggaggcgacggtcctgacatctcacacattgcccgactcgctggtgtatggagccgactggtcctggctgctcttccgttctctgcagcgggccccctcgtggtcctttcctagcaacctaggaaccaagacggcagacctgaagggtgcaagcgagttgccaacaccctgtcatgaatgcagagaggataacgatggggagggccatgccagaccccagagtggaatgaagccactcacagagggcatgaggaagaatggcacctggctgcaggctacagcagccaccacacgtgactgtggcgtgaacccagaagaagcagactcagccttcagcctcctggccacctgctccttctatgaccatgcgctccacctctgggagtgggaggggaactgagcttgaaatcatgaagccccttcccacaaggaaaccaggagggagactgcgagtgagtgcccgggaccacctcatcagagatgcttactgcagccctgcaggtgcct

SEQ ID NO: 136007 - DNA, 1059 bp, Homo sapiens
ctcatcgggagcacatcctggccacgggaaggtgagtccccaggaggctctcgggcccttctcgtctctttcgctgtccccggggggctcctgggcccttcttccctctttcgctgcctttcctcctggcaccattgcagcatttcgtctgccagtgcttcgccggagtgtaggtatatgggtttggtaaaggggactttgtcctcgagggatgcatgggacaggtctctgggagacgttctgtgccccccaggggccttgtggaacaggtgagcctgggctttccttatatgcctcctgtggttggtcggtttcagctatgatgaacacatcctactgtgggacacacgaaacatgaagcagccgttggcagatacgcctgtgcagggtggggtatggagaatcaagtggcaccctttccaccaccacctgctcctggccgcctgcatgcacagtggctttaagatcctcaactgccaaaaggcaatgggtgagtggggacccgtggctgctgggcctcagggcagggcaccagttccctgccccctcgctctgctgggctcttccctcagctccctgctcccttgctctgctgggctcttccctcagcttttacacactcccagcgtcgcgccctagacttggtcgtgatccataactgtcccagctccagaatctctgctctctaaccacagttttccctggtttcccagctccgtcattccggtgcctcctgcatttcggcagacctctgaccccactgggacctctagtctggaggcttggccacccatcactcccataaccatccttgtctgtgctctcccatgctcttcctgcctgtggtcagctgggactctgtggtctgctgccccctgtgagctcacactccattcccttcatccctttctcacactctgggcagaacccagtgttgttttgttgggaacaagcacctctgattctggttgagccggagaacgtggctggaatcagctgtccacgttgtgttctagtaggtccctgggattcctggtgatctgtaacatttctctaggc

SEQ ID NO: 136008 - DNA, 1056 bp, Homo sapiens
cagtgagcatcctgtgtgaagatggcatttctcactgattattggaaaagcacgtgagtcctgtgtgaatttttccgagtttctcacagtgctctggagccatgcattaacaaagtgacttcatctgatagctgtcggggaggagaacggggatgtcccgtagtggggtgatgtaaacagcctgaaaccacgccctcactccgatgcagatgctgcaggcggggctgggccaaccgagggcctgtgtaggaaaaggccttgcttaaggcagcttagagcagttgccctgtcttagaaaggagggaaagagcagccacaggaaagctgtgggcccaagggaggagtgcatgaacccaggaaagggctttggtacagcagcctgctgggagcagggatggagttaagcactggccaggctgtttaggaaatgaaatttatatagatctgcataaagagcaaccacgttctcatggctgctcgcggcttctgaagtggaaaccagaggagtttccccattgtctctgtctcgggaggcgagtgttccagtggccctggaggcctggggtgggaaactgtgtgtgccactgtggtctggagcctgcacaggcatctcgacagcatctaggagcgcaaggatggcaagggggtgtgaaagggagggagaccatgccccaagatcaagcctgtgggaaagttgtcctgcaagtgtgaggagtgtgagctccagtgtccccaggtcttctcggggcccctagcaggggtttcagtgttaggtggaggtgtgactcagtgactgatgtacttcattcgcataggttgtaaatgagggaacgatgacttccctgcaggagaggaaaagtcttttgggggttctggggcggctacttccctttgatggagtttcttcttctccagtagaagagccacgtgctggagccattgtccagccttgccctggaggagcagtgtctggctttgtccctagattggtccactgggaaaactggaaggtaagggccaggcttggtcaggggtcctgagtctttctctgagaac

SEQ ID NO: 136009 - DNA, 1622 bp, Homo sapiens
cccgcagggagcagcgcgtctgacgcctgaagcccgccgcggtcagccggccgacagggggcgtgggagcctggcttcccaggggcgtccacggaggccaaggccctgccggatgtcccgccccggcaccccggaaggagtcgcgagagaggcggcccgcgctgacggtgtccctggggctctgcgctcgtccggccggccccggcctcgccgccccgcgcagtacccagcccggccccgccgacccgcctctactgccggctccgcgcccttccccgagggctggatgatgggctgtttcgccctgcaaacggtggacaccgagctgaccgcggactcggtggagtggtgcccgctgcaaggctgcaggcacctgctggcgtgcgggacctaccagctgcggcggccggaggaccggcctgccggcccccagaacaaggtgcgcgcgccgcggcttcgggaggggagggcggggccggccacgaggttgaggccgaaaggcgcaccgaatcgcccaggagatgaagaggggatattggccctttggccaggaggtaggctggaaacagtttagaatctttttaaaaaaattgttctcggccgggcgcagtggctcacgcctgtaatcccagcactttgggaggccgaggcggacggatcacgaggtcaggagatcgagaccatcctggctaacatggtgaaaccccgtctctactaaaaaaatacaaaacaattagccgggcgtggtggcggcgcctgtagtcccagccactcgggaggctgaggcaggagaatggcgtgaacccgggaggcagagcttgcagtgagccgagatcgcaccactgcattccagcctgggcgatacagcaagactacatctcaaaaaaaagaaattacttttttctgagacaaggtcttgcactgtcacccaggctggagtgcagcctcggactccagggctcagggcatcctcccgcctcaaccccctgagtagctggcaccacaggcacgagccaccgcccccggccaactttaaaatcttgagagcagaacgtcttctatatacaggtgtggcccaagggaatgggtggaatgtacagtaaagagaaagtgggaattatatcttaacttctggtgggtacatattaggatccaaattgggcactggaacaacaggcgtaagtcaggactgtcccaggcaaactgggttctgtggttaccctagccatagctggtccctgttggccggtttagaaggagccttctctactgggtccaggagtgttcacctactcattaatagacgtttctccagctcagaaaaccagaggttctccttccaggcagaattccactcctttagtcatggcaaacctttgagttccttggatcccttttcccatcctttgggttccttcgtgtcttgggataatcagagactacctctgcattttttgtagggtggaatggaagttaaggagcctcaggtccgtttaggccgtctcttcctgtacagtttcaatgacaacaactctattcaccctctggtcgaggtccaaagaaaagatacttctgcaatcctggacatgaaatggtataactgtgataatcccactgggtgt

SEQ ID NO: 136010 - DNA, 2416 bp, Homo sapiens
tcaagcaggaggagtttttagacggacgtagggcagctcccggtatggaaggggaagtggaccgacggggcagtaatgggcacctctgcaggtcaagggcaaggagaggggccgcctcgctttgcacaggggcctgacctgggccctgtctcctgcctactgtgtgcctgtcagtcccaggtgctggggagagggtgatagatgaggccatgcttacgggttagtgggaagatgagacacaatatttactgtcaggtggtgaaaagcacatgcagcagggatgggccaaaggagactcaaactcgggctgggtgtcctgggcaggatggcactctatggagtcattgcatcgtctgctgtgtgctggccccgtttggccagagtgcactcaagtgtctgcttctttctttaagggagcaaagcttgtattggcttgcaattcagcagctgcctacagaccctatagaagaacagtttcctgtcctaaatgtgacccggtattataatgccaacggggatgtagtggaagaggaggagaactcttgcacctactatgagtgccactaccctccctgcacagtgattgagaagcaggtgggtgtgctgcagtgcggtcgcgtccctggcacctctaccctgtagcccagccttggtttgggatcttgccctccaccgcggggtcccattccccagagaccgcttagcacctcttgggcttttccaccagagtggtctccctttgcccttgtgctggcctgaccagggcccaggccctccagccttggtacgtggtgttttgctgggtccgtcagattgtccgtaagacgcagcctttgccccacactgcgtcccaggcatgatggtgaagccacaggtgttctgtatttcagctccgggagttcaacatctgtgggcgctgccaggtggcccggtactgcggctcccagtgccagcagaaggactggcctgcccacaagaagcactgtcgggagaggaagcgtcccttccagcatgagcttgagccagagcgatgacgggcaggggagccacacatactcacagcccccgggctctaccctgggcacagcagagacagactggtggttgaacctggaggtgccaaaaaagccagctgcgggcccaggacagctgccgtgagactcccgatgtcacaggcagtctgtgtggttacagcgcccctcagtgttcatctccagcagagacaacggaggaggctcccaccaggacggttctcattatttatatgttaatatgtttgtaaactcatgtacagttttttttgggggggaggcaatgggaagggtagaaattacaaatagaatcatttgctgtaatccttaaatggcaaacggtcaggccacgtgactaaaaactgtcctgttgtcgaagcttctcccctgggccgccgggagccccgtggagcgcggcctgcacgggagttgtgtccacaaaggcaaagtaaaggggtggaatcatctggcctctcggacattctctgctccgcctccctcttgtgctgcttagggtgaggtcattttgagtggagccgagtccttgtgggtgaggcaggaggacccttgttcctggtgggcccttctgaggagcgggtgagctcagaccttcctgagtccagcagggagtatgagtgagactctgtccttgtcttgcggcaggagtggtggggttgctaagtcagctgcccgctgttttatggggagtaggatgctctcgcccctgacattggttagttcttgcctgatttatgcatgaagtggctgggagctcagcagtgagcttctgcccagaagaatccacagggcatgttcagcaggcctgctgcagatggtggagggggctggccagccagggtgaggtgagggtctcacttctccgtccgtctgcagggctgtggtttccaggatagccctccctctccttggggagccccaggtgtctggggctggtcagcatcttgtacccatagagctgccccagggaaacatgccaggctgtgtggctgggatcctgcctgtctccaggtgcgcccagccagaggccttgcttcttgggagctggaagcctggccagtccgactctgacctgtctggtctggtccggtccgaccctgtgttggtcccacaggttgctgctacactttcccttcttgaagctccactgccatgttccaggacaccctgtgtgttctcattgctgcccctggctgggctggcttttgtctgtaagcaaaacttccagtaccttttctggcagtaccctgggggctcctgaagaacaggactgctgaaaatgggtgatatcaacaaactccgcaggatttcctggagcttagagaactgcatgtgcccacatcaggccctgagaagcccccttagct

SEQ ID NO: 136011 - DNA, 1890 bp, Homo sapiens
ccagctgcctcccgttctctgctctcatggggtcttcctgcctcttcccagcttccattcctgccgctgagcttggcctccctcaccatcctttatctctgtgccccacacattcacagtagtgacctctccagggggttctctatctcactgcaccgtgggctttttttaagggtaggaaaatgtatttgtctatgtcccattgtattttgcagagttgtttgtgagtgtttcttgctcgaatagacagagtggtggtgggccacgctggcccctgggagccatgtgcctgtgggaagctctgcactccccagggtctcagggacagggctggcatttgtccctctggcttgcttgtttcacttggtttttctaagagggaattgaagtgttgctgagaattggaggttttttaacagctctttcccttgttccttctcaggcccgaatggaagtggatgcagatggaaatggtgctaagatatttgcctatgcctttgacaagaaccgaggaaggggctctgggagactccttcatgagctgctgtggtgggtgtttccaagctgtctctgccccccgccactgggctcctgggtgagctccgatggcacagggcgcctggagccccctgccccgctgaagccctgccttgccttccctgaatctcgcagttatttttgtgtccttcaccactaacccaaaggaacgaatgatttgtatgttgcacttcaaacaccaagtggactttctgctgggagcttgcccaggaccggcagcctctggagggacggtggttgctccccttgctgggttttgccgagcccccccggtgtgcatggtagggaccactcagatggggagctgtctcgaggccatctgcttaggtggttttgcgttccagctttggctgtctgtgctctgaagtccaggggccgggtcctccctgtgtccctgtcctgtttgggccacagatcaggtgcttgggtttctctcagcagcttccgcctgaggtaccctcatccaaaggaccaggggcccgatcagatcacatggctgacatttcttcctggaaggactttggtacctgaccagaaatgtctgtgagggtgggaggcagcgatgcagggttagatgcagggtttgctgtctgtttctagggagcggcaccgggggggcgtggccccgggcttccaggtggtgcacctcaacgctgtgaccgtggacaatcgcctggacaacctgcaactggtgccgtggggctggcggcccaaggctgaagagacctccagcaagcagaggtgggtcttctcagggcctggcgatgccagcagaggcgccttttgaggagggccaccgccaaagctcttgtttccaagagggtctcctgttcctcctctgagccctgatgcttctgtgtattttgggaatttcattgtttttccccaaagcgtggaatcctccttttcttcatgggagcgggaaggatcttgatggtgtgtgtttttgcattgctcctcttataattggctctgggaacctccctttagctggcatgacagtggggagaagggctgcctgctccagggcagggccagcgtcgggactcggtgtgagcagggcttctgccccacacccctgggaggcatcagccttctctcctcacctcaggattccttccttctctgctcacctcaggattccttccttctctcacctcaggattccttccttctctcacctcaggattccttccttctctcacctcgggattccttccttctctcacctcgggattccttccttctctcctcacctcgggattccttccttctctgctcacgtcaggattccttccttctctcctcacctcaggattccttccttctctg

SEQ ID NO: 136012 - DNA, 1223 bp, Homo sapiens
atctcctgacctcgtgatccgcccgcctcggcctcccaaagtgctgggattacaggcgtgagccaccgtgcctggccaggaaacattttttaaacctgcatgggggaggagggacagggcttgcagggcccctgcaaagaggtgcaacgttcaagtccagaaggcggaagaagtcacactctgactaggggactgccactgagccactcagtcctgcagccaagccctgcctggtggctttcctgttgcgaaaggctcggttcccttcagcgtgttctgccatcacaagcagtctgcaagctggaaagaagagggagcggggtcgtatgccgccagcagcagggagacccctcacaatggaccccatgtattgctctggcttctccgtgggcagaactgcatcctgtggtcctgcctgattcgatgatttgaaaaggcagaaacatggccgctgccattggcctggccagtgaaaacgggctccctgggaaattcacccagcctgacctgaagcagttgctgagaggcagaggagcagctccaggtgttttggcagggaagcagctggcagctgtgcgggagccccttgcctcccgtgttcttactgaggagtgtgtggggcagctcgggacaggtttcactttggacagtggttggaggctgcttactctggcagagtcatctcaaagagccttggtgtatgtgcaaaacggggccatctgcatgggcgttgggaagatcacagaacctggacccttaggatgacccaagggtcagttgcatactgtttgtttttgtggagtcaatgtcccatgacggttttcgcgatgctttgctagtaggagcagtggcgtgtgaggctcccggttaaataccatgagattctaagcggaattctgggtctcctggtatgcacaggtaaaattacagtagacctgtcccactctttgccagaacctcgtacttgtctgcagtttgactggaataaggggtgtttgtgttccacctccctccaacgtgtgttgagacatttatttatttatttatttatttacgttgctcttgttacccaggctggagtgcagtggtgcaatctcagctgctcaccgcaacctctgcctccctggttcaagtgattcttctgcctcagactcccgagtagctgggactacaggcacgcgccaccaggcctggctaattttgtatttttagtagagacgggg

SEQ ID NO: 136013 - DNA, 1080 bp, Homo sapiens
ttttttttgagatggagtttcactcttgttgctcaggctggagtgcagtggcgcgatctcggctcactgcaacctccgcctcccaggttcaagcgattctcctgcctcagcctccctggtagctgggattacaggcatgtgccaccatgcccagctaatttcgtatttctagtagagatggggtttctccatgtcggtcaggctggtctggaactcctgacctcaggtgatctgcctgccttggcctcccgaagtgctgggattacaggcatgagccaccgtgcccggccttttttgtatttttagtagagatggggtttcaccatgtcagccaggctggtcttgaactcctgacctcaagtgatccacccgccttggcctcccacagtgctgggattacaggtgtgagccactgcacccagctgggtcccagcatttgcgggattcaaggtggggatgtgcagtctgtcaggagtgttaaaagcacggcagcatttccagtccccaggcctcctctccttgcttcagccacgcccaccctcctctgtgcctgctcatgcccatgtgcttctgttgggctgtctgctggtccacaggaggattactggtgttccggattttcagcatgaacacagtatggggtctggcccgaggagggcctggctaacagagcatggattcaaaatcagagcagagctgggtaccgtggctcatgcctgtaatcccaacactttgggaggctgaggcaggtggattgcttgagcttaggagtttgagaccagcctggacagcatggcaaaaccctgtctctataagaaaaacaaaaaacaaaaaacaaaacccaggtgtggtggcacgtgcctgtagtcctagctacttgcggggctgagatgggtggatcgcttgaacacaggaggttaaggctgcagtgagccgagatcgtgccactgcacactagcctgggcggcgggagtgagaccgtgtctcaaaaacaacaacaacaacaacaacaacaaaaaaacaaaaaatggaccgaggttggggtggcaaggctgggctggaatggaggctgaggacagg

SEQ ID NO: 136014 - DNA, 1041 bp, Homo sapiens
ggatttgggtgggctctgacccctggcacagctgtttcacccttgccccattcccaaaccactctcctgttcaagccaagctcttatcctcagtccttcacccaagccacagccctgtgctgctgtggcgctggtgactgagacagggagacccagtgtgagctggtcagctgcagtgcccactcttatcctggccctgtggccacctcaggccacctcagggggggactgccccccacctccctcctgtctctgcagggagcctgcccgctggagagcacagcttccccttccagttcctgcttcctggtgagagcccagcctggacaggcctggtgatgaccaactggtcctgggaggtgggctctgcagggtggaaggcagccaggtaccagtgcctgctctctccccagccactgcacccacgtcctttgagggtcctttcgggaagatcgtgcaccaggtgagggccgccatccacacgccacggttttccaaggatcacaagtgcagcctcgtgttctatatcttgagccccttgaacctgaacagcatcccagacattgaggtgaggatggcacagtgacctccttggtgggtccccaccctcatggaggctggggaagagctgggcaggcactgcttcatcccagcgtcctgtccccagctgaggtgaggggggccagggtctggaggcagtggcctctttgccctgagctgactgctgatgtccaggggcagggcgtggcagggctgaggggcctgtcccaatgccacagggatccagcctgcgcacacctgctaagcccctccctggccctccccccaagcaacccaacgtggcctctgccaccaagaagttctcctacaagctggtgaagacgggcagcgtggtcctcacagccagcactgatctccgcggctatgtggtggggcaggcactgcagctgcatgccgacgttgagaaccagtcaggcaaggacaccagccctgtggtggccagtctgctgcaggtcagagcccccgccagttgcctggacc

SEQ ID NO: 136015 - DNA, 1110 bp, Homo sapiens
tgctggctgtcagaagcaggaaagcacgctcggtgggaagcttgcggactcaagtttatttccaaaccagcagctttaaagggctctcgatgtaaaaagttcacattcttttgttaatggtctcggccttccccgtgctcattctcaaggatagtttgtttccttgcttaggaaaggaagcagcgtagagattaaagtcttgcgagtggaccactggcgtccctctgaaggaaaagcaagcaggaggtggtgtgtccgtggagatgcagaaatagtgtggtcctagggctgagataagggaccggtttggagaaaactgtcagcgtagaagtatttctttgaaattaactgtctagtaacagttgagacttctaaagcttagaaagttaaggtgtagtaagaagccgtacagtatcctggtgcatagacttaacactgtattttaactcaggtaatgtatggcctttttgtttatttttttcctgcatttttggggggtgttgaaataagtaaactgggaaggtgcaggggaattcttaaattcaatgcaaggagtttttgctgagtatctgcagcattcaaggaattaatattagtcactgagaacaaaaagcgaaattagaaaatttcaagtcacttctaggcttgtaggggagaagacgtgtagtgatgaattctatcatttatgaagtacccactggatcccacacactgtgcaagacctttagatcaggcgcctccctcggttttcttcaccctgtgcagcaggtgctgttatttccttttttaaattattatttattattattattttttgagacaggatctccctttgtcactcaggctggaatgcagaggcatgatcactgctcactgcagcttcgaccacccaggctcaaaggagtctcccacctcgggtgctgccacacctggccaatttttttgtatttttttggtagagaccggggtttcaccatgttgcccaggctggtcttgaacttttggactccagcgatctgcctgcctccgcctccctaagtgctaggattacagacatgagccattgtgcccgtcctgttgtttcctgtttagctgaggaggaagggttag

SEQ ID NO: 136016 - DNA, 1033 bp, Homo sapiens
cagctccacctgggttagctcaacccttagagattatttgttctcatctctttggagttgaaaatgttgtacttttctaggagccatttccccaggccatgtggaggtcaggtatctgctggttctggcctcactctactcctcctcctcctccccgctctgtggagagggtggcttgaaggagacgggcagcaggtgtgtgactgcagtcctggggcacgggcagaggctggcatgtggggaaagcaggacccgggaggctgtagcttaagtagacatttgttttttatttgaagagaattttagagatggggtggtggtggattttagcattagagatttctggcttctgcttgaagcactgtgaataggggacaaaaaaataaccaagaggaaaagttcatgtaaagtagaagttttggtgtgttttcttgaaaggaaattgtctacagtgaaagcgttgtatttttagagaactcggggaggaaaacgctgttgtgctgcttatcacacgggtctggcctttttgacatctgaaatcttataggaatttgtctttttgagagtgtatgctgcttatttggtttcgtggaatccagaaaagagcctatccaaattatctttaccttcagggtaaattaccttttagaattgtggcagatggcacataggacctctcagagggactgcaccttgtacaagaagaaaagtgagagggtgttgcaaaggagagcttccacctcctttatagacttttgcagaacagctttcttcctttcgaccttggagaagaggcaggaccagtggggaggcagacaagtaggtgaaggaagacaaaaggaagaagggacgcactgatcgagaagacaaggagtgctgatggctttgggcgccagctgtctactccagagagtctaactgacctgggacttgcaggatcctgctagaagaaaaatccttgcttccttctcctcctgttttcttcctcttcctccattctccttcctctcccttctattcacccacccaccac

SEQ ID NO: 136017 - DNA, 1029 bp, Homo sapiens
ctcaggtgggtgaggcctgagaatcgcttgaactgtggaagcagaggttgcagtgagccgagatcgcgccactgtactccagcctgggcgagagagtgaactctgtctcaacaaaaaaattgtaagaggccttgtataatacatacctctatagatgcttaatctcaaagatttagtgatttaagttccttattgaattttcttgatttatctatttctataattttttgtaggaggttggacatttgaaatatatgaattattgtcagcagtagaatgcattttgaaataaattgtaacactcctgtaacagagcccaaagatttcagatatctaattatataaatgatacatgaatgcgttcttattgttaagaaactgtcttcaaaaatagaaatacaggagaagtttccttggactgtgttctgaatgccagttcttctgctggaggcgactgtaaccagctggcaggagtaaatctgactgtccagcagctcatggtgaatgttgtaactacgattttttgactttttccaaatgatgtccatttggaaaagcggcctcccactgaacccggctgacggctgttgtttctctctaacaggcagttccggcgaggggggagcctcagcaggattgctgtgtgaaaaccgagctgctgggagaaggtgagggcggtgtgcaccgagggacaggagcagcgcctccctccagactagaaaacctgctgctcttcctctcttattagtccccgtcttctgactttctttgcttcacctaggtttatggtatagtttctaatctatcccattcctaaatagcacagttgcacagacaaacacaaaagctctgccagagaaggaacacatttgtcaaagtatgaaaagcaaaaatcctgtatatccttgtcttaaagtacacccagaaaattaaaagtgagtggccacacaaatgtttatagcagcattgtcacgtcgccgaaaaccggagacactccggtgtcctcagttgataaggaactggataaac

SEQ ID NO: 136018 - DNA, 1026 bp, Homo sapiens
cccacccctcgcatgcaccatgattttcacacgcagggtgcgcccacccctcacgcactgtgatgattttcacacacagggcgcgcccgcccctcacgcaccgtgatgattttcacacacagggcgcgcctgcccctcacacgcaccgtgctgattttcacacacagggcgcgcccgcccctcacgcgcaccgtgctgattttcacacacagggcacgcgtgcttctcacacatgctgtgctggactgatcaccagatcttacgtggtgcatacacgatacaggttttcaaagtgttcatggtgcttttagtgtgctctctcagtttgatgtgaatttgggtgtaagttctaggtttgtgatcacattcccgtggaattttctctctctgacattgctggtgaacattctgacagcactttcttgtcatttgtttgtagatcgtttgctctttcccctcagccactgtttagggcttcacagccctgtcaattggaggatttgtgtcttcagctccagaaggatgctctgtatgagttttcttctgttttcttcccatggagctcctcttaaatggccggctcttctgtcctcctgggcagttctctgtctgtttccagcttccttactggttcctcagcccttccccttcttgctgttcatcccatatattgatatattttattctgacataaatttttttcatgcccagtatctctgattagttctctctctttttctttttctttttctttttttttttttgagacggagtcttgctctgtcacccaggttagagtgaaatggcgcgatctcagctcactataacccccgcctcccaggtttaagtgattctcatgcttcagcctcccaagtagctgggactacaggcgcctaccaccacacctggctaatttttgtatttttagtagagatgaggtttcaccatgttggccaggctgttcttgaactgacctcaggtgatccatgcgcctcggcctcccagagtgctgggattacaggtgtg

SEQ ID NO: 136019 - DNA, 1746 bp, Homo sapiens
ttgtgtcctaggaagactggcctggcctggcccctgtgctgggaagggaggctgggctcttcctgctccgcgctgcgtcctccctgctgcacatgctgttcacgttggtctgttttgcaaagtgagaggacttctcaagggtagtcattccatgtgcaaagccaaggggactgggaggaggagtcgcttcagagccctgctactgatgatttgtggctttcctgcctccaaggtggggtgataatgtttgctccgtgttttgttgtgaatggaacagatgaacagatgatccaggacgtgtttctgattctctgtgaattgatcgtgagggaaggatgcctgtcactgtgctgatgacctgcgggcagtgggcctgttgtgatggggtttgctggtgattttggtgatcaagttttgtaaactgtctcttacctttgaaaaacatttgaatggtgtttcttttcctttcttgtccccttttgacttttttttttttttttagcttgcttgccttttgttttagcagctgcagtatctcggaagaaaaaacgaagaatgggaacctatagcctggttcctaagaaaaagaccaaagtattaaaacagaggacggtgattgagatgtttaagagcataactcattccactgtgggttccaaggtaagagacgcatttgagtgagttgccacgtgtgcgtggaaatgcgtttctgtgttcagggcctcgttatcagtaatttgggtgacctcagtccccgggaaggtgccagtgccatgaagctcctctgccataggggcagagtgttcgtgtccaagatcattgtgggggactccaccccgtcctccctgccctcctcaccacagcccacctgtctgccgggctcttctccaggtggcaggggcacctcttcgtgtgtccccgcctccccacaggcccttgcacctcccagtcacccaagactcctcagtgaaagcaagtttgttcatgatgcgcactgatcctgccttggggtatacacctgcccgtgttctagggggagaaggacctgggcgccagcagcctgcacgtgaatggggagagcctggagatggactcggatgaggacgactcagaggagctcgaggaggacgacggccatggtgcagagcaggcggccgcgttccccacagaggacagcaggacttccaaggagagcatgtcggaggctgatcgcgcccagaaggtatgtgttgctgtcttgggtgacagcacaaggaaagagcatcacaaagttggccgtggttctgaaaattaacagtctggtcacttctagaccctgataaaatcccctgtttacaattggcttagatttttgtattttatttttcttgatttattagattattttcattcaagaagtatttatgtttctgtacatcattcattgaagtaaacctcttttttttttctgtgttttctttctttcttttttttgagacagggtcttgttttcacccacgctgcagtgcagtggcacgatcatagctcactgcactcaacctcctgggctcaatgatcctcccatcccagccccccgagcagctgggaccacaggctcacgccaccatgcctggctaatttttaaatttttttgtggagacggggactcgctttgctgcccaggctggtcttgagctcctttgctcaagtgatcctcccgcctcagtctcccagtgttgggaatacagccatgagccacggcgcccg

SEQ ID NO: 136020 - DNA, 1031 bp, Homo sapiens
ttttgaccttgtctgtagtgtcagaactcccaggtactaatcaatttctttatgatttctgagttctgtgttctaattatgataaaaacctttctcactgttgattttgaatgaattgatgtatgctatcttctaatacttcttttatttcattcttgtatataaatatttgattcatatagaattaaaatatcaggtagggctgctcagaatgggggaagtttatgacatattaattatatctcaataaagcttttaaaagaaaatgtgaggtaagggtcccagggcttcccttaaaatgcttaggtttcagctccacttactgactgacatttcttcccttctcatttacaacaccacgtttatcatgtaccatatgggatattaatttcagtctatttctcgattctctctttcgattgaggttctcatcttctagaggaactggacactgaataactctaggtatttgtcataaagtaaaacattaaatgactgtcaaggcacgaaaagaatcaagaaacaaaagcaaagccaagaagaaaatgtggtcagtgtaaaacagaacaagatggcaggaacagccttaactagatgggcactgacaatcaacagtgatagtttcgttacgtaagtggctccagagaatagagaaggataggaaaagtacgctagcccattctgagactaaaatataggctgaagtcacctaaatcctaaatacaaaagtcctaaatacattttttttttttgggactgagtctggcgctgtcacccagggtggagtgcaatggtgcgatctcggctcactgcaacctctgcctcccaggttcaagcaattctcctgcctcagcctcccgagtagctgggattataggcacccaccaccacacccagctaatttttgtatttttagtagagacaacgtttcaccatgttggccaggctggtcttgaactcctgacctcaagtgatcgacctgcctcggcctcccaaagtgttgggattacaggcgtgagccactgcgcccg

SEQ ID NO: 136021 - DNA, 1016 bp, Homo sapiens
ggcctgctcctgacctgctacccacccccaggacagatgtgggaagctcctggcctgctcctggcttctcttttcctgtttcacttgggtgtcagccttctcagttcacctgcatcagactctaagttccctatttactttattatttgtgtgtgtgtgtgtcttgctctgttgtgcaggctggagtgagtgcagtggcaaatcatagtttattgtagtcttcacctcctgggctcaagtgatcctcccacctcagcctccaaagtagctaggaccacaggcatgcgccaccatgtccagctaatttttttttttaattaatttttttgtagagatgaggttctctcagtcgacagcctctcactatgttgcccaggctaatcttgaacttctgggctcatgtgatcaacctgccttggcttcccaaagtgctgggattctaggtatgagccatggcgcccagcctcttcttaattctgatgtcagtggttaccccttctctttctaatctccttgggttttcagcttccacttgattccttacagctgtcttatgcacagtgatcaagcagcctcttataaagaagctcttgttccttccttaaaagtcgctttgccagagttttggaaggaagtggagttagctgtggtgttagtctgctgttaattggtggtttcattgccttgtcttgtttttaaaataagaaacctgtccagtgacatgaaaactcctgtcaaagccgactgaagtgtcggaatgcttatagaagggttagaacatttcgatggtcagtcgtgaagcaagggaggagaggctgctgctttcacctctgacacgaatgcggcagcattgactgttcctgctgattctgtaagagaagaaccggaaataaacattaatattttaaaagacaagagagaagagtttgctgagaatatactcatccatctgaaacatctagcaaaatcagctcaaaacctattacagctcctaagctgaccttacatgtgatcaa

SEQ ID NO: 136022 - DNA, 1558 bp, Homo sapiens
tcagaaatggagctttaaaaacttgacaggaaaaacaggggtctcgctgtgttgcccaggctggtcttgaacttctggcctcaagcagtccactcgcctaggcctcccagagcattgggattacaagcgtgagccatcgagcccgcagagtacacccttgatgtgaagtcgcatgggtgcctgtccaccgggaaatgcagagaatagtggaatagcgcagcaaaggcagccccatgccgccttagggagtgccgggcacagggtggacggagactcacgtatgtttcagtgtcttttgcactgaacgtctatttgcgtattgcctgtgcttatagaaaagataaatacagcagaaaaaataagatgtgtctgttctggtgtggaaagaattccagaacatatttttaattagaagaaaataatattcacagaactgttgagtgtcctgccatctgtgcagactagaaatgcactgtcgtctgtgggcccacgtctgcctggatgttcactggaaggaggcgtgggcaacttagctgtggtggctccgaggattggactgggatcatgggtgtgtgggggtaggtctcacactgtgtattgttttgtggcctctgaaaatctttttatgattgttctgtgtgttttgtgatgtgtttattgaattatcccattcataagatacagtgagtacctgaaccctcactgatacagcacccagcgggtgagctcttgcctcagtccgcaccagggcagccactctctggtcccgatgtggagacaggaccggggagcagagtggaagctcagagtgtgtctctggccctgcctggaccagcactcggtcaccccacacaccagccagggctggagcaggccggcggcgcccccgccccgcgagcgtctccggcgtgtgcggccagtgcccgtttcgaggtttgctttggatccgtcatctgccactaaaggatgtaattggtttctgttttctgtttgggttcccgcttcgactgtgtggctgatcagatggacggggagtccgaggaggagcaggagtccgtggacaccggggaggaggaggaaggcggtgacgagtctgacctggtaatgcccagcgcctcctcctgcgtctgtgctgatgtagaggagatgcaaagacaccagcgtccttcagttctttacccaacaacccttgttgcctgagcgctcacccatgtgcttggagctggtcatggtgatggccacagatgggtcctgtccctggcaaagcctcatgagaaagacaccgtgcagagttgcagcgcagggctgggcctggcacggggctgccccagctgcgtgctgggtggggtggagttgagtggcctgtggaggttctcagagggagagggtgtggtgggagccggcagcaaggacacctgtttgggattccgctgcatcggctgatgtgcgagaaggaagggctggatttgaaggtttccaggtagaacggcagagggagagggtgtggcgggagccggcagcaaggacagctgtttgggattccgctgcatcggctgac

SEQ ID NO: 136023 - DNA, 1824 bp, Homo sapiens
attgttttgagttgccaggctgtcgaatggccaggagtttgtttctgtccattgctgagaagtgtcccattgtgtggctgccccacagtcttatctgtccattcatccgtccatgggctttgggctctttccagccttggctgctagaaattaagtggccgtgaacatttgtgtgcaaatcttttttgaacaggtgcttccctagatcttggttaggtatctgggagtggaatggctgagtagagtggcgtgtgttcagctcttcaggaagctgccaagctgttttccaagcactcgtcctgttttaggtccagacaacacacaagcattccagttcccctctgtccacgccagcacttgttagggttagtctttttaattccagtggatctgtgggtgtgcagtggtgttttactgtagtttcaatgctgttacctaatgagtaatgagattgtacattttagccttcatttagtttttttgaaacgtgtctgttcacatcttttgctcacttttaaaatctggttgtttttcttctcattgggttaaaagagtttttaacatattctggagacaagtcttttatcaggtggatgttttgcatgtatttgtacctagtctctgacctgccttttcattttcctaatgctgtatttagaagagcaaacgtttttaaggttttcttgaagtccaagttacgagttattttacttggggggttcatgcttttgtgctctaagaaatctttgacagacccaggtcacagaggttttgtcccttgttttcttcttggcatctgcaggctccgcgcttgcctgtcggttcattttgcactgatgtttgagtgagctgtggcgcaggccccttcttggcagtgggtgtgcagctgccataggcactgctgcttgagttgatttttctccacctgttgacattcagtgtgtgggctgttcctggacattctggtctgtttcatttatttatttgtttatccttataccagtgtcaccgagtggcagcactttgttcttattcacagtgattttggctaatctagattccccaatgtagagtacctctgttaactggatgttggggaggcgtcatcccctgaaaagagagggttgcgggagacctggggcgtgaggcagtcaccatggaggctcctggcgtttgagggtggaggacgtgtgagccccccgggagctgcatgtggtgcttcagttacgtttctcttcacctcagtttattgattcagatcataacaccagatgtggcttttactgttggccaacaaaagcattttagagccaagactaaaagttgtttttggggtagagatttcatctttgtcatcttggctgtaatgtgcaaaatgtgtgcttttaaatattcacagaggagtttgaattttatttctttatgaattttttatttaaatcttcttttcgtttaaaactatacaaagtgtactcctgttcttcaagttgatgatggtgatttctcaaaggtggttgacttttcctgtctgtctaagatctaggtggagcatgtggcttgaatgaaaagactggttaccatacctctctgtgctagtgttcatttatttccagtcattgaaataagattggtgactagtccctagaagcttggctgtgaaatgtgaccatctgcccttggccggagttagatattacctggtacaggtacacactttcataggcctcctcagtgaatgcccttgtgattacaaacacccaattttatatatctttctccggccctcctgggaagtgtggacaggctggcctggccaccactcgt

SEQ ID NO: 136024 - DNA, 1107 bp, Homo sapiens
gcctccctggatttcagccaggacgcccgggaggtcattgctttctctctgacacagatttgcctgcaacatggcaccttgggccatctctttagctactttacatctgatctttcaaatctgcaagttagatttttctgttttatttaaaaataatctacaacatatgactaccatgtttttatctgtttctttgatcatttgatagcttttatgtagttggtgtagttacagagaaagatgtgctgacatgttggtgcctttgtttttgtctatacagcttctctcctcccccatgaatattatgtctaaaagggggaattagcaaaataatatgcgggagagaaaatgatagtgaaactggaatggtctaaaccatagtgggtttcaacttgtggttttgaatggattaattagaagtagtccatttcctggggccccagccttgctgccctgtgcgtctgggtgggtgcggccgcctgggtgcgtggtgtctgatgtgtgtgcctttcatacctaggttctgagtcgtataagtcatctgcaggaagcgctgagcagacggcaccaggagacagcacagggtacatggaagtttctctggactccctggatctccgagtcaaaggaattctgtcttcacaagcagaaggtgaatgtggtggtgtaacttagaccgggcaccatcttggtcctttgtcttctgggctccttcctctgtattagcatgatgccccttggtggacactagtagaagatcgggttaactgcatcacttccagctgaggtgtagacaggatggggtgcgtttgctgtgtcccggtgttcaagtgaagaaagagacattacggaaaccctctaagagtcaactggcgaagcccaagcatggcccagcgtggcggtcatctccctccgtgggtcaggcgtgctccgtggaggattgcccacggccagacgccctccctggtggcatctcaggacacacggggacgtactgttgaataaggtgtctctgattggctgaaatatgtccctggtcagtgttgagctgagagttctgacatacgttctgtaatggaatattcgtatttagtgtatttttgtacc

SEQ ID NO: 136025 - DNA, 1013 bp, Homo sapiens
ggtagacaggttggttgttcctacttttctgttattgcaaaagctgggtccttctagatacatgtttgtgcacttaattatatcttcaagtggagtcttaagaatatgtatttgtaattgattcatgtctccaagttgcttgctgtgaagtttggacagaactcacagtgatggtgtgtcatctctgcagaccccacagataccagctttgcagtgtgccagaccgaatacgaagaatgtcagaggcttatgttgaatttctttgtgtaatttcctttggggggcatttgtagttcttctttagtgaaatgccactcaattatttgcttatttttgggggggctacttcttgttttcttattggctatcagagaactttccgtagcaaacctgtaaggctttgtctggtgtgctgcagagtgcctggcatcctgggtgccctcattgcttccacctccacaggcgccttcaagtcctggtcctctcagaatcctccagtgaccatgttccccagtcaggccccagactctgtgtcctgctccttgccttgtgtgcaggttcctctggctgccccagaatccttggggctcccacagattcattgtaccgctgcccactgctggcctgtgatggcctggactgtcctgccaggtatacgttcatgtttcctggatacccagcccagaacccctctcaccccagaaccttccttgacttctgccagagttgagcagccggccctctggtaggcgcatgtgagtggatgtgggcacatgtggcccactggatctggtggatgtggtcgcgtctggccccctggatctggtgggtgtgggcacgcctggctccctggatctggtgagtgtggtcgcgtctgaccccctggatctggtgggtgtgggcacgcctggccccctggatctggtgggtgtgggcacgcctgccccctggatctggtgggtatggtcgcgcctggccccctggatctggtggatgtggtcgcgtctggcccc

SEQ ID NO: 136026 - DNA, 1049 bp, Homo sapiens
gcgtctggccccctggatctggtggatgtggtcgcgcctggccccctggatctggtgggtgtgggcacgcctgccccctggatctggtgggtatggtcgcgcctggccccctggatctggtggatgtggtcgcgtctggccccctggatctggtgggtgtgggcacgcctggccccctggatctggtgggtgtggtcgcgcctggcccactggacctgctcatgtgccgctgcctcctgcagtttgtgcagatgatgggcgtttccttctctgggctccctgtttgtcccccgtgctgaggcgtgtagcaggtgctcgataagtgcttgcaaagccaagctggccttgcagggctcggctcagtcagcccacacctgctgagcagctcttgtgtgcctgcactgcccagcgcctggtgggagggaatgccggcctctcgtgactctgacattgaccaccagtcttgtctgattgcagttgggccggtgcacaaacagcgtggtcaagtatgagctgatgcgcccctccaacaaggccccgctcctcgtgctgtgtgaagaccaccggggccgcatggtgaagcaccagtgctgtcctggctgtggctacttctgcacagcggtaagagcccagtccggcagcctctgagtcctccgcaggctttgctgtctgctcactggtgctggttcctgtcctgtgtccacctgctgtcgggtggtccagcagctggcccaggtctggtgtccgtctggaggtctccagtgttcacaagcccctcaccacccctgtcgagccccagtgccttagacaccttcacccccaacccccatttccctcctaccgcctggaaaccgcttttggagatgactaggacggtgtgacctgggcttccaggccagaggagggaagtgagggttgggggtgaaggtgtctaaggcactggggctcgagagcagtggtgaggggcttgtgacgcactggagactccaggtggaggctgtactgaggacgttcatcccccatgacaagggtgtactgaggacattcac

SEQ ID NO: 136027 - DNA, 1864 bp, Homo sapiens
ggtgtttgaagtcagccatgggtcactgtgcgcctccaggcctcagccttctgacctctgacccttggtctgtggaccctgcgttctctttggggaagcccagctccttccggtcaaagtctcctgagcctctcacttgcccctctgttttgtggttttttgttttgttttgttttgtttttgtaacagagttcacttttgttgcccaggctggagtgcagtggtgcaatctgggctcactgcaacctctgcctcccaggttcaagcaactctcctgcctcagcctcctgcgtagctgggattacaggcgccaggcaccacgcctggttaatttttgtatttttagtagagatggggtttcaccatgttggccaggctggtctcgaacgcctgacctcaggtgatccacctgccttggcctcccaaagtgctgggatgacaggcgtgagctgccgtgcccggcctctccacccccttagccgttatgagttagcctcattttccatatagaccattctagggctgtttaaacattccttatttaattgtgttacttttggtttttaattactaatagtaaaaacaatactattttcaacgttttttcataatgtttatgttataaattaaatactaggtctttgtcatctaagaagtttttcctcatggagaaaaggtttcaacagccaaacagctgattggcttttagcacacaaccaattttaaagtcgagggcttcttaagtttcagaccaagaaaaatttacctgccagttaattggtctttcaagtttctccgtttgtttggaaaaatggaaactgttccggaatgcatgctactggaaatcaggattttccacttattttggcgagtactaaatcagtgagaggatgctgtgtggcctggcagggtgaaccggcacctccctcctgcctcctctctgctgaggggcccctccctcccccttctttgtctgctttagaaggttgtcactgtcctcctcatttctaaaggtgttgtcacactcctgagctataaacatttactatcaaattaccttagaagtggaatgaaatctagcagaaatattctgcttagactaaaggtttgataataatagaataattatgtctttgaatacgtgtttagaaaactcagacattgttggtcactgaaacagtgcagctctctttttttgagtgtggaagcttgtaagtcacttctccccaggcggtggctaccgtcacagccctcccatacacctgaactgttgtttcactaggcgggcgctaatattgacacctgctcagaagaccagaggaccccgttgatggaagcagccgaaaacaaccatctggaagcagtgaagtacctcatcaaggctggggccctggtggatcccaaggtatgttcccctgtcagaatcaacgtcctagtgtgtgtgtagacgtttctcagaaagctgagcaagggacatccttactgacatctccaggacttggggccttcacacactgacccagttgtccagaaatagttccttcatctcactttggttacctggtttattattaaaaactactagtgagtgctcactctctacagagcctgacaacagacaggtgagcgaatgacgggtttgctgtgcagaaggtgttcgccttacagtacatcgtctcaccctgtcttcagcccagagcaattaggcaagaaaaagaaatcaaaggcgttcacattggaaaggaagaagtaaaactgcctctgttcacagatgacatgtttttatatgtagaaaatcctaaagaatatgcaaaaatattgtaagctaacaaaaccaattcagcaaaacaggataaaaaattaa

SEQ ID NO: 136028 - DNA, 1047 bp, Homo sapiens
gaaggaggagcagaacctgctacagcccagacttcctgccagccaaggctgctggtgcgctccgggtctggcctgggcttacgaagtttcagctcccgtgtgtgtgccattagactcgttgcacgcagctgtgttggtgcgtccccagtgagtggtgcccaactgggagcgggcaaggccgacagcacagggcatgtcgggcagggttgttgggcctgggccagtcctggttctgccttcatcctgcgcttgtggagctacctgggctgtgctctgaggaagaactgtggcctctgaaggttgcattcaggtcctgagtgagacgcctgcacgaggggcatggtacctgggaggtgcagagacctcggcgtgggagtcctcattgctctggtggttgccggtctctggagcgatgacagctttgtcctcttccctggcaggatgacggaggctggacacccatgatctgggccacagagtacaagcacgtggacctcgtgaagctgctgctgtccaagggctctgacatcaacatccgagacaacgtaagttcgtcacaccctccccgggagccgtgtcctggaggggtggggacctcctcccccagaaggttcttttctcaaaagcagaaccctggcacctggtggcggctttgacctcttcctgtggcagcatcggcccggcactgtgctgtggctgtcctgtgctggatgcagatgggggatgtgaggtcccagcagaggccaccctctagggatctgcgggttcagagggcgctgcactgccctggtctccctcctgctgcctcacggggctgtgcctgggcctgaggctactgaccctggtgcgggtgccacagcacctctggctctccctttgtttttgtttttgtttcttttatggatggagtctcgctctgtcgcccaggctagagtgcagtggcgtaatcttggctcactgcaacctctgcctcctgggttcaagtgattctcatgcctccgcctccccagtagctgggattacaggtgtgtgccaccgtgtctggct

SEQ ID NO: 136029 - DNA, 1035 bp, Homo sapiens
ttttaaaaatacatgaaagaaaagtgcctccaagtgttaatatgttgagtgtaggttgatataattctggatgaccttttccctatttttattctttactgtgattatgctacttttataattatgttatttttacaatgaaacaaacaaaacatgaaacgaagtgccttccagagttgagatgggcgctaggttcccatccggtgacctgtggcaccctttccacctggccctgctgcggacggccacgcatgctccagagcctctccccgggcacatgggctgcagctgctgtggcccagccccagcactgtgagccagcaggaagcctgcactgagctctggcttgtgtctgttcaggaggagaacatttgcctgcactgggcggcgttctccggctgcgtggacatagccgagatcctgctggctgccaagtgcgacctccacgccgtgaacatccacggagactcgccactgcacattgccgcccgggagaaccgctacgactgtgtcgtgtgagtgcagtgcttcccccagcgcgggctggcgctgacctgacctgggcgcccagagagaccgcttgacagtcttgtgttcacacttggggcgtgagtggacacaggccctctgttccttcgtgtggaagtccatccttggtgttccacacgcagagaagtgtctttcccagtccacgtttgagatcagctgtggtttatttctgggttagggaggattgtcatgaaaaaattcccaagttggagtctcagacctgatactcctcacatggctgaggggcagcatgggaacagccctgctcccagcagggacctgccagctcagagtccccgagaggctcagggtgccttctgggagcagtgccacccacagccagggctggagttgctgggggctgtggcactcgccactcagggcccttttaaaacttgagaccttcagctgggtggtggtggctcacgcctgtaatcccagcactttgggaggctgaggcaggcagatcacctgaggtcaggagtt

SEQ ID NO: 136030 - DNA, 1024 bp, Homo sapiens
ggctgctggggaaggacagggaactgtgggtgctccaggcaccagcctccagtgactccctggcccctacacatggggctgtgccctcccacatgtggatctcacggtggctcagccaggttggtcatctggttgtgtgaagcccagctccacgtacgatgactgcagtctggatgcagtgagcaggagtggaactgaggactgctcacgctgtgcgtggcccaagcttggcctctctccctccttgcttcccttcttatccttgagggtaaatttgaatgaaaaatccaagaaaaatcaaatgccgccctggattttacactcttcctgctaagaaaacagcctgctgactttgacagtgaatgtgggagaggaggaagggaatcatgttcctgggtgagctaaagcccgtctttgcagagtcattgctgagcagacttgttcaagttatctcacagtgaatagtgttccctttattgttagtgatgacggacattttataaatctcatctgtatcacattttcaagtcagctttaaatgttttgtggccttacattttcccttttagcctctttctttctcgggattcagatgtcaccttaaagaacaaggaaggagagacgcccctgcagtgtgcgagcctcaactctcaggtgtggagcgctctgcagatgagcaaggctctgcaggactcggcccccgacaggcccagccccgtggagaggatagtgagcaggtgagcccagccccaggacggctttgtggcaaatcagcggtcagcagggctttgggaacttgcggtgaaagctgctcctgaagccgaaacatccccaggctgcagtccaaattgtcagggccaggtgtttgccagccgccccactgcacgctgtgccaccccctgggcagagcacgtcagccaccaggtgacacctgtcctttccatggcagggacatcgctcgaggctacgagcgcatccccatcccctgtgtcaacgccgtggacagcgagccatgccccagcaa

SEQ ID NO: 136031 - DNA, 1033 bp, Homo sapiens
cagcctccgagtgcatgcagcctggtgccctcactgcttgcgccttctcgagcactttccttgtggctctgcttgtgggcagctccctcctcttcccaggccgggcactgcccaggcccccccccccccccgccccccgccccacaaggtgtgtcaggctctgtgttcttgcctttcccatcgagcatctggccacaaatgcagccgccgcccagcccttcacccaccccacgtcacccactgccgcgtcgctgccctgcctgccccctgtccctctgtcagggtcctcagccagagctccctcccacaggcactcgacatgtttctgcctgcacagccttctccctaagaggccacacactcacgtggtgcctttgagaagcacttaccagaatcagggttaacagaactggaagacgtagttgtgactgggaggggaaatggaaggcctgtgcctgcacgtctgaccccccggcgcctctcttctcagtactgcgtgtgcatcgacgactgctcctccagcaactgcatgtgcggccagctcagcatgcgctgctggtacgacaaggtgagggcggcctcgtgtgcgtgggctcaggtggtaagtgccgctggtccgggtctgcaaaaacagtgcaggcgtctgtgaccccagcgctgtcgtggcagcgtcgggaaggagttggaggtgagctgggtgtgacaggcaggggaggcacagcgggcaccagcacccgagtcagggtcgtgagccgaggacatggctgcggattccctggggctggggtctgcatcctttgtggctgcctggatggtggcgggggtgggcagcgtcagcctggcttggccccaggaggaggtgctgcttatgttgtgtgtatctggtaagctgtgccttgtgcttgctgagtgtgaggggtgtgaagagggagggtgctgccgggctgggtacagggagcatcagtgtgggcgctgggcttgaggagacacaggattggaagtttctgttgggtgctggtcctcggaggagccc

SEQ ID NO: 136032 - DNA, 1203 bp, Homo sapiens
tccgcgcgccagagacgctgggagtccgcactggcatcaccttctgagtttctgatgctgatttgtcgttgcgaagtttctcgtttcttcctctgacctccgaggtccccgctgcaccacggggttgctctgttctcctgtccggcccagactcttctgtgtggcgccgccgaagccaccgttagcgcgagctgctccgttcgccctgcccacggcctgcgtggctggggccgagtcccaggggccgcacggagggcacagtctcctgtcaggctcggagaggtcaggagaccgaccccaccactaactttggagaaaatgtgggtttgctttttaaaggaatcctatatctagtcctatatatcaaacctctaactgacgtttcttttcgaggaagtggcttggtgggtgcagcccccgccggttccgttgacgctggcaccttctgttgattttttaagccacatgctatgatgaataaactgatttattttctaccattactgaacattaggacaaacacaaaataaaaaacaaaacacagacaacggtgctgattctggtgtggtttctactcaccacgtgaaataaactatcaactgtataaagagaacaaagtgattttagaataaaatgcaggaaaaacttttttaaagatgttagtcttgtagcgtgaataaatttgccatcaccttttgtgtggtggcctggcaggtcatatacttttttttggcatatacctttttaaagactgtaattagtgcagtaacagtggggttttttttgtgcaactcttctaaaaacattcataatgcagtcatgtttatttttttctgttaaaatgtttttgacagttttaagagcagtcttttggctctgaccatttcttgttctgtttccaatgaaatcaataaaaaaaaagaagtactttaaatggggtttttattatgacaccatatttcagggtctctgcagaacttgcaggtccccctggacccggcccagctctctgtcccctgtccaaggaagtacagcttccttttcaccccagatctgtccccgaagaggggacgttccaggcagaggttaggggagcctgtgcatttgcgcacgtgtcgaatgagtctgtgtgtgtccacgaatgcatcgtgcacgtggtgcgaatgcgggcacactggtgtgtgtgtgtgtgtgtgtgtgttt

SEQ ID NO: 136033 - DNA, 1047 bp, Homo sapiens
gggcacagtgtagacggtagggaaggagagtgggagccggaagcagtgatccaggtgggagtggtgagggtttgtaccagggagtggcgctggagaacggggcaggtgggctctgacacccagaaaaggtagagcccacgggaagccccgtggtgcctccggagtctgtcacccatcggcgcaggtgcctttccccttccgtgccccagccagtctcacgtgcatccacgctcccagtcctgtccccacgtcactgcctctgccctcccgggcccctcaggaagcccctgtcaagcctctggccctgtggggctggttgcacctgggggtcagggacatgggcagggcccccagaaccccaaagccctgcgcgtccccacccctgttgtggctccagcctggtgctaccctccatggcccttggggacatcagagaaacacatcctggctcaggcaggtggctctccgggggagctttccaaccacggcttcttgttttagtctaaattaaactgggatttctttccaggacatgtaattagagcccagctttctccctggacccggcctcctgtgggttgaagagagggtgtgtgggtgtgtggccgctgcaccaggagggagtctggtcagcggagctcaggggccgaggcactgctgaccctgagcttcctgggcaaccactgtggcctcctgttcttttgggctttgtggacgcaggccgattcagatggtggcaggcacttctcagggagaagccaggcccagctcagggccccacagagggtccccatgggcaaggagggtccacccaggggagcagcagcccatgtgcaagtgtgcggctcagggatgacctgacgctgtgtctgaaaacaggtgacagcccagagacgctgccttcccgcaaggcgacctgacgctgtgtctgaacacaggtgacagcccagagacgctgccttcccgcaaggcgacctgacgctgtgtctgaacacaggtgacagcccagagacgctgccttcccacaaggcgacctgacactgtgtc

SEQ ID NO: 136034 - DNA, 1047 bp, Homo sapiens
tggcttgacacagacggtgccagaacatgcctcagaagggcaccctagcgtgtcgcatgcagtgctgtgcgtatcctgggcctcaggtgacagctgcttgaagggacactaaggtgggcctcaggtgacactgcttaaagggacatgtcttcctggttctctgctgggtcagcctcatcctcacatgaatttctgaacactggcagcctgcagagtcacactgacactcacacacacacacatactcacaaatacatataggcaagcacacacacaggcacacagactcacatacacacttatacacaagtacacacagacacacagtcacagaagcacacacagaatcatacacacagactcacacagacacacacacacagacccaccctcacaacactcacaatctcacacattcagttataatcatcccacactgtcaatcacatacacacataatctcacacattcacacacagtctcacacacacagtgtcacactcacacaccctctcacacacatgcctgtttgaagccagagcctgtgggcaagtaagctggtttgactgcccacaaaggcacagagagcttggccttgagaaggaggggctgcagcccacctggccctcccctgggaagttaattggagggaaatggctgtaaagggagctttggtttctttctgttggttttagaaaagcctttgaaagtcacttggaaatggctggagctgcatccaaaaggaaggtgggttggcgtgtggcttgatttgccctggaggtgtcctggtggcccagaggcgcctgggttgcagcctggggagccctggggctggaaccagagtggggtccaggtgcttgccgggaagtcaggtgggttcggcagcagggaccaggcggcatctccggaaagggcaccctcgcctcctttgttagcctacgctgccccatctcgagggccgggagacggtgcggtcagcctcccgccgcagggtgcgggggcaccctcgcctcctttgttagtctatgctgccccatcttgagggcc

SEQ ID NO: 136035 - DNA, 1054 bp, Homo sapiens
tccaggcattacagggtttgctgtctcacttcagtctcacttttctgcatgtgtggaattggttctcaacttctctttcaccctgaggtctcggctggtgcccgtctgacggacgcgtctgcggcctcctgtccagatgcacatggcagcctgcgcctacactggcgtggctctcagtgtcactggttctctcagaactctgtctctggttttctcacttctgtctgttctgttttttgcatgtgcagttttgtaaagcaagctcgaggtactgtatctcgcagctcatctgtctccagcgtgaactcaccgtgagtcgctctgctacgatattccatccatggcttcatgataactacatgcagacaccttccttccactcctaactctgctatctcaccgcaagtcatttgcttcatggggcagctccaggccgggcttctgtggcctgagcggggaatggtgggcttgctccctgatgtccccaagtcctgccacggggtcagaccctctgcgctcagcgcctcctcctttccctcctggtctctgtctttttgtctgctgcctgttgtgtccgctcactccggtgtctcgagtgtgtctgcttctcctgagtggactgggcgtcatgggttcaggtctccttgtggttcccatgaggtcagggccctgtgagcaggcacagcagagagtgctctttaggggctcactggggacgtttatgggtcctcctaggccccttacttgggagggactgtgtctgtgattctcaggaagtccttgttctagcaagagcagagagctgttgtccacttgggaagctcacagtagaccacccagggcccaaggcagagacacggaaactccagggtggccctccagggagtgactggctggcatcccctcgggcagcttctcatggggaagtgctcatggatggctggtccgcaggggcttcccctggagggcaaggccaggccctgcaggtgaggggtccctgaagtggtcaggtgcagttaggccacctgccctgatggaagtggccaggtgcagt

SEQ ID NO: 136036 - DNA, 1014 bp, Homo sapiens
aaggacagagacaggggccaggggaggtgcaggctgacttaagacaccatgcagagaggcccggcacgcagattcagagacctaggggatacctccagagaggaacttggtggtgctggccgagtgagggcagatgcagacagtctctggtgacgttagggctgacagtggcagataggcccggaaggaacaggccaggtggaaccagtggggctgcggggggcgggcaggtgccctagcgtaggctgctcagcatgttgctctgcctgggtggtcacgggggagcctgccagcctgacagcgccctcagcccagcagacagcctggcctttccctgctccaggtgtttcctgggcgagaaggagccacacctgaatgcaagggtgagggcagagctatatggtctggagcccaccccaccttcacacagaccctgtgcctctgcatgttccccatggtcctcactgcctgtctttttggaactgcaatgctggtccccaagattcacggcttcatcagagcgggccaccctgctgaccaagtggctcagagcccaggcccctctcgggcactggagtggactgggaggcttgaggcagtgaacagcctccgccctcacagggctcctgtgcctggtgcaagcccctggggctgccttctgttttacaccactcagcactgttggcagtagagcccttttgtcttggtcccagctggggttggtgggtcttctgtgggtcagttgtagggcacccctgggagcaggggcagcacagtttaaatgcatcagggatacaggtcagggcctggggcttcaactgaggctgggggtctgcagacggcccctacaggtagccctgcctgcccccaccccacccaagctcccaggtgagacacagacaccacacttccgctttcattcgtgcaaagtgctgcccctggacattgctcccactgcagcctggacttctacaaaggggcaggatttattgttcacctgcctggggtgggccg

SEQ ID NO: 136037 - DNA, 1046 bp, Homo sapiens
ccttctttctgtttgctttgggcttcttttgctcttcttttctagtttcttggggtaggagcttagattgttgatttgagtctttccttcttttctgctgcaaacatttagctctgtaagtttccctcttggcagctgcattccacaggttttcatattgtatattttttcagtcccgtttaaaaaatttcctttgagaagactcatggactgtttagaagtgtgttgtttagtttccaaacatttggagatttgcctatttctctgttattaacttctagtttgattactttatggtcagagaacatgttctgtattatttcagttcttttaagtttgttaaggttcgtggcccaggatgtgggatatcttgatgtatgttctgtgagcctttgaagggaacatgcattctgtgttgttgatgtgcattcctataagcattgtttagatcctgttggttgatgatgttattgagtatctttgtctacattcggattttctgtctagatatgtcaattgttgagaaaaggatattcagtctccagctgtaaatgtggatttatctttgctcctttcagtactgtaagtttttgcgtcatgtgtttgcagttctgtttttgggcacatacacatttaggatttctatgtctttttggtggactggccctttaattgttgtgtaacgtccttctctgtacctggtaatcttctttgctctgcagtctactttatcttatgtagatatgttcagtcctgccttcttttgattaatatgtgcatggtatatattttttcaaccttttgctttcaacctaactatatagttatatttgaagtaaatttcttgtagatagtattcatgttttcaatccactctgtcaattctgtcttttattttgcatatttagattgtttacacttagcataattattgatatattagggcttaagtctgttattttatttcttattttgtttttctctttctgtttttcatttctctggtttcctttttctcccttcctgtgggttacttgaatgtactt

SEQ ID NO: 136038 - DNA, 1048 bp, Homo sapiens
gcttcctggtgttttgactgctgaatggagcttcatcaggcctgttctggtcacccctgtgtcccccagtgtccagcacatgcctggcagggtaggtgctcagtaatgttgaacaagcgagtcgggcaaatgggactggagcaaaaggcgagcacgtggcagtgtgtggagtgtgtccccgtgcagcgtgttcacgtggagcgtgttcacatgcaccctgggagcctggacagggcacacaccccgcacaggccccagagaactttcctagggcaagagaggcctgctctccgtgagaatgttgacgctgaaattcttcctctctgagcaactccctccctgctgcccacagctgacctcttctgtgaaagggctgggtagttgatgctgttggctttggactgctgttggctgcatggacagttggtagtgaatggatgtagctgtactccagtgaagttttattcacacaaacaggtctccctatctggcctgtgagctttggtttgttgacccctgccatgaggttctgcagccttccccaccccccgtcccgggaggccctctcaggaatctcagccactgtccgtcacctggctgccaccaccaaccacagggaccattagcaaagcgaagctctggggccacagcttcctgaggcagcccagagccctttctgcgggacgggctgagcctgccctgtggcaaggggtggcgcgcccggctggggggccttgtggtgatccgtgccttccctcacaggctccgccgcttctgccactacatcgtgaccatgaggtacttcgaggtggtcattctcgtggtcatcgccttgagcagcatcgccctggctgctgaggacccagtgcgcacagactcgcccaggaacaacgtgagtggcccggatggccgggtccccgccaggctgtggcgggggagctgggtgccttcccaggggcccaaggggctggggtggggctgaggtcctgtcgtctcacagggcacccctccttcctctgtctgtgtgcctggcagtgcacgaccaaag

SEQ ID NO: 136039 - DNA, 1013 bp, Homo sapiens
gacacagcaccagtcttgtgtgtcaaggaagctggcggtggagcctctctgtggtcaggggcctgagggccttgcagggccctggaatgcctgggggccacctgggcctcagtggtcctcaggtttccatcccgtaggtgccctgcctggtcctctctcctggctcccttcacatcctttcctgcttccggcccctccctgtggctccacctcttgtcatggctccactcctcccctcatggccccaccccccaccatggctccacccctctcatcatggcaccacccttcccctcatggccccaccctcccaccatggctccacccctttcctcatggccccacccattcccttacggccatgccctcccaccttggcttcaccccctcatcgtggctccacccctccccgtgaccctacccttccccctcatggccccactctcccaccatgattccaccccctcatcatggctccacccctcctcctgcaggctgtgtttgactgtgtggtgaactccctgaagaatgtcctcaacatcttgattgtctacatgctcttcatgttcatatttgccgtcattgcggtgcagctcttcaaagggaagtttttctactgcacagatgaatccaaggagctggagagggactgcaggtaaactgaggcagggtgcaaggtgggacacacagccccatgatgcagacaacactgggagttcccttgggaccaggtggagctggtcacacggcgtgggagactccactgcagagcatcacggaccctgcctgagggccgaggaggggcttgcttgagaagggctagagtcaccacagaagacaggatgcatcccctccccagcaccacaccagggacccccagcacttcctcctcagcagagtcaggaaccaggcatgttctgagggacacagacatccagggagctcaaggtgcccactgggcaaggctttctctaagccctagagatcttggctgggctgtaaggtcagagggg

SEQ ID NO: 136040 - DNA, 1072 bp, Homo sapiens
ttgtaaattgaatgatacaatatgtggtcttttgtgagtagcttctttcgtgtgatgttttcaggtttgtccacgcagtggcttgtgtcagagccttgttccttgttacggctgaatatgtgttctgtgctgtgccacattttccttattctttcatttgctgatgaacattgggttgtttctaccttgtggctgttataaatgatgctgttgtatacatttatgtccacatttttgtgtgggtctgtttttgcttctcatgggtgtgtacctaaaagtggaattaatgagtgattgggtaactctgtgtttaactgtttgaggaaatgccagactgtttccaaagtggctaaagcattgtatattcccaccagcaatgcatgagggttctgaattccccatatccttgccaacacttgtggttttccatctttttagttttggtattttttaaactacagccatcatcatgggcatgaagtggtgtctcgtggtggtttttatttgcctttccctgatgatgagtggtgttgagcagcgtttcatgtgcttaatagccatttgtatatcttctttggaggagtgtctattcagatcctttacccattttttatttgggttttttttttttttttttttgagacggagtctcgctctgttgcccaggctggagtgcagtggcgcgatctcggctcactgcaggctccacctcccgggttcacgccattctcctgcctcagcctcccgagtagctgggactataggcgcccgccaccacgcccggctaattatttttgtatttttagtagagacgggggttcaccatgttagccaggatggtctccatctcctgacctcgtgatccgcccgcctcggcctcccaaagtgctgggattacaggcgtgagccaccgcgcccggccttttttatttattagaatagttatttacatattctaaatacaactcccttatcagacagaggattaggaaataagtatttttcccattctgtggatttgtctctttacgttctcggcgtcctctgagcacagaagtgtccgatttgatgc

SEQ ID NO: 136041 - DNA, 1027 bp, Homo sapiens
gcagcgtaggtcgcacctcagagctatccctgctggaaagggagctgcaacgtgtttgcctctgcaccctccgcacggcattaggctgagggctgcacctggggtgtcaattctcagatgcttccagctccctgagtgtgccacgagtgctgcacccaagctgttagggctgaagggacgtctgacaccatcagaggagaacctgctggagcaccaggctccttcctgttctgcccacacttcacattgggttcactgtgctcattctttaggatggtgctggtcatggtctctgggagacagagcggagctccgtctgctgtgctggtccaagcagagctggtgttcatcatcccgttccccccaccctttctagagcccctgagctgatgttcatcatcccgtccccaccaccctttctagagcccctgtcctgtggccagccttctgctgcactggttgctggcctggtgggatgacccagaccctcagccctgcgcatcccaagtccctacttgttgccgttctttttccaaccctggctgccgtggtaatccagtcgcagtgaagactgcgcacaggagcgtgttcataggagcatggagaaaggcccagtgaagcccctgattcccagaattatgcagtggcagctctgcccttcacagtaatgagggtcagatgatctggctggcatggaaactctttgtgatgcctgctggccttctggcacgagcagccccaagtgaccaggtggccaccatggctttggtgttgtgtggtagaagccttctccacctgtttgaaccagggcctctagatttgccagacctaaaattggggaagatgagcgcagagttcatactgggtttctggagcgatggtgagacaggccccttcttctttcaccatttcctccatccatacattttactgattgggcacccagtaccatcgattggccgttggttcatcttgaaatatggcaccccaaccccatgaagtgtatcaccaagccggcattttatct

SEQ ID NO: 136042 - DNA, 1076 bp, Homo sapiens
cggtcggttatcctgttagtctggcagccgcgctgaaggacaggcctgacccgcggcgggggttacatgctactggggaaaactgcctgagaatgtgagcaggagcgcatcggatccttgcgctgggcaaacttggcttgcataatttagattttctttattttagaaagaacacattgtcagctatttgggaaaaagcatttaaaaaaacataaagcagtgtcccagttataaatctttggcatctgaccacttttccaacagcagggacggaagagggacccgagtgttaatttgttatcgaaggtgccggtgtttcaaaggttcacggaaaactgatttctaaactctatttcagggattgaagagttctcttgctttaaaatttgcagagatctgatgctgtttaaataaatacatctttttttcctgctttggtctgtggatgtacaagagcacatacgttactgatctttgtggatgtgtcatagttcataaatttgcagccagattccagattttgggctgagtacaattactgacccatttgcatttcttactgtggaaaagtcagttaaaatggctaaaaagcccgttgtactattgcatatgttttaagaagacattttcccatgatctgtcagacctgttaccaacataatgcctgctttggagtcgctgatgatcccacttgaaaacacttcctgtgttacgtgtggcagaggcctcacaaacttagctcggggccgttcttgtgagtgtttcggacttgcatctgtggacaggttcagagctggagccggcacatgtgtagctacggagagggcgtctatactgggaatgcacactggcctctcccgggtgggagttctctggtgtggggcagtcgcccatctcacgtggggtccttgtacggctcgcacgccctctctggctcggtccacctggcgcggctcctgcagacccagcagggtccgtgccattgctcttctccattgcaggtgtttgggaatattgccctggatgatgacaccagcatcaaccgccacaacaacttccggacgtttttgcaagcc

SEQ ID NO: 136043 - DNA, 1053 bp, Homo sapiens
cactggcttcccctcagcaggcctttctggttcttcccctctctctgctcctcttttccaaaggctcttgatatctgccccagtctcagaacaggctgaagggaagccctgagggagatcatcctgggagccctgggccaggccggcctctgctgcctcgtctgtgctccctggcgacagcttgggagcctccggtgaggctccaggcagaggtctgggaggacagaggtgcctagcaggggctctcttgaagtgcgggcctccagctttccacctgcgcccttgttgattacagggattggtgggatcgagggcagtagggcaacagggggaactgaccagcagagtttgtagctactcagtggcccaaggaacccaactgaccagaactgccgatctgaacacacctttattttccaccatctctcatgggagctgccgttccctgggctcctggatccagccaagccaagtaacaggcagaacctggaggggccaagaggccatggcacaagcttcggggccttctgagatctcctggtggagatgtgccaggagaggcctcagcatcagctgctgttcctgggcgcggaacaggagctatgggccatcctggtttgagagtgaacttgggagcagaagggaggtgggtgaacatgttttcctgcctcctgagtctcccacagtttatcactcacgagcctaggacagaaggaaggagctcttttagggatttgccatttcagtccatgtgtgcaaatgcactgggctgctgtacagcccaccctgcctgcagatgcgcgctggggcgagctcagacccagacctgctttgctgagctgcctggagagacctcttagactcttgtttctttgcataacataagcaagcacccttaggctgacactgtccccagatgatgttgtttggctgggctttagctgctgcgttaattttatctcatcatttattactattctgcctcatgccgcggaagacttaaggcaaacctatgaagtcagccttagttttgaggcctttggtctcacagct

SEQ ID NO: 136044 - DNA, 1522 bp, Homo sapiens
gtgaccacatgtgcactctgtgcatgtgtacatgtgtgttgtgcacgcatgcacacagatgtctacatgtgtgttttgtgcacatgtgcatgcacaaggcgcgcacgtgtgtgcatgttgacgtttgtgtgtgcacatatgattgtatatatgtgtgcctgtgtgtatatgtgtgcaagtgaactgaatgtgcgtgcatgcctgtgtggttgtatgtggatgtgtgtatgaatgacatgtgcacctgtgtgtgcatatgcccatgtgtgcatgtgtgtgcctgtggatgtgcacatgcccgtgtgtgcctgtggtgtgcacgtgtctgtggtgtgcacgtgcctgtgtgtgcatgtgcctttgtgtgtgtgccaccgtggtgcgtatgtgcctgtgtgtgcctgtgggtgtgcacgtgcctgtggtgtactcgtgcctgtggtgtgcatgtgcctgtggtgtgcatgtgcctgtggtgcgcatgtgcctgtgtgggtgtgcatgtgtgtgcctgtgggtgtgcacatgtctgtggtgtacacgtgcctgtggtgcgcatgtgcctgtgtcggtggattctgaaggcacgaaactgttcaccctggtgctgcttttcccagccttcctattgttgttgcttcaaccctgtggtgtgaagcctggtgacttgagaggagaattgcagtcacacttcttgcagcaatctggctgctcatttctgtgtccacccatctgtctaataacatctcctgggcatctgccatgtgctggggcaggggcccaaaggtgaaacaggcacatgctgtcagaacactcagccaggcttggcagtgagaccacatggtgactgtagctcaaggccagggcatttctgaggaaggagaggccatgtctggcctgaagaatgagaggaggtgccatttgagctgaacttaaaggaataggaaggattgagcactagagaaataggatggattgagctggggatgggaggtggggcagagggaagagggaggccaggtggcttctgtcaggctggagaggagagtgcattgcagaggggctgcaaggaaggctgagaccgtttgagaaaggcattgaaattggttgaacaagtcgctttgattttgcgttgtagacagtgggctcagtccttgcatcgaggagtgatggtgtcaggcccacactttccacctgggcttgatgggcagggacagctggggagggtggggggtctcacgtgtgtccagccccccgtggtggtcccttggctgccacaaccttagcaaacatctttggtgaggccgaggtggggcttcctgtttcttcccttttacagaaggaaattcaacatgatttggagctgattggaccgagggggctacactgtaggagagaggagcattggtggtgatccaaggatgccagcctacgatgagaggaggtccttagctggaccagggcttccaggggaggacacagagtgttcagggagacagggtcagtcaggaggcaaatgggt

SEQ ID NO: 136045 - DNA, 1102 bp, Homo sapiens
tgccccaaggttaggttttggctgtacagcttcagggctccctgtttagttttctggtttgtttcagatcttctccacctttttagcctctagcctcacttggaagcaaatctgaccgtgaggaaagctgatgtctctgccgtggttctcagccactgcctcatctgccacctgaccccgcctgccagctcttctggcagggtggaccagctcttttctgattggcattcactgtgatttttaaaagagtaaaatcagaaattatcaacccaaagccgccccgatgcagcccttcctcacccctccatgttcattagctcagacgccacccccgcccactgccccgcgtggggctggagtgaggaggtgaggctcgggggtggggggccaggagggggtcaagccaagcagagaaatccctcattttatttattttgattttgggctttgaatccgacactttgattaactggctctgttttcttgtctgcttcctccctgcccctaccccgctcccctccccgctcccctcctgctgccgctcctcctgtggaccaccccactgtgccctggcctcgctgggacgggtttccagtgggcgcatcagttacaatgacatgtttgagatgctgaaacacatgtccccgcctctggggctggggaagaaatgccctgctcgagttgcttacaaggtagaccctgaccctgcaacccgccccccaggaggctgtgtgtgcttgctgaggggtgcttgctggctctcccagctcctctccctttcagggtgcccggctgtctgtctgccgctctgctgtgcgcccccggctgcctcactgtgtctttctcttcagccccatcccagcttccttcccagacagagggatgtggccaccatgatgtctcactggcctcttgtccccacaacctgagctgccccctttgagagccccctggaggctcaggaagacagaactagaccctcctccctgccttttctccctcccttcctttcctaggaatgaggggacagaccacttgtttgacagagattgtttttgttctgggctcagaacaaagccctaagcccctggtatggatggag

SEQ ID NO: 136046 - DNA, 1018 bp, Homo sapiens
ccagggactttctaggctccatggtggggaagaggcactgtggcactgagaaggaaaggggtgctggggagaggcatcttgctattattcctggggcctcagagggctgctggaggatggggatggcctcggggcccaggagtcatgggatgctgagttgccaagaagggggtaaatcgagggatgcctccaggcctccctcctgggtgggcaagcagatcacatggcccagccctaaaactgttccatctgcccagctgtccccagtcccacctcataccctccatgtgtaagcaccttcgttcccccagcacccacccacctactcaagagccctcctgaggcccccactgctctccggcaaacggcctgtggttcagccaacacgtgcctagagcttttctgatcctccctgaggaagactttcctgagtctgtctgaggaagcttcctgccagagctttcctctctggtgctgtggacagctgttgtccacactggctctgtgccctgactctaggtctttgtcacccgactcagtgcagcctgtgggagccaagtggctcctccaagccatcctcagcccctgccctgcccctgcattgtgcctgcctgggggttctgcatgcaaggctgtagctttgtccccaagaaggagagctctgtccacacttggcgccggggcaagcaggcagggccatgatggagcagcctttggagccccacccagctgtgctggctgactccaaggttctgggcatggagagaccaagggaggcctcagggtgggggcagaagggccagatgagctgaggagggtccaggagatgcccagagcactgcaccttggagggcccagggcagagacacctgtttgtttgccctggccttgcctcttggcttcttcctgagattcttggccctttggggcctggagtgggctgatggcacccctggggagggcagccctccagtgccctgggcggagctcttccttcttgtaaatcacctgcctgctc

SEQ ID NO: 136047 - DNA, 1015 bp, Homo sapiens
gggagacgtgagggagcgcaggaaggtgcccaactccatcttgtgggagacgtgagggagcgccgggaggtgcccaactcctccttgtgggagacgtgagggagcgcaggaaggtgcccaactcctccttgtgggagacgtgagggagcgcaggaaggtgcccaactccatcttgctttctggggaggagacacaggaagggccctgcattaagcaggtggggatggcctcagcccggtcttgagaggcctcaggaggagtcagggcagtcaggagggccaggtcagcatctggaggagccctaggtaggccaaactcctggtggccgagccccatgttctgcctgagagccctctgtcccagtgcatttccaggagtctttgtggggggcgagggaggggcggctgtttcctcaccttacttccataccttgtttccgtggatcctctgcccccttctccgaatctcaactcctgtgttcttttccagctgatgagatgacagtggggaaggtttatgcagctctgatgatattcgacttctacaagcagaacaaaaccaccagagaccagatgcagcaggctcctggaggcctctcccaggtagctggcggccctcagttttccaggaaaactgtgatgcctccgaggctctggcatccttcggggggttgacgacgggggagatgcacaccattcttggaaaaagtatctcagaaggaagatgaaagattcttgcagctacctctctggcccccagagtcagaaactacacacagcctttatgctttccatgagctggcggtactgggcagctcctgacatagaaagtcagcactcagggccagaagttgagggctgggctgggcagtgtcatggttgttatggggtggaagagaagaagatgtgaagaccatttgaggaggattgtttggagaggtgaaaggagaactgttttcccttcacacagagagcaaagaaattcagataggtacaggatcattgtctgttctgct

SEQ ID NO: 136048 - DNA, 1094 bp, Homo sapiens
tatcacttaactcttgccacaatatttccgggtaacaaatcacccagaagcaggtgacttacaagaaccatcactttttcccactgtggcccagaaaagtgtgctcccaaatctcaggacccagatcctgggggctgactcccgagccgctggcagccccccattcccacactgctttcagcatgctgttgaaaaccttccttgcatttaaagtcctgattctgactgtatgtgcaggtgggaggagatagtgaggtgtctggggtttatctaagccaggctttcagcaggaaattgagcttctgttatttctgtgatggtagtttctacctaaatcaattacaactccaagtcagagagcacccactcagactgggtctggtgagggtatttattgagccatttagtgagcgggttgagcacacctctggccttggacgtggtgttatttcagggttagcggtgcattaggagccagctccggttctcctaaccacccctcctctcagcaccagcctgccactgcggccgctctgtgcctggtgccagcaggggctgcagtgccccagacagcatggaaggagagctgcttgcaactctcagaagacaaaggatggggcttctcagaagccccagcaaccaccagtgtgtccttctgccatctctgcgtccactgctgtggtcagggtgtggtccatttagactatcaggctccagtctgagctcagagtgatcagtgccactcaacctgcatgactaagaacgtagtcttcagtgtttcactgaatgtgagaatgagcactcacccgaacacattccacgccagttgggagataagtgatgagaaataccagtgcggaagtatctccgggtggggctgttggggcaggcgtatggggagcatgtgtggggtggcctccgccagaaggctgcaccccagcagagagccgagggatggaagggctcattgtggcttggggggggggtcagagaagtaaggaggagccaccagcaagggacccctgagggaggaagcccctagaggaggaagcccaaagagtcccgggcgaggccccctaccccccgtcccagcc

SEQ ID NO: 136049 - DNA, 1100 bp, Homo sapiens
gagcggggccggtcccaggagcggaggcagccctcatcctcctcctcggagaagcagcgcttctactcctgcgaccgctttgggggccgtgagcccccgaagcccaagccctccctcagcagccacccaacgtcgccaacagctggccaggagccgggaccccacccacaggtaagaggaataggtggagaggtcagggcccagctgcctctcctcggcccagcacccctgtcccacaggctcctgcctctccccagggcctcgctgctgccctttgtcattcccagcaacccaagggccgggcgctcccctctgtgccctgtcccggagcccacgtctgcagcctaccccagctgtgttctcatcaagctcctgcctgggtcaccctgggacagtggttctgcgtcctatccactttcggacctgggcccccaaatacttacctctctctcggtcacttaactctccttccctgactgtggtcgttgggcttttgttctgtccttttccctggccccagcctgtcccttcccatcacctgctctccccaaccccattcctgggcctgaccctgaccatcgccctcccccgcacacaggtgcctgttgcctccctggtcaccgcagcccgttgtcccccattgcctccctctctcctcccatccccccaggcacctgtgtgtgatgtgctctgtctgttggttcggcttttttttttttttttttacctctgatttgttctggtccattttcatgtagggcagtggttccgtgaatgggagccccttgctgtcaacatctggtgctagcacccccggccgcggtgggcggaggcagctcccccagacgcccctgactccccgccccagcatcacctacaagacggccaactcctcacccatccacttcgccggggctcagaccagcctccctgccttctccccaggccggctcagccgtgggctttccgaacacaacgccctgctgcagagagaccccctcagccagcccctggcccctggctctcgaattggctctgacccttacctggggcagcgtctggacagtgaggcctctgtccacgccctgcctgaggacact

SEQ ID NO: 136050 - DNA, 1149 bp, Homo sapiens
atccacccgtgtacaccacaatgtccccttcgtctgcaccgtcctcctgtctacactggcaccactgccccatctataccaccacccgtctatacaatccacccatctgtctacaccatcgcctctcctctgtctacaccatccttctgtcaacaccggcaccactgccgtatctatatccacccatctacaccatcacctcccctgtgtctacaccatcctcccatccacaccagcaccaccaccccacctacaccatcccaccatctacgccattgccaaatctacacagacgacctcactcccatccacgccttcacacgcacacccgtccacaccaccatctcccccgtgtccgcacggcggccccgctccatcggcccgagaacagcgacggtggctttgtcccacgcgtcgggtctggcccggggtgcccgaggagctcagggaccgtgtagcccggggtgcggccccccagagggtgccgtggtctccatttggagggcctggctgcggcgctaggagttgggacgcagggatctctgcagcgccctgacctccacgccctcctaggaaagaccacgctgatcaaggcactgacgggcgatgccgccatccagccacgggaccagctgtttgccacgctggacgtcacggcccacgcgggcacgctgccctcacgcatgaccgtcctgtacgtggacaccatcggcttcctctcccagctgccgcacggcctcatcgagtccttctccgccaccctggaagacgtggcccactcggtgagcgtgggacggccggggatcgggtgctcggacacccattcggcacgggggctgggcactcagacacacacagccaggggtcgggccctcggacacccactcagcccaggggccgggccctcggacacccactcagcccaggggccaggccctcggacacccactgggcacggggaccaggcactcagacacacacaaagccaggggccgggccctcagacacccacccaactcggggccggaacaacaactgcctcctggggctcagacttagtgtcccccaagcctcccacgtccccgggcgagaggctgagcggttgccccagcctcaccgacactcagggccatgttcttgccgccgtga

SEQ ID NO: 136051 - DNA, 1398 bp, Homo sapiens
ttatttgtctatgcccatacattaacacctgtctacacccataatctaacatccatctgcacccatatactaacacctgtctacatccatctacacccatatattaatacctgtctacatccatctacacccatatcctaacatctctctatacctacatattaacatctgtctacacctgtattccaacacttatccatatccatattgtaatatctgtctgcaaccatatcctaacatctatctataactacatattaacatctttctatacctatatgctaacatatatctatatccatatttaataccatatggtaacactgtttacacccatgtatcagccccgatgtacacccatatcctaacatctgtctctaagcacatcgtaacatctgtatgtacgtgcattcgaacacctatctgtacccatatattaacatccgtctttacccatgtgctgatatctgtgtgctccatgtcccgacatctgtccccagctattactgtctgtctgtacacacattttggtatctagctgcatctgtaccccaacacctagctgacggcgtaccccctgccctgccttggcggggccctgagcatgtgctgtctgtccccgcaggttctggacgtggcatgacgagcgcttcctctacatgctcatggagtacgtgccgggcggcgagctcttcagctacctgcgcaaccgggggcgcttctccagcaccacggggctcttctactctgcagagatcatctgtgccatcgagtacctgcactccaaagagatcgtctacagggacttgaagccagagaacatcctgctggatagggatggccacattaagctcacggactttgggttcgccaagaagctggtagacaggtaagaggaacgtgaactccgatggaatctacactgcttggcaatgagaaaggtggtggtagttgtggcaggtcaggcagggaaagattgggaaccagagtttaactctcatgtgtaggagacacttgcaaccagggatgagagagccaggttgacccacagctcgttttaggtgggctgcgattgctggcaaagagccagtgggcaggaagtcagtctccttcactggcaccgtggaggaaatcagaacaccacatatccgctattgatccgaaatgatgaggaaatgagtcatatccaagtttgaattgccctgactataaaatagatctgcatcgaataggatacaatatctcttaaaattaaatgccaggtgctgtggctcacacctgtaatcccagcactttgggacgccgaggtgggagaatcatttgagcccaggagtttgagaccactgtggacaacctagtgagaccccgtctctacagaaatatatatatttaaaaaaa

SEQ ID NO: 136052 - DNA, 1030 bp, Homo sapiens
ctctgtttttggaatttcttgaggtagttgaattagaagcacttggtttttcaattatagtcttataagtcaggaaaacccctttcagtgcattgctttgtacattgataatacgaagcagcatcaccggcatctttgagaagcttctggaaggtgtgagggacttgtagaaggtatgcaacacctgtacaggggactcccagatttcttgggaattccattctgttctgcaccgtgggatagatgataaaatagcttgttttaaagccactaagtacagatgcccttggaggctgattttatgaattcaaatgaccaggggcatagaataatggttaagggtgtaggctttgggatcagacttcccaggttcaaactcttatcctgcctcatactagctggatgaactggctgaaatttcctactgtctctgagcctcagtttccttattgtgaaaaagaggataacagtactaatcccaacataggattacatgagcaatcctagttggataactgaatgcttagaaccattgtctggtcgtaggaaatgctcaacagaaaaaattttttaaaggtacgcaaaaaagccactttgtgccatgtttcttttcccttgatgtaaataatgaaaaattaaatccagatacacaagaaagcaggatagtcacttactaaatttttttccttatttttacaagatgttttcttgtgggattagagggtagacttttcaaagaggaggtggcactgcggttggagaaacatctggctgaaggagggacaaatagacattttatttgggtaattactcagaatatagaaggcagttttctgtgcttgagaaattccctgctatggtgagagaaccttcttaatttttgttttaaattttattatgcatgacaggctggattctctttaggggtcttctggatattgggtttgctcatataatttcacacgaactgagttattccacttatctgtgagcaaatctcatacatttgattttatgaatataatttggg

SEQ ID NO: 136053 - DNA, 1049 bp, Homo sapiens
ggtatcaagatcctcatgcctaagagccccattaagcaggacgcagtgaatggctttcagagtgagagctccaaaaaactggaccccacagagcagggtcaggaggaatggtagtacccaaagtggcagcggaaaagccagacaaagctttattgggccctggtactgagcaggccaggatggggagcaagcctggatacacctgctagtgcctcaggtgcatggccccgtaagtgcagccatggccacaggcctactcgttaacaggaaagctacatctacattcatggatgcattaacagccagtgggacaaccaacatacagacatctgttacagcagtaactgtcagcaaaaggaaatttattgacaacagaagagaacagccttttaacaaacgattgcatttcagtgtgaggcaaacagaaagtgcctaaggatacagagttattgtggccgggacaaaagatggcttcacccacatcttattcactagatcaacagggaataactcagtaaatacagctgtaatgaaaaaagtctaccagctctgacaaccactgctgattacagcaagcttgtactgctcagcgcctttaacagtgtcttctgttgtggacttgactttatttattttatgcagtgtttgacagatgacagaaaaagagaaagcattaaaatgggagaacctatcagaaacgtcgtgaataatctatggccatatcactctgaaagtgacagaaaaaaagaaagtgttaaataggcagaagctaacagaaacttcgtgaataatccctggccataccacccgaaataggcacgatttcttcggatatcagaagctaagcagtatctgccctgtatagtgcatggacacaaggaactttgtgaatactattactccgttcaaaaaacctgttactgaagtaaaagaagttatctgaaacatcatgaataatctatgaccatacgaccctgaatatgatacaaaaagagaaagcattaaaatggcagaagagaagctaccagaaacgtcgtacataatctacg

SEQ ID NO: 136054 - DNA, 1058 bp, Homo sapiens
aatgccgaccatgattaatgctcatcagaatctatgtagacctccatttgtcctttgataagctgaaatatttgtgtctactttttaaaaaacctgttgcttctctttatggtaatactcagaaggcactcactgtgaagagaggagaaacaggaagtagaattttttactatctagattgatgcacctatctcccctctccagagaccaatgcatttaggccccagtaagaaatttagttgtaatgaaccataaagcagatgcagagtatatttgggaatataccttatctgactccacagcccaacccctttaagaggaaagagatggcacaatatattttgctttaagccttagactggtcttgacttcatattggaaccactgaattgcttcagctgtgaactggaatcctctcctgtctttgttgttgagtgatgacactcttaattaatcatttgcttatttgccatccaaatcaccctatataatctttcagaagtgtatctcagagaatgaccctaagtcggctgacctctgaagcctgtaccagaattgactttatttcttaagcgcacacttcctgtgctttcaaggggcagctgtctaggtttagtttctgggagtttgaggcacagaggtatgtaggggaatgggaaggccaaatggtaaaagcccctgggacgtggaatctgtgagtacactaaccttgaaagagattatgaaaacaaactttagagcattgttgaagcaccatctacataatttatatcaatgaagacagtaacttattaggaagacaggattattaaaattaaccattttcatctttctacaaaaataaaaatcaaatcaattttagttcagataattgtatgtgaagctttataagtgaaaatttgaagttagcaaaattatataaccttagttaattatattagtgtactcaaactaaatatagaataagattagctcatggaaacattgcatttttatctcagtcagtactgctcatatccacccagtagttagtttctagttacgttttgtaatttttt

SEQ ID NO: 136055 - DNA, 1009 bp, Homo sapiens
ttggacaacaaatatatttttctgtatgggtttctggtggcccagatgttcattggagtggaaattctttctgtccacaccactgagttgggcagttactggtgtttggctttctctatctcttggagttgacttagatacattgtgtattcaggttgggcactcatcccctttgcaagctctattactttgttccatttggctttgccataaatgtttgcccttggcttgccaagacgtcagctttaagagatatgtcatttaacttagaactcttgagtctgacttaaaattaagtcagttttcttaaacattgttattgaggtataaatgacatgccacaaaagtcacctctttgaggtgtaccattcagggatttttggtaaatttactgggttgtgtagagatcaccatgatgcagttttagaacattttcaattcccaataagatcgctcctactcggttctcacccatttctgctcccacctccagccacgggccaccatgaatatccttcgtgtctctatagattccccttttgtggatattttagagttgtgcttccaagaatgagtatctctgtgcttggtcgaacttcccggatggtgagacctgatttagtgactttgccttccgccccttcatccccaggagaggaaggtggggaaaggggaaagacggcaagtatagtagtataacaggcatcgtgcctcagtttcctcatctgtaaaatcaggataaccatggactagtttcaggctctaaatgtgaaactctgtaggaagtaattagctgggaatctggcatagaggaggagctcattgtttgcgtgttaacagtgggaaatagttaaggaggtgggaaaagagctacctgtagaaaggtggcctaagtccctggagagctgagcacaggaccccagggcacacacccccttatgcttcccctgtctttcatcttgaaagcacctgcctgtgaacctcaggcttggagggaatctggatgttt

SEQ ID NO: 136056 - DNA, 1591 bp, Homo sapiens
ttctatctctatagccagcaccttaagaataaggtgtatgaaagccaaagggggtattgaaaccacctttgcaaaagttatatcagtgagagaatgatgacagtgaaagagatctgagctaatccaccccccatcttgcctttctcttaattattcatttcccttaattattgcatttcccttagttattccatctcccatgtggtgtggctggccttgtgtctgttaaactctttctctactaaaatgcccatggtctttatgcagccggcaggaagaacccctcaggcggttacagttttgctcccaggggacagttttggttgttataaatgaggaaggtgtgctcttggcatctagcaggtagaggccagggctggcctcctgaagtgcagaggaaggtcccctcctctttcaagagagttatccagccccaaaaggtcagcattgcagaaattaagaaaccctgacttagaagctttgcacctcgtggtagctgtaaatgaggtatttacatcctccatgaagacgtaaggaagttgaaggaataaaaatctcatggggctttgaaagcaatgcaagcatcttttagttttcatacattccatggaagtagggatttttttctaaagcaaaaagaccaacaagactttggagctcagtttagaagaaaaaagtgactttcaaaccctttagaagtattcatttacaaatgaacaatgaaatgactgtgtagatggagaaaccctgagcgccccttggctttgatctggtggtcacgttcatccgtgtctgttccctgaagaaccagtgcccacatttgcctgccttctttacctaactccccccaacaagagctgaccctcctcccatcttctcgcctggttggtctttttcctccctccccctgaagcctgcctgcctctgctttccaccctccgacaagccctgatctgtgctctgaacaaactcctatgcgggtctctttgaagtctttttgcctgcccctaagtgcatccctcccacccccacccaggtgatactgaatctatgtgaatttgtggagttctcccttccttcccctctggcagaatcaccaggattcagtctagagtacaacattatagatgttttctagcacttttcagctgtccatacgctaatatgtagtcttgggtctttatccgaatggagtcctattatatttgtttcacaccatctgctttccttatttttgtatctttactgaggtatattgaagtacagtaagctagacttgtatgaagtgtgcagttttaatctgttttttcttttttatttctttgtttgtttacatacattttttagagacaaggtctcactatgttgcccaggctggtctcaatctcctgggctcaagcaatcttcctgcctcagcctcctgagtagttgggactataggcgcatgccaccacacccggttaattttttattttttgtagagatgagggctccctatgttgcccaggctggtctcaaactcctgggctcaagtgatcctcctgccttggccttccaaagtgctaggattactacgggtgtgagccaccgt

SEQ ID NO: 136057 - DNA, 1054 bp, Homo sapiens
taatgttgcttatggtttgaagcatcaagctcgcatttttgtgtagtcgaacatgtcagtcttttctttgggcttctgggcatggcttccttccagcaaggggcagataccaagaataacttggagtaggtgaggcaggttttgatgttagcaaaactcaaaccatgacactcccccaaatgggagtctgccctcattgggcctaattgtgccctctgctgcagatgctgggatggccttctgatgggatggccgggctgtgttgtcagcacccgcccacatgagacgagtttgtagctgtgcctggtgccaagagctctgaggtgctactatgccccctggaacctttgggcaaagcatagctagtcatcaggcttgcctttcacaggcaaaccaaatccatcctttcttcatccccctgccctgccaaaatcaaccagtctcaaatcaattcacgaaagggggccaatttgcctttcgggtgtctgatctaacaagccttggagcagctaggaagctaccagaagatgtgtatgatcaatgtatttgttatttattttattttatttttttaagtttggggaaaggtaatacttttggtcaaccatctgaagggactccctcctctaggccagggcactccatagttaacctgaaaaactggttcagggcatgacaggaagggggtttgaacatgcttcattatgccctcctcccttttggaattcatgaacagccgacagcatttaacacagaccttaagtctgataagaaacagttacaatctattttctctgaagcctgctacctggaggcatcatctgcgtgataaaacctaggtctctacaaccccttatggtacctggacatttttttctattgataatagcttttttttttttattattgagacaagtgctgttgcccaggttggagtgtgatggcatgatcacagctcactgtagccttgacctcctgggctcaagcgatcctcccacctccgcctctctagcagctaggactacaggtgtgtgccaccacacctggttaattt

SEQ ID NO: 136058 - DNA, 1107 bp, Homo sapiens
ggtttctgcctctatggatttatctattctggacatttcatagatacagaatcatgtgatgtgtgaccttttgcgcctggattcttacttcatatttctgagtttcatccatgttgtagtatgtgttgttctagtttcttgtaaatgttctgtcaaaaccccaggtgattaaggaaggtggaacaatgttctgagataagtcagccagagacacaggctgctcctccctccaattacatttaaaatggaaaatcgttcacaaatggaacattgttcataaaattgtttatagttcagcttctattctagcatgaacggtaattttctctttcgcatttgctgtagttcctccaaatttctcccactttcctatacctaaaggtcaacgtagaaaacaattttcgtcagctagagctgggcctgcaggtctctcttgtgttgcatcttttgggtggagtcagaaggtcctttcttggtgtaagagttaggaagcttgcatttcccaaaggggttgtgtggtgttccttccagagctgaggttgtgggattccaagcagcaagacttaggctgttttctacggcgtccccaaagtcacaaccctgactgatgcaggaacagaatcataaggttgtttacttttctgaatttatcaaaccttttgtctgtgtttgaccaaaattacttttcccgggttgggttggagaatatggagggtgattttctgaaaccattcatgggacatgattttctggggcatctgtacctgcaatgaagggcttactgataagactgaaggccattgtactttactggttggtgttataattgatcatattcatttcttgtcctactgtgacaagtgactgcacatttactggcttaaacaaaaactattatcttacggttctgaaggccagaagtctgaaatgggtctcactgtgctaaaatcaaggtttagcagagccacaactttcctggaagctctaggggagaattggcttccttgccttttccagctcctggagactggccgcattcctgagcttgtggccccttcctccatctgcagaggagcagcgtagcacctctctgactgtccttccata

SEQ ID NO: 136059 - DNA, 1330 bp, Homo sapiens
ttacattgggcccatccggaagatccagaataatccccacatctcaagagacttaatttaatcacatttgtaaagtcccttttaccatataaggaaacatattctcaggtcccagggattcaggcatgagcatctttgggggccattattctgcctactacattgtcagtcttcaaggacagacttacttcctttgtttctgtctcttaatttgctcctctgaagcctgcaagattcataggcttatgtaacgtttgtgttttgtctctcgaataattgagaaatctggtactgttgagccatttggtttgtattgctcactcactgagtcgattgattggttggttgattgagtgattaatagagacagtctcattttgttgcccaggctggtctcaaactcctggtctcaagcgatcctccctccttggcctcccaaagtgctgggattgcaggtttgagccaccatgcttgccctcagtattgattccctctgaatgagccaggatttgctttccattttggagagcccctagattgctgaacagctcagagacacacttgtgtattgaggtcctctttcctgccactcttggttttggactttatcagggactctgccagagctacttttctggacttggagtctcagagtctgtgtcagctgtgggtaaggaatgagaccaccatgaagcaagcagaggtagcgggtggggcctggcttccaggactttgcagatgctgtgtgtggatttctggggcctgaatcaagagcccctgggtttgtggcttcacagaatggtggaggaagactggtggagttaagggacagaagactcaacaataattagcttgttaatcagcattttggctcaaaaatagtttgggagtatactggtcagctttctgccatgctaatgttgcataacaaacagcccccaaattcagaggcttaaatcgtttctttcttgctcactagtcatggttagctgtgtctctcctgggcttatatgggaataggaaggcctggtcaggttctgggctaggcttagggttgaaatgatgtgtctcctcatcaggggaccctggggcatgttgtttgtgcctctcccatcaggtataggaagccaagataaatcatgcaggcacatttaaagtctctgtttgtcactacccctaacatcccattgaccaaaacaagtcccatggtgaggtccagcctccacgggttggggagggctattctagtctgaaagccctgaaaagtcacatggcaaagggagcagccatagacttccactatgggaggatggaagagttagcattgcag

SEQ ID NO: 136060 - DNA, 1093 bp, Homo sapiens
catgtgcgtctgacataattaaaggccgacttagaccctatcagagaaaatcaagttcagacacttagtctaaatggaagtaaggaaaacgattacctttatctcattatcttagttctctttggaagatatataagcttgaaccatggtgacaggtgttgcctttaaacatggtgacaggtgttttcctttaaagtccttggcaaatcaactcatagacttcttcaacttcaaaaaaaaagtttttttaaaaaatattttaaaaatatttaacttgaggatcttcattgaaaattggtcatctttcgtgaatttgcttaagtaggctttgatctctttttaaaggattccttcctgcctgatacatttggtccttttagaattcgggctagaacaattctccatgaaggtggacgtgttaaaatctatttggttcattgttaggatcactcacattacaagagaaatttcggtcttgagtttttgtttttgcttatttgctttcttggaaatgtttccacatcaggtcttagaggagttgtaaaacaggaaggaggagttgacatgctgtttcataaccaatgcttgcttctcgccttggatactaacattttttccatccatttcccacataaaacatggagacaaacaccagagctgctcctgagaggtgctgagtcataggaattgaagggggctgttgggccctcgtgtgtgggatgggctcaagagctatcagtctacagagggaaaggttcatctctgtccctcattgcctgcagtttctctttggccctggctttttccgttcacagctgccctcgacgttcattttaatcaaatttcacctgcataaaagggctatgggcagagagtcttctctgtgatggagcgcagctatcctacaagtatgtagccctgatttagtagagaagaggcaggaattgtcgagggcggaggagcaggagaaatggtgcacaagggagaggggataatgacaggtcattcagggatgtctacggaatgtgaaaatgcagcaagatgggtttcggtttctttttttttaggtccgacagagattcctgggatagct

SEQ ID NO: 136061 - DNA, 1154 bp, Homo sapiens
cagtcagactgacgtgggtttcagtccctacccatcctagtggtgtgaccgagagcaagttgggcatagtgacatctgtcttgattgactttggagtttgacaggcagtacatgcaaagttctctattcccatgtcactcagagtgagtgtgcaaaacatactattgttggcatccatcgtcataagagtcactgtgaacatgggtgagcttagcaccttgtggcacggggctgtggtgagggactcagacagctttatgattgagtttgggcctcagcgagatggcaaagctatgcttctcttgctccttggaccatggtgacctgtgaggacccctgggggctgccttctccactgttgcagttcagggagctaaggccaaaggctactgcagtggtggactctggggtccccctggtgacaaggaagggactttgagctttggaatgccctgggctgagtcttgccacctgcaggtttgtgaacctcatcatgccttgtttttagcacaacaaaatgggataatagtgactttattattgatatactattatgctgttttcaggtatgtgacactgctgctattttactgtttcttccagatttccgtgagggtggaagaaaatcataccatatcagatgcctcgcagagcaccaggcccaccgtgaaaggtacagcaaattttacttccctcttcttgcctcgttggaaattctttcctgtgagatttcctcccctccgccctccgcgccttctgccatagcctatagcctcctctgggagttcttggataattttgttgccttatacctttgcaatttccagtatggtagccatgcgccacatgtggctgtggagtgcttgaaatgtggccagtctagattgagatgccttgtagaagtataaaatacacactggatttcaaagacttagttcaaaaagaaagaaagcaaggtatcttattgataatgtaatacagtttacatgttgaaatgatcacttggatacgtggagtaaaatagaatgtattattaaatgtaacttcacctgttttcttttgacatttttttgtggacccagaaaattgatagacaggtggatttccttcacacttacacacttgtcttgctcaagaccagccctgcttcctca

SEQ ID NO: 136062 - DNA, 1032 bp, Homo sapiens
atttttcattgcaaatgtacatttcagttacgttgtgggctttaaaaagcctttctaggctagttgggaatttgaccctattttttacagcatagtttctaggagaaaaacatttctgaggaagtaacaaaagaagacttgggctgtatcccatttttaatttagagagcactgtcatttgaaaatttcttctctcaacatgttttctttttgagacatgaagtaggcaggcaggatcttttttacagtggcgctggtgtctttgggaagcggcttccttggtttgcctttgctcattttctttcttgacttctccaggcattcagctgcaggcatgtacctctgctgctgggagagtggcaaggagagggggttggaggaacggggataaaaattagctagaattcaaaaacggcagtgacagcccagatgatttttcatgctaacctactttaaaagctgccagaataattgtggagtgggaaatctctcatttctcctgtcctactctgacaagatctaaaaataactttgaggagatgggcatgtggccctttgatctccttggcctggagtatttcttggtaggagcagagcttacaagaaggtgttcttcaatgagtgttctggcagtcggagttgtgggtggggctgattactgtaatcttccttcgtcattgaacgatttcatctgcccctggtttccattacttgctgctctaaatattcctctccccgcaccttccttttatgtagccacaaactggaatatgtgcatggaaaacccaaaggaggcaaatcccacttacactgcagaactttggtgctggatttagcggctatttaccaagcacctcctcttccagaataagtagcacagatctttgaccgccccccgccccccaccgagggactgtggtctagttggaagacacaaggcagaggtgtaaaaagggaactctggagataggaattggaaatggggctgagagctgaagagatggcctggggctagagaccagggagatggga

SEQ ID NO: 136063 - DNA, 1540 bp, Homo sapiens
ggatgatggttccttggaccagggtgtggtcaaggagctggagagatgggagtcagttacagacaagacagtgggatttattgggattcttgatttctctcagtggtgagaaatttcgtctttccacacaccttccatggaaacccggaacaccatgggtcccccgtaggcagtcttaagaggatagctgtttttgttctccttccaaattcccattagacttgaggtcagagtcacactttacttgttttgaatatttaaagtagtatacctaatagctcaatagactgtatgcttttatttttattttttgagcctgccttcctaggtatttggacaaatttctccataagagaagtgaacacgtaactctaacttgtaatagcaaataccgcgggaacactgggagccacatattaagatgttattagaccttccctggagtatccaaatggtctataattgcttaataaggagaagtttttgctgagatttacatgatagagatttgctttttaaaaagaaattatccagatttgaatggaaaaattgcatagtctcctgagtgttgttttgcctttgactttgtactgtttaagaactgattatgagcaggaggaaataactcacttcagctgtaatataaatgtgcattggtatttaagcatatgtgacacataaaacaataccaacttggccagaatttaaatgtttatgtaaattacatttttggacaggcactttcctctattttgcagagaaaataattttttcccaaagagattttgtgtttaaaaaaaaaacccctaatactactattaggagtgttagatgccttcgatgtggttttctttcctctttttgcctgaaaggcttgagtgctgaagcatctagcgctattcttgtgtccgggaacgttcctgcctcatttttgtttctagtcttgtttctttctgtgtcagaaataagactaatgcgtgcagctgcacctatagttcaagatgaaggggtctgtgtgagagagagaacgtctgtgcatgtgtgtatgtgtgtgagtgtgtgtgtgagagagaggagagacgggcgggggaggggagagagagagaaaagagagagagagaaaaaaaaacacagcctctttgtaatacctggttgactcagtgaagtctggctctctgagctttactgaattcctccttacttattttggggccggaggtggagatgagttcaaaagtagataaaatttgcctgttacctaaatgagcagaatagattgcgcataatcttttctagatgaagcctgtgtttttggcattctgctctcaagtcctctgagctgatctgagagtgaactggagtgttaagttgagagagatgttgatgactctggtgtggtcttttcctttcggagaagtggaggtgaaacgacttgcccggggtccctgggaagcagagcttgtgccaagatgtaatttttcggttctaagccctgtggtttttcttctgcagcaaggtgggtaccctttttctgtaaggg

SEQ ID NO: 136064 - DNA, 2201 bp, Homo sapiens
ggcatattgaaaaatgtgctcttacagataggtttcctctctctactgccccccgccccccaattttttttattgtggtaaaatacataaaacagaatttaccatcataaccatttctaagtacactgttcaacagcattaaatattcattacattgtgcaatcctcaccacgatccatctgcagaactttttcatcataccaaacagaaaactgccccattaaacacaaactccctattcttccctccccacagccccagcaaccaacgttctactttctctctctatgattttgacactctagggaccttttatatgtgggatcatatggtatttgtccttttgcgtctggcttagcacaagtttcatccatgtcatagcatgcgtcagaatttccttcctttttaaggctgtataatattccagtgtatggatggactacactctgtttatccactcatctgtcagaggacacatgggtggctttcaccttttggctgttgtggataatgctgctatgagcattggcatatgtttacttctcattgatttaagtttacatagtcatgtgtggctagtggctgctgtattagacaggacaaccctaggcctgatagccctgaggacctagtttgggtgggaagacaggggtgacctgcagcgagttgtcggctgggggccttggtgagagccagatctgggttgtgaggccactcgaggcagggggaatggtgtggcgggaagtgaggcccaaaatgagaatttcagagttgaaagctttggaagtaacatgatgctctatgactgtgaccagactcaactgcaccaatgtgcatctgagatcaggtcattggcgttgaaatcgtgaaatgctcactgcttgggacgtttgcactgtgcttgatgtctggaggttccgttaatgttaaaatagcaattatgggactggagattaggtttaatgtctgggttttttccactgtcttcaaaagcccgggtcttagtagtaaccatgctgctccccattttagtaatttcagcctggtttatgttgctcaatagcagaaaagcggttcagatttcctttggatatcatggaccatatgtttgcccaggtatcctttcttattgggaactatcaaatagttaacacagatttctccaagggcaccgactgggaaattagtttaccaaagataaatttggtaaaaggaaagtttttatgtgcgctatccttaaactaagacacatctgtcgaaatattaggacgtgcccagtctcccatcctctgctgaaactttagactgtacgtccttcagatatcttctctttggtgctttgtttgggaacagattagcctcatacttcctcgcttgtaaaactgctatcccatctcttgctcaatgcttttcttgtaccgaagggtgagggggaggttccagctctgttttctgtatcagtttcctgggtgatgtttgtttgagggtgccttgtgtccagagccccagaaggtgtttccgttctctgatgagcctgaagtctgcatgcttcgcctttggtagggaaaggcagctggggaaaggttgcatggcccagtgccagggtgccagagtgcgtgtgcacctgctggggagaagcccgctggggcccctcctctcagcacaagatgaggcctcagggcagtgcagcagatggagggcttagctgtccttgccagcaaaagctgctgggaacgtggcactcagataacaggacggttgagaagcggtgagttagggttactctgatggggagatactgagaggaggggatgacaatcttgatttctgttccctttgtgaatcttttggtggccaaaatgaggaaaaggatacattgtgtttgaggacaacaaggaacatctaggcacattgcatacttgattaaatgcacaaagagcttcttgtgacctttatcacaagagtgtggttctatgaaggtcgtaggtacaatagaaattgtgttggtctgagagttactcagattagggtgcattgtgtcaccaccattttgcatagctgtggcaccttgtcaagttaaccttttcctgcttgcttttcctaatcagaagaatgaagttgaccgtatgtactctataaggtggttgtgtgaggtcaatgagattacataggcaaaatcttggtgcaggggcacttggtaa

SEQ ID NO: 136065 - DNA, 1699 bp, Homo sapiens
gttgtggccagagccatacaagtgttctgatgcccctcaactgtgttgaaatttgtttgaggccaaccaagtcagctggcgagggggaaggcaagccagagagaaattgtgaaccagaaaggccccacctctggcagtggctcttccattggagatgaagtcttcttgccctgtttttctctttaaaaaagtgagccatttcacaagggaagttaaattaaaaactgtgcttgttagcgcggagctgggacaaccgagggaagtgatgccaaaggcaattgttggtctttccttcaaatatgtgctgacttaggaagagcaaaatgttttatattaacaattaacaaaagactaagtctttcatcacaaacaagtctaaattcagtggttaggtcagtattatattttcctatagttttaaataagatgcttatgtattcactagtgctttggatgttctttggaaaaatctccaatttagtgacaagccccaggaaatattactcttagttggtccagcatcctatattgtttgtgaaatccctcttttattgtcttttaaaggttgtaaaatgctttttctgtcaataatcagagaaggatgccgcattcatattaccccagtttccaactcaacctctcctttccaattgaaaacaaaagtcagaattcactttttgttgtggggcattaagtagtaagcaaagagatttcactcgccagggaaaagaaggagcctgcaaatcagacaatatcaaaacataaccaaaccatataaaaacacaaaaatgttgcttggcagaatttaactataattaattgtactaatttaatattgtagacacaaatgatcataaagccatatggtacaatccttttgttcatgaatttcttattcatcaaatgttaggtacgtgatgtgggaaagccagtatgttgggcttcgtgctaccagggctagagttgaccagttcagctttgtttctccagtgaccaaaaaaaaaaaaaggtatctgccttgcacatgaaaacactggatggttagattggatttagccaacaacaaactgcaaaaatcggttctggctaactgaagctcacagggtttattagagttgttggagcccatgggaactgatggagggcaaggaggcttgtcgtgcaggagcagcaggaaccaaggaagctttgcagagatgagaaacaaaaaacagggaacacagcaacatttgctgtgtcaggaacgactgccactggtggcctggacaccatcacagccgcagaagatacttaagacacatttctgttctagtgttggtagttcaagattcaaagtatgtgtgaaagtgagtgtgtgtgcataggcagagtagctaattggttgagttggggtccatgtgcccacctccaggttggaccaggggacaagccatgcagcgttttggtcacccctcacttggcagtattcccaccaggaatgaccctcgctaggatttgaggggcctggagtcactacttactaattttcttaaagttgacaacgatcacaaacttcatggtctgggaaaatgtgaattaattgcctgatccaccttcatatcttttttcttttcttttttctttttttttttttttaacaaaaatctgtatattcatagattgtctcttcctctgctagtggttttgcagtagcattttc

SEQ ID NO: 136066 - DNA, 1398 bp, Homo sapiens
cccagcattttcttttagaatgggggcatcagagttgaaggaggtaactgtgggtagtgtgtcttgtctttggaaattttcatcatgacctgagcttgtgaacactctgccttggccccgcctcgcactttggaagagactggagcaggagcgggcagcgttgccttcgcagcatggtaacttctctcagcgctgtttgtaaagcagaatgggagaggaaactccccagagggaaactgggaccctgttaggtagggctagcaagaggtggttaaaacgtaagcatccgctgcaccagactgtattctccacgactgtatattttttgttgttcataagagccccgaattgcaatgagtacgattttccctggacgctgcagtgtatggagaagctgtcacttgtcacatgacagctcagtcattcgatccctgggtgctgcagagagggaagaattggcctcgcagtggggagtgagtgccagcccgtggcctgtcccctgccacgtgtcaccatactgaacgtttgtgtgtgctctgtgtgttttcaaaacaccttcatgtcacctgccccggactcctccctgtgagcaaggcagggtgggcgttaccatccctctggaccaacaaggacagaacagcttgagacgcacagggtggcttccccatggctgcggaggcatagaaagtgagggcacgggacgtgaatccgtgtgctgggattctggccgcctgtgcctgccgatcaccctcagtgcctccctggatttgattttgtggctcttctgggtgtgcgtgtgagtgtgttgtgggtaagtctgttgtctaggggaaggaacgggaaatcatccggccaggaatctctgtggggtggtcggcttgagttggccatatccaagctctgcgtgtgtctcacttttcagagtagcaggaaggccgggtgactttgaaatcagatgggtattttcctgattcgaagagacttggcttcttcccccgcccctccttctccctcctcccccctcctccctcttgctggctcacaaactcaatggggcatcccagcccacccatgggaggccaggagaaagaggaggcagagctgtcagagtgtggcccttcgtcttgggggtgtgcaagtgaccgctcctgccccttgatggctctcctgtttcgggtataagggatgttgtccaaaccatgtgtgggactctctgttgacagttgtttttaaattgcctgtttaattgagcttctctaaagtcttctttgtgccaagtatcgggacaggtgatagaaatagaaaattcgacacaaatcgaaaattccagtatcaaaaatgacagcgatgtacccttgccccttaacgcagccaagaaacaggggtgaagggctactc

SEQ ID NO: 136067 - DNA, 1059 bp, Homo sapiens
tctcgctgtacagaattctgcgatgccttcacttgatggctgtttcttcggggataggagggctgggggtcaggatctgatctcacacgaatggttcagagtctggacttagtagctcagagcagttcactgatttgggatctctggaagaaaagggtactgagtcactggcaccttctgctcagctcctgacagcagtgtaaaggatgctttcgtgacacccagccttcagcccaggaggatggtggcagatcagacagctctggaaatgcagggcacaatgcgcagagggttgcaccacaacagcagtcactcggtgcccgcctggagcactgctctcatttccagagtccctgtatttctgatcttggctgctttaaaaaggaggtgtgggcctgggatcccagaagtattcctctgtgattctgtaccacagctttaccttaattgggggtgtagggggtggggagaaagaggaagacagatgaaagcagggaaatccttcttggagtcatagttaaaaggataaaataagagctttagtgtagcctccgtttccagcaatccattttattctttgtccacaaactgaatgaaaataagcagtcattcaaaaatgatatttacgtaacctacaaaaatctcaatcaaccaaggaaaaggtggaatggggcttaatacaatacagggctgtctccggagttccctcccttgatttcaggcttttggtgtaaagctcccgaaagaaagcaactttgatttttattagactcttcaaaatcatctcggtagaatattgaccttttttgtgtgtggaaaaatgacttctacgaattctcttgtaggagtgtacattttggtcattttttggaatgtaggaaaaaaaatgtggggtaccctttattgcattttcaagaccttccaaagaagataattctgattgtaactcattataatctgggaaagtagattgttctggtttcaaggactgcgtgtgctttaaataatcacaggctgctctcagacttgggaacttttggtagaatacagcagtgattc

SEQ ID NO: 136068 - DNA, 1651 bp, Homo sapiens
agaccagcctgggcaacatggcaagaccctgtctctctctaaaaaaaaaaaagccaggcatggtggtccacacctgtagtcccagctacttggaggctgaggtgggaggatcacttgagtccaggaggtcaagactgcagtgagccatgcgagtgctccagcctggatgacagaacaaaatcttgtctctataaaaagaaactggaaaaaaaaaaaagtagttctagaggtcataagttccaaatgggtcttattctgctaaaatcgaggcatctacagggtggtggtatttgctgaaggctcgagggttaagtttctggttttttgttttgttttgtgttttttgtttttgtttttgttttttttttgctttctcagtttctagaggctgcccatattccttagctcatggccccttcctccatctttaaagccagcactgcttgttcgagtctttttcacattgcatttcccctttcacattgaaagcactcttctgatgaaccacttctgttaaaaccactcttatgatccaagataatttacttttttaaaagatgaactgattagcagcctgaattccacctgtagccttcattcctccctgccatgcaacttaagttgttcatggtttctgggaatcaggatgtggacaccttgggtggggatggaccttaactctggctgccaccaatggcgcctggtcaaagtatcctgtaggatttattcttggaaacggcgttaaccccaacgccctactttgctggctgtgtaagaaacacgaggtcagtcaggcagtaagaggagcatggacttgttttctgaaacagcgacacaatccattacatattttcgaatgacgagatgagatcagacttctgctttaggaagagtcacagggttttgtggatttgcaggggaaacaggcggtcagagggagttctgtgtcaccgtccagaggctggggtgccaaggagggcagtggcagtgggcttgaagagatgcaatggggctgctttggggctgaggcgactggactggcgtctgattgatggaataccaggagagggatgggagagggaaagagatgagtccaggatgacagttggaaagtcctggacttcggagtaaagggtagcgattgaggagttaaagggtagaatcaggctggggagagcaaatttacttttgaaatagtgacctttggatgctggacagggagatatgaagcaggcagaggaaatatgggcatgaaatagagcttcagcattttctacaaagaagccaccacattcggtgacatgacaagggagtgatgccagagggaagagaggtacaagggcagaatgctggggaaatgcctgtgtttaatgggcgtggagaacccgcttaataaataatgagaatatattgctggactgaaacaaaagtcctcattagctcattaaatgtttcctggaattcccagtcaaatctgtgaaacaattttaatgctagatgttttgtaagtatttctccggaaatctggaaatttgtccacagacccccagacattgtttataaactgaagtcagttgactcaagtattttgcaaatgtctatggaccctagtgtgattaatagaaacacaaattattttaaaggtgtcact

SEQ ID NO: 136069 - DNA, 1964 bp, Homo sapiens
agttatctcataatgagggttattttaagaagtgtctcaaggaaatgtgtcgtgtgtttactgaggatagcgttgtatgtagtccacaatttcctctttctgggagaaattttgcacatgtatcagaagtctaggagctgtgtttctgatatttgcatcttctttattgtttagatactgtgaatccagcatctaactatagttccttctttgaggtctaggaaacttggaattggattgacaattcccttccaagtgatttcaggttgtatccgactgcgaactttggataccgccttcctgtctcagcttcgtctcctttgtcctaccatgatcttctcttggccccagtttacccagtgaattactttatttttgctattttgtatgtgtttttggaagccacccccagttttttctcttcttttcctgggtggggagttagaagtgttgcagtggatgatggtgctgtggctttttggaggttggtttgcagtagcttttgagttctggtgtgttagtgtcatcttattctaatctagctgcttcctgttgaagtacatcaagacgaagtatatttctaaatttattacgatgaatactctatcaaaagcagctggtgcttaggccctaggtagagctttaagataaagttctttaatatcaatttagaaaaagaaagattcataatgattaatggagctcctgcatcactgaattttactggaataaaaaaaattagtgggcttaaagttacattgaatgtagtggaaattctttttcttatctccattactgttggggaacaatttcatctaaaccccattgaaaactgggccttatagccttcagtatacttcataacatttgttggaaagcaggaaatgaaaacgaagtatttgaagtaaaagttcttaaatgtgtcccaagaaatgaggattactgcagaaagaatggatcagttatttctcgaattataagaaggaaatatctgcagccttttttgtcatcagtgcagcagccccggtttttctgttaatcatagctggtaataatgccctccggtttatagttttgatgagccgggagctaggctgcgtgttttacatataatatctctgttccatcagctgcataacctagatatccttcaccccatttttatgagactcatgggttcttgtctgggaccatgcacctagtaactgacaagattgcaaactagttatgtcacctgtggagttccacgacaaaggcaattctaggcgatgtttatgtagtgttccttgcatgccagggggattctgtgctctttccatgtgtgaatgatagcatccacctgctaactttgttgggagggttcagttatcctctctgtacaggtgagaacaggaggtactgaggacatctggcccaaggatactaccgctggcacggggtggatggtgattcgccctcagtccctctggcgcagcatctgtgctgtttgctgccaggccagctgcatcccagatagagtgacaggatctgttcgcgtcacatccagaaaaggctctgaggccaagctccctgcgttgcttctcactttcactctggaatcagaggtgcgtgcctggaggacttagctctgcatggacagctggtaaggtgtcacagagggtgaggtgggccattgtagcagagagttgttaagagttggttacgtgggttttctcacagggtacaaggctgaggaatgggaaaccagttaggagaccttgctaatagcgtggaccaaagatggggagtaggtccagacagattccgcagtgttcatgcagtgttcatgaagcaggtgtagacagattgcggggccattcatgaaggtgatttgccggggctttttacggatggaaaaccccttttctgtgttcatcccacctcctgttgtcgacagatgacacctgcacaatcaggtcctccca

SEQ ID NO: 136070 - DNA, 1536 bp, Homo sapiens
gattctgaaattgtggtgtctgtaacttaaacatcatctacaaaatcactgctctatctttggatgtgagtttgttctagcatgttatcacagtaccgaattccaaagaaactgctgtttacttaccaagggtaggctttcaactcagatgagtttatgactttatttacatggaatagtcaaaatggacttctgacatttgctgcaaagtaggacaacttaattgatattgatggatctactcatttattcagcagataacaaagcccttccgattgcaggtgttgtggagagagcaggatattcatttgctagggttgccataacaaagtttgatttgatttttggttggggatggaaactgtgtaggaggcaagcgtggagcttgatgtgagctccttgaaataatgaaaaaccagttacaaaatctgtattacctgtagcagtacacattctcccaaagcattctgttggcattttaaagtcctttaaaacacacagctgctttctgttgcttcaaactaaataaggcattatcttcacttttccttttgttaacctaaagaaaaaccttcatttgtaaagcaaatcatcacagcaggaggattttctggtttatgcactagggtgcatttaatctttattttacactgctgattaactttatgattcaaattttaacttatagtttctttttaaattaattacattattgggtgctttcatgtttttgctaaaagccttcctattagaagcactacaattgacagtgatggactgacctttaatatttttttgttatgtgaccagtgtttggtttataaaaatttttctctaaaacaccaacttttggctgcaaataccaccttttcacttgggttcttttcatagtgtttatttacatgggatattgtcactttgcacgctgtagctatttgtctttgtcagcaaatgtaggtaaaatattaatcttgtatgaaattcagataagcagggaacagatggatttatggtgcttgaaacctctgaactctgcagctgtggcaagttgttgaactgtaaataaattctggacggtggctagcaggggctggcgtgacctcatttgccccacaatacctcaccgtgccagggatgcatttcctgccctgtgccacctgtggtttggtcctagtgctttggggccgcagagtggagctgggctccctttgaggaagtcatcagtgctgagagccctcctcacgggtgagagtccagtgggatgtgtctgagcagcctacgctgggcatgggccggggcacgctgtgtcccaagcatgctttaggggtcccagtggcaaaagcacatttgtggttgtttaatctctggaggtggaggatagccccagctcctgggtcagtcagctggcggaacagggtaggccaggggagacagcactccaccctgctgggcatcttattaaatgcagcccagtatattcaatgccggcatcactacttcatgggaaaggatgcagcgcttacagcaggtagtggg

SEQ ID NO: 136071 - DNA, 1035 bp, Homo sapiens
gtttggtggagttaaaaacagattatctgtgtactatattaagttgggtgaggaatgatgaagtgtaaattatacttacataaatattataatgctgtgcagaaactcttaagctatcattcttttagaaaatgaattttatgagcttgggacctttttgttaaccaatctgagaaaagtctgttgtcagtgtggacatattttacctttaaatggaggaggggagagaatctttcaaaaacattaatatcagtgagattaatactaatctgtcaagatgacccagtgaacagttggctatcaaagtattataagaaggtttttaaaaggaaagtgtctattttgtaaagatcttgagtaaattatgcttttaagtatgttttgatattcccccccctcctcccaaagtgtagcatgcctgagcgctgtcatgtttaggaggtgatgggttggggttagagggtgattgactgttagcgaagtgggttgggatgaacaagtgcacttgagtacgcgctgcacagtgtaggcatcaggccacgtcagtgtgtctctgcatttgggcagatgccaggcctattgcaggcagcataacatctaggaacgggtttatggatgaacctgggtaactctgggagcacaaacccagaccacacccatcgggagagattgacctgagtgatgcgctaacgcatatcattgagatggggccagatatcttgcttagatgaataattggagttcatgtcaaccatctgtcctttcccataatttaaagccaacttctatattttccaggttcatactttttttttcattaattgcatgtaaagttgcggtgaacaccttctttcttgacttcctgtttaaaaaaattacagttcttaaaattataagcttattcaggatggagtggtcagtttgtagaaaaactagctctttagatcttttaaaagcactacattaaaaaaaaaaaaaaaaaaaaacatcggacgtggtgggtcacacctgtaatcccagcactttgggagtcca

SEQ ID NO: 136072 - DNA, 1051 bp, Homo sapiens
cttagaagaaaagtcagtaggtaaacagctatcgtgtaatctgatgaatacccaccggaggaagtattagtaattattctttgcttgccagggttttcataattcttttccaattataaaaattaatatgctgtaagcagtttttaaaaataaaagtaagcatgaaaagaaaaacatctataaacccacccctagaagttttgccccagcattttggtggtgtgttttcttccaggtgtgtgtgtgtgtgtgtgtgtgtgtgtgtgtgtgtgttgccccagcattttggtgtgttttcttccaggtaggggtgtgtgtgtgtgtgtgtgtgtcctgctgtattctgagctttgtagtatgccccttccacttgaccttctccaggaagcatttgatcatccagcaacatcgattgaaaatgtttgtatgcatctctttcatgaagtacatgttccatcatttatatcacatgtgttgctggagatttcaattgcttccattttcctttaggataaattgctggaaatagaactggagggctcttgagaccgattaccatattgctttcctgagaggctgtgcgggttgcgtggcagtgaggagggacgggggtaagtggaggggctggggcacaggcctctccaacacttcatgtgaacatggtcagctgagccaggaatgcgtgacatctttatttttccccttgcatttctttaattcctaacgaggtggaatatttgatcacatttgtcagctatttgcatttctttttccatgtattagacctaagcctctttgaaaggtgttatctcaggttctttccaatattgcactttctgagtttctcttgaatcccagttattttaaggattgcagtgttggagtttcagctgaaggggccatgtctgatgtttgctggtccattagcctcctggcctgagccaaaccatgcatcttcatgtcagagctgcatatgaaacaagagctaagtccagaaagcaagaagaagctagcagattgattttcctaggtggggcctaccagggcactt

SEQ ID NO: 136073 - DNA, 1002 bp, Homo sapiens
ttcgatttgccatcattgattagacgcatgcagtcacccagtgctgtttgcccaagcatctgtaggcggggattccccagtgctgattccccaatgcttgtaaggggcaggacttaattaaatcttaaagtgacagctgaaaatgtaagggtcaggaagtcatgtctaaaaggggatttagtataacaataataacagcagtgactaagactaatcctggctcaggcattttgtttggggtcacctggtcttaattagcagcactctgggatttgagtggcgctgtgctgttgcccacaaagcccatcagtggcaccattgcctgtgtctttcggggcagtctgttagggagggggtggcacaggtgttggcacggccatccccattttatatgtgagggaacctcagccaggcaggatccttgcctggatgctctgtggggagccctgtgagtttgtaaccctccgtgcagcctgccaggtcagcggccccaaaatggagagatacagagggcaccaaattgtaaggcagagcgttggctagtgacacaagctgcctttcgatcgcctgggcgttctgaagcccgcaaacattcgcctggaccttggtcaggtgtctcacagaacctacagtaattcactgttaagaataacttcaaacacagaaaatcgctttttgtttcctagagaaggctagtcttcagcgagaacaacttgtgatttttaatctgtttcacactggtcggggaggggggaagaaaagatgttatgggcatataattaaaaatttgtcggcagatacaattacaggaagaatcatgtggcctaaaaaactgaaagcctccatatgcctcttcatcttgccagctacagtccacaaattgtagagcctgcgggcactgtggaagccagctagatttgctctatccagtagcagcagattgagagccatacatggaatttatacttttctagcagccacaggaaaagagtacaaagaagc

SEQ ID NO: 136074 - DNA, 1004 bp, Homo sapiens
tctgaaattatgaaaatcaagtcatgggagatggataccctattccctacgatccacttatttcacattgcatgcctgtatcaaaacatctcatgtactccataaatatatacacttactatgtaaccgcaaaaattttaagaatatacaaaaaattttaaaaactgaattaaagagcattgtagataattgtatttttcaaaaaataagtaaaatatctggtatataacagttaaaaaaaaaactgtattatcaactctgtgaccttagaactacctttttacattttcaaagattaactctccttaaaaaaataaatgtacaaattattaccaaaaaaaaaaaagaaaatcaagtcataatgtgaaaaataatttttaagctgaaagttacactgtttctaggagttttaaactaggatagtttgtggttattaatctgtttggaagtagtccagaaaaaaatgctatgggtcaataacttgaaaatgtgcatgtggactacttaaagaggaatcgtgtggcctaaaaagtccctgttatccctccaccctgcagactccaataggagaatttccgctgctgcagactctccttggtggccaagctgcccagcactctcccgtcccaccaatggtgtgactcctatcactgagaaacagaccccttaccatttcatttccttttaattaatttaaatttaaaaatcaacacttccttggttactggaatgttgggaaccatgtgggtgtgtgcatctatattttccagggtctattttgttacctataataccagtcatgtatttccaatgaaaatttaacttgtgaattgagatatagtacaaatgtaaaatacatacactgtgatgatttaggaaatttagtaggaaaaaggaacgtaaaagatctcagtaattttttaaatagaatacaagttgaaatgatactattttggatacactgagtaaatcaaaatctatcatgaaaattaatttaaggctgg

SEQ ID NO: 136075 - DNA, 1074 bp, Homo sapiens
ctacaaaggacgcctctgtcctacctttcatgcccagctttgagtatatcctgtctcttgctcattaccgatgctgagttttagccctgtaaccagagtcctctttctttttccacagatgggactatgaactgtgttttaatgattagagggagtagtgaagattttcactgtgaacattttcaccccctttcccatccttggccagagatgatctcacatggtcttggcaggtatctttttacaggagtgcatgttgtttatcttgggagctttttgcacagggaaggcctttgtcttccagctctgtgaatccttcttcactgcgtagcaccttgcagaacatttgcacatattaggctcttggtgaacacttagaatcctcagtcatttgcattcacgtcatgtttccataacacattgaatgaaccagcaagtatttattgaacatttactatgtgaaacacagggaagacagccatgaacagaccagacacaaatcttacgtgctactggataaaaatgtaccccacggatgacactttgggtattatgatgccaacaatgagaacatattaaatcactttggtatttgcattagattgtgtcctgtaagtttcagattggtgtatttgccaaagaacaattgtgtgtaccccccacccaccagaaaagaatacagtaaaagtgctaaactattgaatatttttaaatggtattatatttgaaacgtgtgtttgtaattttgagccatgtaattagaaatctagggtttatttaaattcttgtttgttttagagaaatatgtaaagccacatttccctttatataaagtacttggttgaaaaaacaatttttttctaaagaaaaaaaacactctttagtgtacttttgccaattaaaagacagtacagagaaattgattcctcctggagtttgtgtagaaattagaaaacataatgcttttccctaggcatgaactcgcttaaaactactgagaagcttatactcacgcaggttgaatggagtgaatagtggtttagagaattgagctgattaataagaagtccctga

SEQ ID NO: 136076 - DNA, 1049 bp, Homo sapiens
tgactaaaagaaaaagaaattttgggggaggagcaggctggtggatgtgcagtttctaaattatcttgtattttatttgattacagtgtttgaattcagtgttttgaagagatgtatgtagcactgcaagctctattctaacctactttctttggagaagcaggtacatgctgtgttgtgtcagcttagagagccccttcaaaacctctccatgttcaatgtggagggactgtcactatacatgcatggcacaccacaccaagaacagagggctaccagaaaattagaatcccttttatatttgtcacatatcagcatttatttagctgtaaaaataaacagcatatggcatttgttaaaatcgtttgtatttcacacaaatatttggcaatatgtaaactttcttgccagggctgtttattgtggttctatttgcatactaataatggggaaatcagtaatgaccaggtgttggaaggtctgatttctcatttaaatgtattgtttctagcaataaactaattatttttgacatgtttcataaccagaagaatgttattaaccaaagtcataattcctatttttgtgttgatcacacacagatgataagttaattatacttattgaatttaacaacatatataagagataatctcaaatttcaagactctcatttgtgggttaccatctgttttggaccaaagaataggaatttgattgcaagctttcttctgaacagcttgtaataagagctgtttgtatattaattacttattgaattattgtggattttaatgttttaatttacaagcaatttggaacttattgtggtgacagctgctcatattttgatactttatggtatttagcaatttcatcataaggctattttttcccctggtaatttataacccaatcctgaaaacagtaatttggtctctccagctcactataaggagtattgtcctgtttcatccccactgcagatttttttcatagttaaaagtatattttataagcaaaatcaagattcctttgtgcctgcttcc

SEQ ID NO: 136077 - DNA, 1032 bp, Homo sapiens
ggaaagctagcccaagcgatggggaatgtttagctaaagcgtgttgtcttctcccgagggtgtgcacaggttcatgtatcagctgaataaggccctgttccaaaaactgatatttcaagggaaccttaatttatctttaaatttaatgtaatttaaaattaatttaaatctttaaattatctttaaataatagcagtagcaatagctgagctaacattaattttatctattttgagactcttttatttcagaacttctacatgcataatgcctgaccggccacttttaatttctcctttctttcactttgcaaacaaaaccttacaatctgtgctatggactaagacagaaattaagaaccaataaaatgtgttaagttttaattaggaagaagaaaaaacctaaaggaacgggatggttgagaggtaaacacaccccaatgatttttaagtcttttgtttcaaacctttccctttctccctaggctggtccctgcagacggcttcccatttttatgaccggatgctgggaagcctgctggtccacaggtccatacatgaagtcaccataaggtaagcagcccagcatgccattggatccttgcccttgtacctgaaatccgtttgaggagcagaactgcattttcccaaaatggaaccccttctgttttaaatgatgttgtcaggggaagtgcccggtctttctccttactgaaggttgaaggtagtagacagacaatcattaaatcattgcgagctgcatagtcaattccaaatgagaaatttgcctttttactgacttctgagaattttgggttgtgtttttgttttgttttgttttgtttttgtttgtttgttttgagacagagtctttgctctgtcacccaggctggagtgcagtggtgcaatctcggctcactgcaacccccgcctcccaggttcaagcgattctcctgcctcagcctctcaagtagctgggattacaggcacctgccaccacacctggctaatttttaaaatagtttcagtagag

SEQ ID NO: 136078 - DNA, 1069 bp, Homo sapiens
aattaatttcaaaattccttatctaccgtctttcacaaatgtatgtatagcctagagaattttggtaataattttgtgatacatttatattgggatttgtagctgccagcctttttttttttttttttttttttttttttttttttgagaaagggtctcacttccgttgcccaggctggagtgcagtggtgatcgcggctcactgcagcctcgacttcccaggctcagatgattctcccacctcagtctcctgagtagctgggactacaggcgtgcaccaccacactcagctagttttttcgtttgtttgttttgttttgtttttgtagagacagagttttgctgtgttgcccaggcaggtctcaaactcctgggctcaagcgatccgcctgcctcggcctcccaaattgctgggatgataggtgtgtgccactgtgcccggcccaagccattttttcagtccattctttttgctcctcctagtaacccttcgtagcaaccagccttccattgttcagtcaccagaagttaatgatagaaaaccagagatttctagctgtgcaagatgtagagagaaacctaaactctatacatttgctattggcactgtgttgccatagtcactgcagcactcagcatcaccaaaagcctgcccagtgctgcaacattctttagatagatttttgttgttttattttgtctccttaaataatatttaatttttcattaggtcatgctatgatttcatagcttattttgtctctaatattttcttctgcatgctgtcttttgagagacctctccagagttcaagcacaaatcctaggacagacttgtattttgactgtcaaattttcattgcagtatgtgcaaaagtacagaaatgtcatcaaattaagcaaagaagataagaatttttgaatggcagtgttctggcaactataaaataaagtctattaagagtgcaaagtgagaggtggaatgtcgccagggcagctgcattcattatctcttgctggataacagacgaccacacgtttagcagcttgaaacaacacacattcattct

SEQ ID NO: 136079 - DNA, 1048 bp, Homo sapiens
cgcgggtgtactcggtcacctctccatgtgtccagaaaagtgctcagtgttgaatccctccacgtctgcctgagtgcactttgggattccattcctgccgcttatggggcgcgctgcggatccctgcatgcacagagctttattgaacgcaaagtcagttgtttgttgtcgtgctctgttgcccctgcttctggcttcattcatgtggtttttgctcaattcttccccggccttaggaaataggccaactcttgtttttttggaaaacatttcacctgggcatatttttctatctataattacggaatttttatgtaatcacataattataaaatataacacaatcagatattaattaccttcatgtgtataatagcatggatattattttctttagtcatctcaaaaaaaaaaaagagaaaaatacaagcagtgtttcaaaactctcttctctttttgaacagagggtggttcccacttcatcaacacctcatcgccgcgaggtgaggctaagatgagcataaccagtgacgaggtgaactttctggtgtatcggtatctccaggagtcaggtaagaggcttggttttctgtcggtaggaaattcatctacagcatcttacaagcagaaggatcaacgcttaattcaaaaccaggctgtagaagaagaagaagaagagctaagaaggttcttagtgctgatggggagaagagaaggttctggagctgtgccatccccgggtggaaagagggaatgtgttctttcttcccttgacacttctgtgcagatgaatcaggcaggaatcaagagcggttgtggtgaatgtggaaaggacggaagcagtgcggggctcttggcctccacctcggcgagggcatgcatgagctggtgtgtgtgtttgaacctcttcgattttgctccagagatttattcagctccccagcctcccctactccccgccccctaaatgggctgctaggcaattttctaaaacttaggaatcgtcgtagcatcttccaacatttttgattaccactgagacattact

SEQ ID NO: 136080 - DNA, 1014 bp, Homo sapiens
tcatagttgccttccctcggcactccagattccagcactctaggggctaatgaaagactgtcccatttgtcacaatggtttctaatcattaaaaagtgagacgccaggggcggtagcacacatctgtaatcgcagcactttgggaagccaaggcaggagggttgcctgaggccagaagttctagaccagcctggccaatataatgagaccctatctctacataaaataaaaaaaattagccaggtgcagtggcacatgctcgtaaccccagctactcggaggctaaggcaggaagatcagtttggtccaggagtttgaggctgcagtgagccatgactgtgcccctgcactccagcctggatgacagagcgagaccccgtctctaaggaaaaaagagagacagtgtgcccgcggagtttaaatgaggacatgttgttactactttggacagttaccgcgttttgtcatgggcttgttcatttgggtgtgaacatatgaaggaggaagggggtgtgggagcgtcttgacccatcggtcaccattgtccactccatggccagaatcaagggccaagagtgcctgaggaggtgatgcagctagttctttacataggttgtattgttttctttattttgaatattgtcttgtaatcagaaatcatctggagtgatgtttcatttagttattcttcagctgaaacctgagcctttcagttcttcctcacttctgaagtaattcaggttcagagcatataaacatgtgtttgcacatccagatacaaccccaaggcttactgaggttcacctgattcgaatatctggcgtgtttcacaaggaaagaacctcctgctgtatttttaaacgtgtgtggaaagttttccatggtaaacggaaatcagagaatcaaagaatggtcaaaaaaacatgaatcaaaacaaaatgatgtcaattgtgtcatggctatggttagtctaaccctgaacccaaggagtcatttcaagtagcagcaagtgcc

SEQ ID NO: 136081 - DNA, 1723 bp, Homo sapiens
caagcagtcctccctcctcagcctcctgaggcactgggattttaggtgtgagccactgcacttagcaaactgtttttattcctcaatgaaatttagagactgtcaaaatgtaaagaaacctaaaatatttactaaattgcactaaagccacgatttcgttagaatcatcagaggtaggccgggcgtggtggctcacgcctgtaattccagcattttgggaggctggggcaggtggatcacttgaggccaggagtttgagaccgaccctggcaacatggtgaaaccccgcctctactaaaaatacaaaaattagcctggtgtggtggcacatgcctgtaatcccagctgcttgagaggctgaggcatgagaattgcttgaacctgggagacggaggttgcagtgagccgaggtcgtgccactgcactccagcctgggcgacagagcaagattccgtctcaaaaaaaaaaaaaaaaaaagaaaaggaatcatcagaggtagtatttagtacataaaaaaaatgtttctggaaacaaaagagccctttaagtgtgtttctcttgtattggtaagccacttgtctctttgtgtttgctgtgacagataatcacgcgaagccaatggaaatagatggagaggttgagattccatccagcaaagccacagtccttcggggccatgagtctgaggtgttcatttgtgcctggaatcctgtcagtgatttgctagcctccgggtaaggatgtcagggtggggggcgctccagagttggggagatgggagatgcaagctgctcgcccttctctggagttctgcctaaaggaacacacactccccttcttaccccggtgtgtgggcagaccaaggaatgggtggctctatgagccacttctctacatgtctcatattgtggagaagccatagttccaagtcgttttctccatgtggtggtgaggaacacagcagcacttaaattaccaaatgcaaagatggcaaagagggaaacagggatccagagggatgaaaaagacagaagagcatgtgctgaagatgccctctggccagagagcaagctgtggagagcttcttatcccatttgaaccaaacaccagaggctcctgtgtttttattctgtagatctggagactcaactgcaaggatatggaacctgaatgagaatagcaacgggggctccacccagctcgtgttgaggcactgtatacgagaggggggccatgacgtcccgagtaacaaagacgtcacctcactggactggaatgtaagcatcttccaccccctgggcactttgaaattggtaaaatcggccagccaccaggcaggggctgcagcaatggagcccatgcagacataggaggcaggtggtcctgtgtgctcagcccccactctgatgggctgccagagaggtgttcttggcttctttttttattttgagacggagtcttgctctgttgcccaggctggaatgcagtggtgtgatctcagctcactgcaacttctgcctcctgggttcaagcgattctctttcctcagcttcccgaatagctgggattacaggctcatgccaccacacctggctaatttttgtatttttagtagagatggggtttcaccatgtcggccaggctgctctcgcactcctgacccaatgtgatccgcctgcctcagcctcccaaagtgctgggattataggcgtgagccactgcc

SEQ ID NO: 136082 - DNA, 1062 bp, Homo sapiens
tcattaaagaacacgcagtggcaaatggttccagtgtacctggatcctcggagaggctctccgagctgcttcggtgctgccgctcctaagttgtttttgtggggttttgtctctttctggccctcagaccaatggaacactcttggctacgggttcatatgacggttttgcaagaatatggacggaagatggtgagttctgtgtccctcgtgctggggtcgggtaagaggagctgccgaacttaacccttgagtgaacagaccatgacattgaggtcaacatgtttgtttttactaacaggtaacctggccagcaccttaggccaacataaaggccccatctttgccttgaaatggaaccgaaaggggaattacattttgagtgctggtgtagacaaagtgagtattagctgaaaatacatccctttgatctataggtggttatatatttttaatctcaaaataacatcgtggtttcttggaactcgtaggctttgtgcttccccttaagaaatgaaaatgatttgtttaggctttgtttttgtggttttgatctttctgttcatttgtgacacatcatctcttaatatattctgctgttctgcagaccctcgtgcaaagcttccctttatttgaggtacatggttcagtggtagagagaggacaatctccacattgcatttgtcagttgctggaaggagccacgtggtatggggcgtgccctgcctgaacttgcacccactgaggggtgagtggcacaggctgtgtgtgttcttcaggcttcggctttcctcatttgataaactgctgcttcccaccgtagaccgcagatttctctgagtaggagtcaagcaacctggctacaagggcacgctcttccgatggcccacagagccaggttagaattgacttgctctgcacctgggcagggctgcagggagacacggtagtgttaactccaggtgcatgtaaaagccatcaatggggtgggaacccaagggcaaagagtaaggggacgcagactccatcctgggcccgagtctgatccagccagcaacctcgg

SEQ ID NO: 136083 - DNA, 1069 bp, Homo sapiens
gtcatccctgccaacgtggcaggagagggtctttaaggtcttagaaagagactgtgttcacgcttgagacgtttttatcatgttactaaatggggcttcttggctgggtgcaatggctcacgcctataaccctaacactttgggaggccgaggcgggtagatagtttgaagtcaggagttcaaggccatcctgggcaatatagcaagaactcgtctctgcaaaaaaaaaaaaaaatttaaattagctaggcgtgatggcatgcgctattcagaaggctgaggtgggtggatcccttgagcccaggaattctaggctgcgttgagccatgatcgcaccactacactccagcctgggtgacagagcaggccctgtctctagaataaataaataagtaaactaaagaggcttcttgattgtgctgttcattgttgtaaatccatggagctgtgcaacagtgagtaactccagatgtcctccctccctactgcagcccctgcccttgatgtggactggcagaacaacacgacctttgcctcctgtagcacagacatgtgtatccatgtgtgcaggctcggctgtgaccgcccagtcaaaaccttccagggacacacagtaagtgagagctcttgtcactggtctcgagtttgtgagaatgtgatgtgggagccgattcttgtgtgcctagaattaaaagctactgcagcagcagaccagctctaatgtgccccttggctatttgagctgtcatggttaccccatggtaaccatggtggttggattgactcagtttggggttggcagtgagaacagttcactcagaaatgacctagatggtggatttggcaacaaagcctttaaggtagccatgagaaacatgtagaggacatcaaggaaaggatgctcacaataaatgaatagacggggcacatctgcagtgaatagaaaaaaaaatcattaaaaaacaaatggagactaagtgtggtggcttatgcctataatcccagcactttgggagtctgaggccagaggattgcttgaggccaggagtttgaggccagcctgagcaac

SEQ ID NO: 136084 - DNA, 1043 bp, Homo sapiens
ctgccttagacccccacagcagctctcggtccaaaacagaatcctccccagtctccaggcccattcacgtatcctctgcacgccctggggaggattcacggcaccccctgagctcctactgcccacatgaatgccacagccctggcagtagctgctggcctgcgtgtctgcctctcccagaaaacgcagagtgcatcaatgctgggaccatggcatcttgcctttctctcaccagcacccaggatatctctgtggtggggcagggtgggggtcccttgttaaagcaggagaggatggtcacagtccctggagatttgccattgtgccactaacttaactgatgtaaattcccttgtcctgattcccctaatgcccacctctccccacccctggcccaggggtccctgtcccaaaggaaggcgcttttagagcacaggcacctatcgtcctgttaacatctgtttggctccaaactgactctcttctcccggtctaaacttatttctcctctaaccctggactatccacaagtttttaatagagctgtacacactatctgcagttcccaggtgtcctgcccaggaccttgccaccagcacaggccttggccctttaagtgggtcttaatgtggctgatggccctgaacaaagctccagctcagtggggttgagtggagacccatgagccggctctggaggcggcccaggaaccggggcttgcattgcagagctagggatccgctcccaggaagttatttgttcctttgcatgggcttggctagggacagccagtggtgaccagctctacattcctgggcccatgagttttcctctgaacagctgcagtcagagccacccttgctggccttgcatacacattcacactcatagacacccatgcgtgtgcacactcacaaccctcagccccctctccagtcggccccctccaccctcccgggctctcgcagcagcctgcccctgggccgcgaaacttcttcctcctccctttcctgggccacgtgtgcctcatggaacacagatgt

SEQ ID NO: 136085 - DNA, 1078 bp, Homo sapiens
gggcatggtggtgcctgcctgtagtcccagctacttgggagggtgaggcaagaggattgcttgagtttaagaggtacatgctgcaaggacctgtgatcctgccactgcactccagcccgggagacagagtgagaccctgtctgaaaaagaaaagtgcataggaaagtgattttcaaaggccaatttaaaaagtaactggttttactggttttatttgctgcgttttatggtatgtgatttcttcacttgccttccttcctagcagggaaggtttttttcttaatgaagtatggatgagagtggctggtgttgtgtggtatagggctgtggttttatataaatgaaaaaggcaaagtgagaaaaagaggaaactagatggctggttgggctgtgccctttgatgtcaggctgaagccgaagaccttctgcagcgccggtggcgcgctgctgccccctgctggaaggtgacctcatctactcacaggccctgatgtctttttcacactcttctgctctctttcagaacgaggtcaacgccatcaaatgggatccgtctggaatgttgctggcatcctgctcggatgacatgacattgaaggtagagtcggcatggcaaggggtgggctgtttaatcctagacaaccccgggcacttgatgccagtctcacggtcactcttacatgaggattatttattactgaccaccctcccttcctctgtcatccggtgagctacgatttctcagtcatagtcccactgagaatcgcagcctccctgcagcctttctcaccactgtgcaccctccaccctgccctgggccccgtgtgcacccccgggaggaatgattccacatcgttcccggatgcaggaatggcttttgctcatgttgtgtctggtgtgttctgtagatctggagcatgaaacaggaggtgtgcatccatgatcttcaggctcacaataaagagatctacaccatcaagtggagccccactgggcccgccaccagcaacccaaactccaacatcatgttggcaaggtaagggcaggcaacacagctggcacagctcggtgttacaca

SEQ ID NO: 136086 - DNA, 1015 bp, Homo sapiens
tctgtattaatttagttggtaataatagatgtcatgttttaaattgtaggggcattttaggaaacttgataaatattctacaaaaatatttaccatttacgtctataggaaacatagaaacagggctgggcgcagtggcttacacctgtaatcccaacagtttggtagggtgaggcaggaggatctcttgagcccagaggttcaagaccagcctgggcaacacagtgaaaccccgtctctacaaaaaataaaaaaataaaaattagccgggtgtggacctatggttgcagcttctctgctgaggctgaggcgggaggatcacttgagcccaggagttcgaggctgcagtgagtcatgatcacgccactgcactccagcctgggcaacacagtaagaccccatctcaaaaaaaaaaaaaaaggtgcagaaacaaatgtagatatcaaattgtttccctaataagaccattaaagctttttttctgtttaatgactatggctttgtttttaatacttgtaagtagttacagtttagaagacaaaaagctttttagttattatcttttgaaacgtaaaagctgggaaaaacaactcctggagatctgatacacattatggagaactgtttgaaaccaccgtgtgtatgtgattttgctttctctcccaccttgctagtgcttcgtttgattctacggtgcgactgtgggacatagaacgaggcgtctgcacccacacgctcacgaagcatcaggagcctgtctatagcgtagctttcagccctgatgggaagtacttggccagtggatccttcgacaagtgcgtccatatctggaatactcaggtaagctcccgacccctacaccaaatccttttagtaagggatgcccaaatagccacgactccagtgcccttggctcagagcagtgccccggagggagttgagcaagctcaggctccccgggcagacccagtggatgctgtccacgtgcaccccacgtgggctgtcagctcttccc

SEQ ID NO: 136087 - DNA, 1048 bp, Homo sapiens
tcatgcccagcttatttttgtatttttagtagagacagggtttcacatgttggccaggatggtcttgaactcctgacctcaggtgatccgcccacttttgcctcccaaagtgctgggattacaggtgtgagccaccgtgcctagcctcaatttttcaaatcaaagtaggttctgtttgaggacataaggtatgtcaatattgggttgtccttttagcagggattgaaaggacataggatttaaataaaggtggctgctgtgggtatcttgggccacacctgaggatagaagaattccagctgtaaagtgtagaaatggatgggaagtagcactgcatagcataaaggattgtatagggccatcagcacgtgattctagtctaagggaagagagaggtgataatatgctaggagctgttgaaaataaggaaggggtccctttcgcctcaggaggggaggaatcacacagccttccccctgccccctttcatctgcactgccttcttggttccttttggcttggttgacattcaggtggatttataccctcaagttcattccccctgtggactcaatggtgatgagccctgttcactggcaaggggtccactgagatcacaggcttcccagggacctcatgtgaaccacatcctctcagggaaggaagggaaatggtggaccctgcgtagagccaacccgacgccaagcccagccccacagccctagatagctctccgggaagcacgcatctcagcactagtgtccaagagtctccgttcctgaaatcctcgctagaaatagtaatgggtggatttgtaaaaagaacacatcaattatcaaaacaatgacatgatcagttaggtacagcctgttgtcaggaactcactgaactgtttcaacccttttttataaatcaaagaaatccttaggacttttcttttttttttttttttttggatcggagtttcactctcgtcacccaggctggagtacagtgatgccatctcggcccactgcgacctctgcctcccgggtttgagcgattctcc

SEQ ID NO: 136088 - DNA, 1819 bp, Homo sapiens
accacaaaatattatcgaaaaaagaaaagaattctaatgaccagccgtgaatgtgtagggttgcagctctattctccaaaactgtaggaacttgacttgcgttagagtgtactctgaaaccaactcgtctctggccgcaggagtctatatgttttcgtaatcttcatcaagaagtttttaaaaggcaagcaaaaacagaagcaaatcatatcaaacggggatagaatggtttccactgaggacattcagcctgggaaggaggaagtcaccagctcgaggcgtgtggattggtttccacccggaacaggctctgtgatggctgaatggaaagaaacgtaaaaagctgtgccaaaaaaaaagcaaaatgctgtgataaaccaaacagggaagggggaaaaaccctcctccttgggattttttttttttgttttccctaacaatttggacactacaattgctctcacaaaggaggttcaaagaccagtttgtaccgatgaaacgcgcaactttgtaatcccaacactttctattttctagaatcttctttgttcattgggtggtttttcagtcggctggaattctatcttctgggggccttccgtctgagatggaagctgtcttgggcttgttgtctcttccttctgttgctccctgcccctccccctgcctttccactctgtctggtgagctctgctttttcagtgcaccatcaagagatgcagccccgtggacatgaagacacaatctcccacggacagctttcccccttccgccctctcccaccctctcctccccttgcgctcgcgctcgcgctcgctttctcactggcgtgctctctttctctctctctctccctctgtacctttctcatagttgcttcagatcttaggtctcaagggcactttggcgcgtagtaagtgctttatgtaagaaggcagggcaggggggctttttacaggagaaaaaaaaatgacttataagagaaagagcctggagtatttttggaaaaaaaaataatatttttatgttaaaacaattttaaaatcttaaaatggccatcagacatagagagctttgtgtgattcatgttttaaaaagaaccgaagaagccacaggcagggcctgagggagcccctggctttcccctcagcctcaggaaaggtggtcaggaaaactctggctggacaagggtcagtcttcggggtcagcagcgagattgctctgcagccagtgagggaggtccccgccatgccggctggaagaagaacctcgcatcttttggtgtgtatgcaccttggcagccagcaggaaagcagcgaagagccgcgcgccctctggcctcaagggagcattggcagaaccataaggtactgcagaagccgtcgaaaccgactgctcggctggattaggcgtgttggctacatctttcccacaaccgtataacgaccgatggtcatttctccaagagcaggcttggcgagtccttgcagagctgacatagaggcgcccgcatgtcacttagtctaacgctgacagaaatgaatgcagaaggaagattttcagtcctgaacgtgaattatagaggtagaacgtcgctaataatttctgccatctttataatttctttgtctcacagaagactaggagaaagatcttttttaaataatctttttgctgtttttaaaaaattaaacaaggctttgtgttcctagaagagcttcatttcagtgaatctggtgacctccatctgcttgctgtcataacccgacacggacttatttttgtcattagcaagggggaaaaggccaaaggacaaggg

SEQ ID NO: 136089 - DNA, 1287 bp, Homo sapiens
gtgggatggcgatggtgggatgtgtcgcaagcaattcactagacaatcttcacatgaatgtcggtagccagggtctctcccgagggatggctttagtcttgatgaatgtgaaccatgtcggaattgttaggtagaaacctgggctgggaggcctcggaccccaggctccatccctggcttccccagcctgcggccgcaagcaaaaccaagcgcgagatgcagctagcacccttcatatccatccccgttctcagcgggacaacaccatggacagccgttttcagagcctccagcatttgcacaccactactcaccctctctgctgctggcatgttggtagagtcatccctgtaatcaagaaatggcctgtggaatgttattgttcaacgttgtttacagctcttaaaacatggtgaggaatgcctaagtcttagtgaccaaacgtgaccttgaaagcagacatagcatgacagaccttcctagagtgtttggtcgggttcacagtgaccgagagtcaggtccagcacacacctgggaaagggatgctgccccaagggggaccaaaagggccggacgttacagggtgaaaccctctgacccctcgcgacaccgtaggacttgacttttgtttagtctttctaagaaatagatcatggagccaagtgaagtgcactttgtcaaatgtaagggtctgctttgttcttgttgcttttctgttttttaaccttttgttccgccatttaaaaaaagaaaaaaaaaaagcttatgtttcttgtcaaatgcagaaatgttccttccgccactcactgaagttttgcattctggcttgtgcagtttttattgtctgtgtcagacgtacagccagacatgttctctattggcatttttccgattctgttcagatgacagcgaccgccttttcattccccccgccacctgtactcaccctcacgctctttgaagaaaaaaaaaaaaatcaccttgtgtgttgtagctcatttgtttcaagagagaatcaacagatcatattcagtgtcttgaataaattgctctattttgatattagagaacttggtgggtgtgctttcttcctctcgctctggaactcttgggcccacgttgactgaatgactgaagacagagctctgtattttctccagaaggaagtaccttgagcctctgtttaggattgctgtgtgagatagggagctgggagcagaacgcagtgacatggcagtcacagcagccgcctgctgttctgaaaggtggttctgtccagggatcatg

SEQ ID NO: 136090 - DNA, 1107 bp, Homo sapiens
tacttccttctggagaaaatacagagctctgtcttcagtcattcagtcaacgtgggcccaagagttccagagcgagaggaagaaagcacacccaccaagttctctaatatcaaaatagagcaatttattcaagacactgaatatgatctgttgattctctcttgaaacaaatgagctacaacacacaaggtgatttttttttttttcttcaaagagcgtgagggtgagtacaggtggcggggggaatgaaaaggcggtcgctgtcatctgaacagaatcggaaaaatgccaatagagaacatgtctggctgtacgtctgacacagacaataaaaactgcacaagccagaatgcaaaacttcagtgagtggcggaaggaacatttctgcatttgacaagaaacataagctttttttttttctttttttaaatggcggaacaaaaggttaaaaaacagaaaagcaacaagaacaaagcagacccttacatttgacaaagtgcacttcacttggctccatgatctatttcttagaaagactaaacaaaagtcaagtcctacggtgtcgcgaggggtcagagggtttcaccctgtaacgtccggcccttttggtcccccttggggcagcatccctttcccaggtgtgtgctggacctgactctcggtcactgtgaacccgaccaaacactctaggaaggtctgtcatgctatgtctgctttcaaggtcacgtttggtcactaagacttaggcattcctcaccatgttttaagagctgtaaacaacgttgaacaataacattccacaggccatttcttgattacagggatgactctaccaacatgccagcagcagagagggtgagtagtggtgtgcaaatgctggaggctctgaaaacggctgtccatggtgttgtcccgctgagaacggggatggatatgaagggtgctagctgcatctcgcgcttggttttgcttgcggccgcaggctggggaagccagggatggagcctggggtccgaggcctcccagcccaggtttctacctaacaattccgacatggttcacattcatcaagactaaagccatccctcgggagagaccctggctacc

SEQ ID NO: 136091 - DNA, 1067 bp, Homo sapiens
atcttcctaaaccaacagttgtgtcacctgcagcatctgtgccgcagtcacctatcaatcaactggcctagatgattctgtagggcttgtgtcatccgttgtaatgatttaataaaatgtagatggaaagttgatgtagatttccacccctcccacctttttttttttttttttttttttttgcagatgagatgaatgctaggactttgaccaaagttggtccatgaaaaactccatgcactgaatactgagcattttctgaagctgatgacaaacctgctaggacacagacacagtcagtcttttgtcttttcctctccaggttctgatgccagcacaattgaaattcacactgcaagtgaatcctgcaacaaaaatgagggtgaccctgctctcccaacccatggagacctatgaaggggatgtgctgggggtccagaccccatattcctcagactcaacaattcttgttctttagaactgtgttctcaccttcccaacactgcactgccgaagtgtagcggcccccaaaccttgctctcatcaccagctagagcttcttcccgaagggcctttaggataggagaaagggttcatgcacacacgtgtgagaatggaagagccccctccagaccactctacagctgctctagccttagttgccactaggaagttttctgaggctggctgtaaagtaagtgtaaggtccacatccttggggaagtagttaaataaaatagttatgactgagctctcagcctgacttggattctgtcttaacacttctagcaaaagaaaataaatacatgtacagttatgcattgcttaatgatggggatgagttctgagaaatatatcgctaggtggtatcactgttgtgtgaataccatagagcacagttacacaaacctagatggtacaggctacagcacacttatgctatacggtagagcctatggctcctatgctacaaacctgaacatcatgtgactgtaccaaatactgtagacaactgtaccacagtggtagttttgtatctaaacatacctaaacatagaaaaggtgca

SEQ ID NO: 136092 - DNA, 1009 bp, Homo sapiens
atgtcttaatgagtgctccaaggtactagtgctgcatcccgttgctgtcaaggcacctatgtgactgtactgacccattccccatgtttattgggcaccctctacatgccaggtgttgtctggggcattaggtacactatggtgaccaagacacattccctgtccactgagactccactctagtggcagagacagaaagaaaaacacaaataatgacatcatattccagccaggtagtgggacgtgccatgaagaaaaatcagggaggaggtaggagcatggttttagagagggtgtcctgagagtcttcctgagcatgacgtaatattagaattgagaccttaatgaactgtaggagccatgagaaaatcagaagagctttacaggcagaaaaagagaggcaccaatgccctgtggcaggaccaagcctggagtgagagggagagaggcagtgtgcttaagggtgtgagggagctgagaggaacacagagtaagctgcagttgtcagcaaggcccatgggtggagggctttggaggctttttggagtgcagtcacttgccccatctgttgttaggaaggccactctctgttgtgtcttccacctgtgtattccccatgtgaaagcccataacctgtgttgcggctggagcaagtactctaggatatttggggattggaagaataattctgacattggttccaaagggtctcacagattctgaaggaagacatgttgctggaattgatgcaggattttattcttggtcactttgcaagctggggacctctggctggtgatgccccgcccaggcctcgctcggccatgctacctgttgcaggagatggcctgcccacccagcttgcatgggccaagtctggcttgcacaccagttctcaagttcttgtcccatgcccaagaagaatgaggatgcactgactatagaagagtgagcaaggcagggagttttgagtgatgaaactgctttcagcagaaaggggacacagggg

SEQ ID NO: 136093 - DNA, 1034 bp, Homo sapiens
tcctgtcttccctcctctctcttgtcctctgtcccctttcttcccttctctactccagctcctccccgtcccctcctctccccactcccctctgctttcaggcacccttgaaggtacagcacctactgtggccaatcttcatcttgccccaaaccaacccaccaaccagtcaaccagccaccagccaacccatggtcccttccaagcgagtccagccctgtgggcatcctggggggagtgtgtcactctgtgacagcccagggctctgacttctgctacgctgcactgactgccatgtgtctttctgtcctctctccagggaatcctgaatccagcccagggatttctcttgtctttggccttctacggctggacaggatgcagcctgggttttcagtctcccaggaaggagatccagtgggaatcactgaccacctcggctgctgagggggctcacccatccccactgatgccccatgaaaaccctgcttccgggaaggtgtctcaagtgggtgggcagacttctgacgaagccctgagcatgctgtctgaaggtaatgccctgtctgccacagcaggtagacttcggggtcccagggctccccttggaaagccttagaggattctttgtcccgggggctgtcctgtgcatggcggggtgttcagcagcacctctcatgtgaactcactagcttccagttgcacctccccaattgtgacaaccaaaactctttctagacattgacaaatgtctcctggggagccacagtggcccccagttcacaaccagtgtctcagaataattaggcttggatctaaaaatgtgatttttttccagatgttgtctgagctaaatgcacacaaacacaaaaccaaagacaaacaccacacaatcccgtgatggggtgtaccaaaataatgttgaaatttggagtaagaaaaataatatgcagaaagatgtttggaaatggcttaaggagttccgttttcttttccattcctactattcaaatacactgaagggaggccaaggc

SEQ ID NO: 136094 - DNA, 1054 bp, Homo sapiens
cgggctcaagcgattctcccacctcagcctcctgagtagctgggaccacaggcgcgtgccaccacctccagctaattattgtatttttgtagagatggggttttgccaggctggtgtcatctcctgggctcaagtgatccgccggccttggcctcccaaagtgctgggattacaggcgtgagcaccgcgctcagaccctagtgtacttttaaacaacggatattgcattacctaacaaagaaccataatatgtaccatgagtgtgcatactgttttgaggatattagacatttgggtctaatagcaagagaaactcacaaagaataaatgttaaaggcaaattattgagaattaatttgtgaaaattttaaatgttgtgtttaaaaaagaatgaaggaactatatattcaaacttctaaattgtgctttttgaaaaattcttttttatgtgaggaataactaatatggccactgaaaatgcagccgagaaatccagattgctagtcacatattgcaagtaaaccaacagacaaacaaaatagggatgagactgtggccaactatggtttgcgttaaagtgcctgcgtttgttttgctaccataagttattttctgagtttcaggccaggcgcggtggctcacgcctgtcatcccactttgggagaccaaggcggacagatcacttgaggtcaggagtttgagaccagcctggccaacatggtgataccccgtctctactaaaaatacaaaaattagctgggcgtggttgtgggtgcctgtaatcccagccactcgggaggctgaggcaggagaattacttaaacctgggaggcggaatttgcagtgagcagggtttttaccactgtactgcagcctgggtgacagagccagactccgtctcaaaaaaaaagataaataaaaaataaaaataaaaaaaagttattttatgagtttcaatcttctttttctctctctgcacacacaaatatgtatgttttttcttcctttcttccttttccctccttgtctttttccctccctctctccctccctc

SEQ ID NO: 136095 - DNA, 1075 bp, Homo sapiens
cacaggtgcgcaaactgcagccctcagaccaaatcctgcccgttttctagggtccacgagctaagaatggttttacatcctactttttaaaaaattaatgattttgttttttgagacagggtctcaccctcttgcccaggttgagtgcagtgtcacaatcacagctcactgcagcctcgacctcctgggttcaagcgatcctcccacctcagctacccgagtagctgggactacagccacacgccaccatgctagggtaaatatatgtggggtctcactatgttgcccaggctggtctccaactcctgggcttaattaaaagatcaccacccttggcatcgtaaagtgttaggattacaggcgtgagccacctcacccagccctaaaatgtttttaaaaatcaaaattaaaaaatatttcctggcatgtgactattactgaaatttaaatgttaatgtctacaaataaagtttgatgggaacgcagctatgttgttcatgtgcatttgtgaattattcatggctgcctttaccctacaagggcagggtgaatattggactgagaaagtatggctcccaaagccaaaaatattaagaatgagtttgccaacatctgctttaaactattatgtgacactttatacagacctctcagctagatttggccattctgtttagctttttggaacatttccaccatgcgtaaatgcagtctataatagaaacacttacagtgaatccctgtacgtgggattcgtgaggtacgggtacccggctcatctgctcccctcttcaccctcctcactggattaatgtgaagccaatctcaggctccatcatcctgcccattcagatctcagagagagccctaaaacataataattctaaacatttgcaaccccaatatcattatcactttatttttgagacagggtctcactctgttgcccaggttggagtgtgctggcatgatcatagctcactgcagcctcgaacttctaggctcaagggatcctcctacctcagcctcctgagcagctggaactacaggcatgcatcaccacactggctaattt

SEQ ID NO: 136096 - DNA, 1010 bp, Homo sapiens
aagggcgcgcgcggcccgcgggttggaatctgatcagcgcctgggtgagggcgcgtggcccgcaggttgagacccgactggtgcccggataagggcgcacggcctgtggatttggacctgttccgtgatggagtgaggacgagaggcccgcgggttggaacctgcccggtgcagggctgagggcgcgtagctggctggttgggacctgctcggtccccggctgagggcttgaggcccgcgggttgggacctgctcagtgctggggtgagggcgtgaggccctggggttgggacctgctcaatccccgggtgagagtgcgtggcccgcaggttgagaccggatcgatgcccgggtgagggcgcatggcccgcaggttggaactcgatccactcgggttggaacttgatcggtgcccgggtgatggcgcacggctagcgggttgggctggccgtcttaacacttgaaccacagagaaaagagaaagcggaggctgttccctagggaccggatgggacaactaggtaatttttttttttttttttgagacggagtcttgctctgtcgcccagactgaagtgcagtggcgcaatctcggctcactgcaacctccacctcccgggttcaagggattctcttgcctcagcctcccgagtagctgggggaggcgcgcgccaccatgcccgactaatttttgtatttttagtagagacggagtttcaccatgttggccaggctgctctcgaactcctgacctcaggtaatccacccgcctcggcctcccaaagtgctgggattacaggcgtaagccaccgcgcccggccgactaggtagttttgcaaacacatggtcggtaaaattcccatccaagggacgttgggttttaaaaaatccgtttattgtgtttgttatatggaaacttcagatggcgcagttaagcaaaacccagaccagaaaagatttcctcatttttgcccaactgcaccagggagagactaacaattaacttctct

SEQ ID NO: 136097 - DNA, 1743 bp, Homo sapiens
tgccattgttataaatttgaccaatgtgtaatcttttatcacactggcttctttggaaacatggtggacagtcataaagtgtgtatactctgcccagccagaacactcctcttttttttttcttttatttcttttcttttctttctttctttcttcttttttttttttgagacagggtcttgttctgtcagcctcctgagtagctgggaccacagatgtgcgccaccatgcctggttaattttttaaaattttttgtagaaacggggagtttcaccattttgcccaggctggtctcgaactcctctgcctcccaaagtcctggcattacaggcatgagccactgcgcttggctcagaatgtggattaatccaagctttgaatcttcctctcccaaaagctactgaaaagtcactggggctcattaaaaaatagctcttctaatcgtttttttttttccacttgtaattaaatagttacatattagagccctggaatactgtacaactcacttgctatttagcagactctgatttggggatagcttgcattaaggtaagagcgcaccttctctttatgataatgagggtatcatttgaaagcctcatgggagtgcgtgtagtagaactgggaggggtgtcaagaacaaggctggttcggtcctggtcttcagatggaattttatcagcccattttatagatgaaacagctgtggcccaggcagggcaaatggtgtatcctgaggtcacaaactgttgagtcctgggaaaggccctaagaatcagactctggccccagtgttcaagcctgctgctccccttcagtcagtgccatctgcttgggtctgggatctcctgcaatgccatattgaataccttcgtcacatcggttaggtgagggtttgccagccttggcattggggactttgtgagctgaatctctttgctgtggggctgccctgtgctttggaggatgctcagcagcctccccagcctctacctgcttgatgctactgtcacctctctccaggtgtgatgacaaaaatgtctccagacattgccaaatgtcctctgggggcaaaattagcctggttttgaatctcttttgttagattaaccatatatcacctttgctcttaaaggattcttgctcttaaaacttctgtttctttttgaatagactggcctttagggtggtgtgtttagaggcctctggcattgccagtgtttgcatggagagctgttttcctcccacgcgttggccctgagaataggctttatttacatagtcaaactcaaacaaatacttgcttcatctgcattttttgtagctggagaaaggaaattgaagcaggaactcccaagtgctgtgttttatgggcatccacagtggctgttcagaatcaggactgactactctctgggtctagtttgaagctaaagggataccaacttcagaggagtagcattcttggaatttggggtgcatgcatgaagcccagcagaacctccgctgacagatggcgacaggattcatcactcctcagtacgtttctgctgatttctgccttgaaattttgctacagttggtggaaaaaatgcactcaaacccatatttccatgctgttgttagagagggggcaggaataacatccatgctgtaggaatctatgtaacggaagtagagatggtggatatatgtgatcctggtgggttttttgcatgtttctgttcccatccattcaa

SEQ ID NO: 136098 - DNA, 1029 bp, Homo sapiens
agatcagagtgaccaccctggtcgggatcagttcttgtctcatatgccattatattggctcccaagagccaaccaagctctttgtgaaatatcagtaaaggttttgaaaaagagggacctgatgaattcagcagtgggtcaggagcgggtgactctcaactttgtggctgctggtggatttttgtgcccagatgcagtgtgcggtcaacatctgcacgagggagtgctgctgcttctccaggtgtctgagaaccagtgggtgagggcttggatctcccttgcctctgccatctctaagtgatgtccgagttgtaaagctttactcactttttgatgccagctaccatgttttcttcagctattaggataagtgtcattataaagatccatctgtatttaagaattaatagtaaggttaaaaaccaagaggtgagctttctttcctgtgctgaaagaccctttcagttggtaggcccgccttgccaactggctttcaagtctatctttattaccttttcccagcctgtgaattaatgtgaccctgctgaattctcatccttgttctccggcgatgttttgggcaagagtgtggagtcaggcagtgagcctcaagtcctattccagggtctgggagctggaggctttgagggtcagctctgggaggattcttcctctcttagacattaactcagcttgactcacgcctatgaatccagagccttctgcgattatgagaagctgtaaacataagctatgcatctcacttctgtaccaggatgcgttcggtcttcatggctcagttatgagtatttcttaacatgtcgtaacatttatcttttgaaaaaaaaaaagaaaagaaaactagtttgcccaagagctaaaggtagaatagtatgataatgaaaggctcagaacaagtagcagttttcaccttgtcctaatgagctgggggtttcttaatctacctttgtaattcatggtcaaaaaaactggcttgccacttgggaagggctggtttttctctttgga

SEQ ID NO: 136099 - DNA, 1051 bp, Homo sapiens
tggctgctttcttccctgttagaggttgtcttcaaatgtctagtgctccttggccgtctgctggtattgaaggttgcgttccccaaaatgctgtttggacactccgtgcatgggggtgagtgatcaggtgaagctgtttccctgggtattcctctaaggctgtatctttctctttttttttttctggaggggcagggaggcggccatgtttttgtcagatactttttttctacttaataaacttctggtgtagtacaggttgaaaagtaatgggaagtctgccagttgaggggatctctcctttgctcagctgggcgagggtgatcatctctgccccccaactttggctgtagtggttccagtttggagggaaggttaccactaggcagaggaggcagtgcttgcttgcttgcatccggagctggatcttgctctcagttcctaaccgtttctaatcagtaatcctctgtctgtccaactagaatcattcctattttattgtggtatcatggggattaaatgaggcaacacataaagctatctctagtaaattcaaattccccctcacttctcttcctcactttccctactcaatcctgattcattaagaatttggaactttgggaggccgaggtgggaggattgcttgagcccaggaagtcaagacaagcatgggcaacaaaatgagaccccatctctacaacaaatagaaaaattagccaggcaaggtggtatgtacctccagtcccagctacttgggaggctgaggtgggaggatcgctttgagccaaggaggttgagggtgcagtgagccaagatcacaccactgcactccagcctgggcgacagagtgagactctgtctcaaaaacaaaaaataaataaaaaataaaaataaaataaaaaatacatctaatgcccagcatcagtacatttcctatgttatttgtagcccaccagaagtgattctttcctctcctctaccaaaaaacttttttccagaataatagtgtttcttatttttataatattaataaagggagtagctcttt

SEQ ID NO: 136100 - DNA, 1457 bp, Homo sapiens
gaaagtgctgagattactgatgtgagccactgttcctgggccagagtagggtgttaaaaaagtagttttgggaagtggcaatagtgggaaagatgaagattcagtatccctgtgacaagactctatttcttcactctttcaatctttggagtagaaaatctgttagggtttagagtgggacccacaagtgtggcagaaatgctgcctgcccgagtccttgttgcctcctcctctcagacactgttgggccacatttcccagcctccctagcagttagctgtggcctcctgacgcttctaccctggggagtgcagctgcagccatgcctgccattttacttttccccttctggctgcctggaatgaagatggccgcagggcagagttcatcagcgtggatccctgaatgactgcagaggtggctgcccatgctatggtcaccatccatggtgagcaagaagtaagcctctgctgtgtttgggccattcattgtatgttttttggattacttgctgtaacagactattctcacaaatgaaatgctgggagaaatcagaagttttccttctagcaaatatacccagctttaagaggcggaatatacggtgcttcttttacacccatgctggaaggagtgaggaaagcatcactgtgggtgtccaattagcatgaagcctattccctgcacacttattatataaaatgagacctccacgcccattggcgtctttccacctccttacccttttctctcagctggtaatttattcacccccaccccccacttgctcttccttctcctccccggggatgatttcctgggagccctggagcattggggcaggaggccgggagaatgcccagtctagataattagtcctaggtggggctggccggaggcacagtgggtggggtgggtggccagctgctgttaggatgatttcagggattggaccttcctcctggtggtggtgtcctttctttaactgccttggttaaaatgcaaatgttgcctgggagggctacacattgtcatcattaacagaactgccttcatcagattaattaattatagttctgtatggcagacttttttccccctggtagtagcacccagacacatgaattagaccagcaaagagaggagagataaagttgaaagccagatgaaagccaagtaaaactggcctcgggaggaaggtggagctggcggagtgggagtgctgaggaaagaccttgtctgttcaggtactggccgcctacaaagaggagttaggacagcctgtggaggaagctggtagggagagcaggggcccaagtccagctgaaaaccctccctggacttgcaaaagaggtgaaagagattctttacctatggcttgcagattctgaagctgacgaaattccacatctattggtgttaattgtgcatctgtttgcaaatttgtaaacatggtg

SEQ ID NO: 136101 - DNA, 2170 bp, Homo sapiens
gtgtccaccaccagtttttcaaaaagaaacatgctataaataagcaaactacatctgctcactgatgtgtgtatggactccctggatgtctcattgagcttaattacagaccactcacagtaatggatttttagtgtatagtgtagcttgatgttaagccattttagcttttgcgcatacatgttgtgctggctggtaacggagaagaatttgcagcattacaatgttaagctaggttgtatccatcccattaaatggcatcaatatcaatgtcatcatccttgttgttggactttacagtttcaactttaggtacactggcagtcttctaatacaccacctcaatgttctcatcttcatcttcttcaccaccagaagattcttcctctgcctccattttataaatggttctactttgacacgaatctctttggcaggttcttttgagacatgtttcttaaaggcctttttccgaccagctgatgacgacctcttcttctaaaaaatctacatcatacatctccttcaagatatttggaatcttagagataagctgagcttggtgcattgctaccccacacgtaaagccatgaagaaggtaccattgagcttttttgttgttgtgacaaaatcataagaaatggtgcctgtatttcttatgtgttctctaatctcctctttaaaaagaacttcagtcagaacaagagggcccatggctttaacatccagtccttctgcttcagtaacaatttctttgtcacataaatcaatgataccctcttctttctttttcttcacaaaatcaaacaggatgttggcccgctcctcaactgttttttccaaatcatcatggagtatcagaacttttgcatgatcactgatttcatccattctgcacctttgagcttcctcagttgtatcttccccccagtcatcctcctcttcttccactgtatgtggaggagggctaatttctttggtggtggtgtctcactgctggatacggagccattttccttgtctttgccctttatatttttcttttccttttctttctttcctgtaccactgtcactattctcaggtgggtttttgagaatgaatgtgcagagtttatgatgtgtgtcaagcatgcctcgatagccacaggctttataagaattacctattgtttgctgctttggcttgacatgcatatctgtttcaggattctcacattcaggacagagaacaaattttttaatgagtccatccaatatgtcttgcagcttattggcctcctgagatccattcacaatgtaacaatgtatcccaccaaaatacttggtgggataccttggaggccaattaagcgcctttgcagtgtcagtcatgttgactataactgtcttgattccatttcctttgccctcaaccttggcaatcagacagggcatcttgtaatagaactggtctgatatgctggggttgacgttgacagacattttggcttattggtggctttatcaataagatgaagagatctttgattgcagcttttttatatcttctgtctggagaagaagggatgacataaacaactgcaaaagttctcggtctctaatgtgaaaacattttcaccactgaggctgtaagcgtcttgcttgtatgctatgtttccccaatacaggtactaatggctgcgcaaaagctcttctggtgaaggcctccctgctctcccacgcttgaaaagcgctgtccttcatgcttccctgtcaccttgctcctagcaggcatcacgtcgagtccaccctgccagtttatctttttttttttttttttttcttgagagggagtctcgctctgttgcccaggctggattgcagtggcgtgatcttggctcactgcaacttccgccacctgggttcaagcgattctcctgcctcagcctcctgagtagctgggactacaggcacctgccaccacacccagctaatttttttaatttttatttttagtagagatggggtttcactatgttgtccaggctggtcttgaactcctgacctcaagtgatctgcctgcctaggcctcccaaagtgttgggattacaggcatgagccaccgtgcctggctccctccacctttaaaattttttttttttttcagattatgtttttcgagcctcaag

SEQ ID NO: 136102 - DNA, 1050 bp, Homo sapiens
attttggtgggatacattgttacattgtgaatggatctcaggaggccaataagctgcaagacatattggatggactcattaaaaaatttgttctctgtcctgaatgtgagaatcctgaaacagatatgcatgtcaagccaaagcagcaaacaataggtaattcttataaagcctgtggctatcgaggcatgcttgacacacatcataaactctgcacattcattctcaaaaacccacctgagaatagtgacagtggtacaggaaagaaagaaaaggaaaagaaaaatataaagggcaaagacaaggaaaatggctccgtatccagcagtgagacaccaccaccaaagaaattagccctcctccacatacagtggaagaagaggaggatgactggggggaagatacaactgaggaagctcaaaggtgcagaatggatgaaatcagtgatcatgcaaaagttctgatactccatgatgatttggaaaaaacagttgaggagcgggccaacatcctgtttgattttgtgaagaaaaagaaagaagagggtatcattgatttatgtgacaaagaaattgttactgaagcagaaggactggatgttaaagccatgggccctcttgttctgactgaagttctttttaaagaggagattagagaacacataagaaatacaggcaccatttcttatgattttgtcacaacaacaaaaaagctcaatggtaccttcttcatggctttacgtgtggggtagcaatgcaccaagctcagcttatctctaagattccaaatatcttgaaggagatgtatgatgtagattttttagaagaagaggtcgtcatcagctggtcggaaaaaggcctttaagaaacatgtctcaaaagaacctgccaaagagattcgtgtcaaagtagaaccatttataaaatggaggcagaggaagaatcttctggtggtgaagaagatgaagatgagaacattgaggtggtgtattagaagactgccagtgtacctaaagttgaaactgtaaagtccaacaacaaggatgatgac

SEQ ID NO: 136103 - DNA, 1031 bp, Homo sapiens
gtctgtgtgccctcgcttctctccctctctagctgtccttcagcctcagcctcagtctaccccccagcttctctctctctctcttttctccctctctaccccctccttctcccttctctctctccctttccctcccactgtttttcttttacagctttatcgagatatgtgattttctttctttttttttgttaagagacagggtctcactatattgaccacaccggtcttgaactcctggcctgaagcaatcctcccatctcaacctcccaaactgctgggattacaggcgtgagccactgttgccggccaatttctacactataaaattcacccattttaagtatacaattcagtgatttatagtgagttcaaaggtgtgcatccttcatcatgattcaattttagatcctttccatcacccccaaaagattctttttattcctttaagccatcccttctggttcccaccacagccccaggcaaccatgaatctcctttctgtctctggacttgcctcatttggacactccctgtacatggaatcctgcagtatgtggtgttctgtgactggctttttgactccgcatcatattttcgggattgatccacattgcaggtggtatcggtactccattcccttccggtgccaagtgctggtccttggtgcagactgaccgcatggtgctgaccagtgtgtcagctgatgcacggtctcattgctttcccgtgccaccctgacaagagtggttcccacttttgtgggcacacgggagggggtctcggctctggaagtgaccagctttgtggtttgtggggaggctggtcgcataagtccttagaacatcaactgtcacttgggagccgggattgttagcataggattgttcaaaaaatctaataagccaaatattttaaaaacgtgtttcatgttgcctctctctgacctcaggaagtaagtcactgtcaattattgtcgtgtgagcaaaaatctccagcttccttcaactgacagttcaagggatagaggc

SEQ ID NO: 136104 - DNA, 1069 bp, Homo sapiens
gctgctcatttccccatgagcagtcactacccccgacactgggtagtggctgctccttcagaaggaaggaccctgtcccttcaccacaatgcccagtgctcgaggctgtagaccccatcctgagggtgtgtgttctatacatgcagcccctccacttgcagcggcccctcccagcctctgcgagcgctggcgtgtgcactccagggctttatgttttccccgtgttgccttcttaggctctgctgcctaggctgtgacaaaggcatccctgaagagagttgttcaaaaaagaaagatagcccttgtgacgggtgagatcatccatatgttacccaataaaaagtcaaaggcttgaggggccctttgagttcactccagagaaaggtgcagcagcctcggctcagtgccccctaggcctccctgacgttgcacggcggcagcattagattatctcactgaacaaggcccgtccctttgaaatagcagtaggatgggaatgtccattaaagtaaacagctgtgcgttctgagaagcggggacactttgttctaatggccagcagttccttttcctgtttcttggttgcctatcagttctttcagatcgccttttcactttgaaaatgcaaaattaagtaatcccagttatctctgtttaagcgggtgcttcagtgatgtgatgacttgctttcaaaagctcagtgaggccgcgcacggtggctcatgcctgtaatcccagcactttgggaggccaaggcaggtggatcacctgaggtcaagagttcgagaccagcttggccaacatggtgaaaccccgtgtctactaaaaatacaaaaacaattagccgggtgtggtggtgggcacctgtagtcccagctacttgggaggctgaggcagaaaaatcgcttgaacccaggaggcggaggttgcagtgagctgagaccgcgccactgcactccagcctgggtgacaagagcaatactctgtctcaaaaacagataaaaaagctgagtgagaaggggtgaggatctgggcaggtctgcgttctgtgttggctggaagcctgctg

SEQ ID NO: 136105 - DNA, 1138 bp, Homo sapiens
cagggagaattgcttgaacctgggaggtggaggttgcagtgagctgagattgcgccactgtactccagcctgagcaacagagcgagactccattgatggacttgaaagaccaggaatatggtacaggttttgttttttcctcctgtagtgctaagatgaaagcagggctttagacaacgtcgcttatgttcgatgattctttttctctctgttcatcctctccagaaacattgcctattgcattgcgaccagcttttgtataggaagggaagaaacagatatcatttgggttttgtcatcagtgagatgctagtcttgttgtgggatgagaagcataagctggtaactgtcagcagggttaggagcagatagtggccatgtgctccaggcactagggaggctgggagatgtacagagtcccttggtggagacggtggggttcaagatggcgtcctgagggctgaatgtgggcgagctgggcagagtgtgtgcacagcagcgatgggggtgcatggtgtttccagaggggacccagtaaacaaagctctgcaggcaagaaagaccactttctctagggaggaaggacaaagggcctgttgttgcgggtgtgtgatgtttgggcagggtggggatggtgtccagaacagcaaggcttgttttacatggtggtgagtaggacttgattaaatgcagtgcctccctccctccccctcacctgatcaaactgctcttttgcgttgctgctagaggcgagagagaagatgatttgcgtgaggaagacggctgcctgtttcctgccgtggtaaatggattttacagggcaggaggttaaagcgtgactttagaggtgccttggttttgttttactgttccacatgagccatgggtgaccatttctaatacgttatcctttctctggaatattggtggttctcccctgggggcagttttgtcctccaggagacatgtggtaacatctggaagcatttgaattggtcacaactcggggcaggagggtgctactggcttctagtgggtagaggccagggatgctgctgagtcccctgcaatacccagggcagccctcacggcaaagaatgatccggccccaaatgtcaatagtgctgaggtggaggag

SEQ ID NO: 136106 - DNA, 1036 bp, Homo sapiens
ctcaaaactcctagtctcaagtgatcctcctccattggcctcccaaagcactgggattacagatgtgagccaccatgcccggcatatataatgtgttttttaataccacttaagctctgatttcctcgtgttatgatgaaaacggatactttgtcactgtccctgagagtggagcagcatagcctaggttccactggcagtttggacatgaagaaattataacaacagcagaataagttgtaactgtacttgtagcatactttagagtttgcaacatattttcataattgtttcactgttatcctcctggtcgtcctaggatgtaagacaaccagctcttaccaccatttttggggtgataaaaccaagagtaggaagcatttctccaaattgtgtacgtaagtggcagaggcaggtcttcagtaccagatcattcctcatcttttgaaacgctccgtgcccccaccctctgatgtgattattccctcctgtctgccaccaggggatcctgtgcatgtctgtcactgcacttgcctcatgggatttgtatcagccaggatctagttaggagacggaagccacacagtagttggaacaggagtgcttcataggaagcgggatttcgtggactgaccaaatcccaccatgcccccgtgcttacggcttttctgtttacagaagcaaggttgaacagttgcacagagatcgtgtacatgcaaagctcaaaatatttacattacggctctttgtgaaaaagtttgctcacccctaatgtaaagaactattaacttgtggcagtttattatctattatcgacgaattattaactagtagctactataggtaaggagaactctaaagaatacgagaatagcagatagagggagtggccactccctccagggctggggcacagagtacctgaggaaggaataaatttggaactattctccccaccccctccaaagctgagattcgaatctcgatggaagatggctcactaggtagtggagaaagtcgctgagggccaccgctg

SEQ ID NO: 136107 - DNA, 1116 bp, Homo sapiens
aggaattgtctctaaaagtcgctgggaagctgcccgccagagcaccagtggaacttgctaggaggccgcccttggagcttagtgccactgtgtgtgccacatgactgccaggtcccactggagcaggcagggaggaaagcacgctggaatgatgaaggcaagccctttccaccgcccgcgtgcctccaccgccctctgctgatggtgctcaccaggtgccagcactggagaaacgcccacagggtcctgctccaggatcaccatgtgggcagtgaaggtgcatttgggatgcagaggcaatgcattgctaactggcaatgttgcaacaggttgtcttcagagctgcactgtaaattcctctgacacacgatggtgttccagaaatcctccctgaacgttgctccccattaaccatctcttaggtggatctcggcctgtgctctgtgaaattcagggctgacatggtggtcaggatttggccaagtcctgaggccccaggatctttgctacatgtggagaggaggcacacacctttgggctctatgctgacctccctccaagaagactgtcaccccttgccacagaatgcacactcttcttccggtcccgtccagttggcctgcattctgacgctgcagctctcacctgcccagggcacattccacccctgcccgtttctcccagtcactcctgggacagtcagcttgccttccgttgctctgtagaaatgctgtctgccaactcagtctccaccacctccagatcttcacctcatctccctccacatttttgggagccacatgcccccttttcacctagccgatcacccagccgtaggttttctgtcatgacactcccttggcctgtgtgtccattagcatggctttgtcacctggtgcagccacgtcctcgtcctctcctcatgcctcatcctcgcgcctctccttgccatggtgcctcgtgtggtgcagccctcattttagggagagatgaaacaagggctagacctttgtggactgaatacctccttgagcatctagttccaaaacacacgaggagggttttggtttattttgttagtgttatttattatttttttttggggggggtgtatat

SEQ ID NO: 136108 - DNA, 1522 bp, Homo sapiens
ttagggctatgacaaaaaacagatacgtgttagcaaggatatggagaaattggaaccttcatacaccgatggtgggaatgtaaaacggtacagctgctgtagaaaacagcctggaagctcctcaggttgttaaatgtagttatcatagggcgcagcagttccactttataatagccaaaagtagacactgatgaatagataaaatgcggtctgtccatacaagtgaatgttactcaaccataaaaagaaatgaagtactgctacatgctacaacgtagataaacttagaaagcatcgtgctaagtgagagaagccagacccaagaggccacatattgtattactccatttatgtgaactgtctaggacaggcaaattcatggacacagaaagtacatttgtggttgccagaggctggagggattggaaaccgagtagtaatgagcacaaggtttctttcggggttaggggaaatgccctaatattgatggtggtgatggttgtacaactctgaaaatactaaaagccatgctttatttgagtgaatatatggtatttgaattacatttctataaagctattacaaaaacagtctagttccaggattaatgtatgagaaataattaataagtaatttaaaatggtcaaaaattattgtctggttaaaggagatctagaaaatgaatcagtatcttcaggtcccctgttttccattgtgtgtgttctcaagctttcccattccctggataaacaggagtcgtgtccagggaaggcaggccagggtgaggggtgtagtgcatccctgatcccctgagtggtaataaggtcagcccccagggcccattcccgccaagtgtgaggtatgtctgctgcgttccgaggacctgctctgcctcaggaattgctgctcgtggaaggctcatggaacatgcttctctgttacagattgaagagggcagtaaagccgcggcggtcgacaagttactggctggagatgagatcgtcggcatcaatgacattggtctctcagggtttagacaggaagcgatttgcctggtgaaggggtcccataagaccctgaagctggtcgtcaaaaggtaagatctgagcttcctcccacatttaccacgacacacaggaatgagtggaacatcaaagtgggaagccagttgtcctgcccacatcactacagagatctcgattgggacatgcacttagagttatatgtctcggccaagcatgggcccggcatcaagagtctgaacggttcctaattttattacgacgatttttataaattttaatgtattaagtggatttgaatactcgtatctttcctttgtttatatgtagattattttcttggcaggcagaaaacggtgcttatgctcccagtgaggtgacatgttgttgcctgtcttgtacacaaggtggcaggccactgcgctttctgttttcatgctagaaagagagtgactgtcacgaagatgccagccaccaagggtttagagcactgtgctgag

SEQ ID NO: 136109 - DNA, 1015 bp, Homo sapiens
tcccgctgccaaggctgactgcaactcccttttcttctgtctcctgtactgtctcgttctgggctcccagagaccccaaaaacactgggctgtgcttgtggtcttactgtgtgtctcttctttgatggagacaccagcttagtcagcatagctggccaactttgtatcaccagggcatagctatgcgtagaaattcctagcatgggagttcctgagtcggaaggtgtgtccgttgtgaatgttcagagacatttctgagtttctcagaccctttcacatcatctctagcataggatatttgtagtttgtttgtttgtattctctgaatgtgataggtgaaatatggttttctatttacatttgcatttccgtagttatgggagtgaagtcaggtatcattccatatgtttagaagcaaggtagatgtgattctttttttgagctagaagtacatatttagtgataaagatagacagtctaaaatctgttcaaaggaaagccatgccacaggagaactggttggtgggaggagagagcgaagcctcagggcatctgctggctggtttcactgagtaggtacttaaaagactcttgggaaaagggattaaacttttgccctgaaggatctccaggagccactgtgtagaatccccattttgtgttctgcagacccactttcctttaaatgagagatgtggacaaaatgataatgtggtttaaatagaattttatttaagtagtatgtgtaacgagatataaagcagcggagtttatttacaaatttttatttcccaacacactttcaataaccgtgttaggaaaaaacccacaagctgtttttcctctgctctcacacaacactcaacacagaagacttctgtgaccaaatgtgcatagaacttctaatactccaactacctttatgtggttttccttactacaaaagcaccaatgggtgctttcaaaattgttcttcttaaagccagaacacgtattcttctctatctaaatttaa

SEQ ID NO: 136110 - DNA, 1074 bp, Homo sapiens
gctcactgcagcctcgaactcttgggctcaagcgatcttcccaaagtgctggaattacaggcgtgagccgtcgcacctggcctctccatggttttttaaacatgatttgaatagtggttcacggataaactcccctccctgtagtgacagctgctacacgtcttattttgtaggctcattttatctttgtatgtgtggggaccaggggaccaggcagccaggataggattgcgatgggccactttcacaaagcggtggcatcttgtttcacaggcatgggcaacgtggaccttgtggtcgttgagaagctggtgctgggaaagcgatgcgggaggagacaggcggatcactatctccgcagacaaatgagggccagcgcttcctctcgcccagggcagtgggagctggagacaaagaacttgtaacaatcagccctaccaagtgcatgtatgttcttccttgtgaggtccaggtggcatccacggcccgagatgtcaggggaggggtgctgcccaggagtcagatctgtcggttaggtcaggaggagaggctgaggctggcagttttgcttttctctttcttcccaggcggtttgttgttctgtctctacttggcaggggagtgctccttgcaggaaagttcagggcagacatgtagccttttattatgtgtatgtgtgtgtccagtttttttccactgcactgttttcctaggtgcccaggcccacccctggagagtcctgggcaggtcttgaatggatctgggctctggaatcttcacacagagccacaggctatttcgctgggcattagcagcggatctaccgcttgctggccttaagcacaagttcttgggaaggttaaggccagaaaccgggtgaccctttggcattttcctcattaacttagcccagttgggttagtgcaaaagggaggtctgcctgatgccctcaagctgctccggaggagaggaagcagggttgggagggtggggaaggaccgagaaggggacggcagctcctagcttagctgggctcatcctatccactcggtgccagggaccgtggctgttgcc

SEQ ID NO: 136111 - DNA, 1025 bp, Homo sapiens
aattattttctaaagctttgcaattacccttttggctttttccccaaatatgcattataatattagttttgtttacagcaaatccacctgccaccttgtcacagaccccactctgggcagtttctcttgaaccggtcatgtgttgcgagtcattttgtgggggccaaatcgtggatagggttgattcatgtcacttcctgcctctttgctggcagccctaaaccctcttgtgaatctaattacatccactaagcttgcattcaggagcagcttagcagcagagggaagggttttctgcatcaggctgcaagggtttgcgagaccatgtggtgtggtcctgcatttgaagagaagaggctgcatgtcgagggagagcactcatgtttgctaggagctggtttcttacaacatgcgtcccgtcttgggcattgctaaggtgccctgactgctgctccaagcccacattgtgctgtgcccccctctgctgctggctccttggagctgtcctggagcaggtggccctgcagccctaaggttgattagcacagatgttccgggagctgctactcgcaacggtggcagcagtaaggggccgcctaagacgtcagcaggtttacacccccaccccactcccccagcaccccaccccctccagaactactcctgaggcagaaatggtgcatggtcagatggagggcatgctccttagtggggacactggaggacgtcaggtgaaacccatgccttcgaggctgtctgatgtctttgtctgtgattcaggagtgggtatttctattctgtgagcatttggggtctaatggctgtttgctactgtgcttattttcttgttaaaacaaaggagaccctgactggtttaggctattttccattattgtttttatttcatttatttattttattatgagtgaaggaaagaaaggagagagggagggagggaggatgggaaggaaggaaggatgaaatcttgctctgttgcccaggctggagtgcggtggctactgaca

SEQ ID NO: 136112 - DNA, 1369 bp, Homo sapiens
cacagaaacatgtctgtcctgcacatgagacccacggttctagggactaggtggtttaaagtgtttaaagagtgcgtggcttgtgcaggaggaaacaccacagccttcagtctactcaagtccttctgggagcccttgaaactcagccagagggaccgggagtgtaggcgggctctaggtggcgccagagcactctgtccccaactccacgggtctgtgattgagcgaccagcatgtaggggctgaaggtcctccccaccatctccttatcaacaccaatccagccatttcagaggtgccaacaaacagaaaccactctgaccccggcttgatccccaaatacattcattatgcaccaggaaattcagaagacttgagaaaaaaagcatatatattagtaaattttcactgtccacagtaaccaagatatcttcagttaaagcagaaagagtgcaactcttttcactgtgtgtcttcatttgcttatttaaaaaattatccctaggccaggtacaggggctcacgcctgtaatcccagcactttgaaagaccgaggcaggcagatttcttgagcccaggagtgtgagaccagcctgggcaacataacgataccccatctctcattatacaaaaagttagcttggcgtggtggtgtgtgtctgtggtcccagctactcaagaggctgaggcgggaggatcacttgagcccaggaggtcgaggctgcagtgagccatgattgcgtcactgtactccagcctgggtggcagagggagagcctgtcaaaaaaaaaaaaaaaaaagccacaattcgtataagaactgctgaccgtgtcatatgtaagaacacatatatctgtatattatctttttaaaaagcagcttctgggtttgttttcattttttcattgcctcatacagcattgctcattctcttcagacagtttggaaagagtgtgtgcttgtgcaggaataaaccaggtgagatgcattttctgaaggcatggaagtctcacttccaggcaggttccctgcctgcctccgacaactcccacccaagatgccttctgcacatgcattcccgtccatggggagccctcttccatgccatcagcctctctggctgtgacgcccctgttcggactgtcctatcttcctctttccctggcctgcattttgacctcaaccctgtatctttttgtccccgccgatggacacatccacagggatgtcccatagctatgggagatgcacaatatacactttgggtttttgttgttgttgataattatggtaaaatacacataaaatttaccatcctaaccattgtaatgttcagtagcattaagtgtattcacatcatacaaccaat

SEQ ID NO: 136113 - DNA, 1135 bp, Homo sapiens
tattcccgaagcagggctgaactagcgtcgtcttgagtgtcagacgttttcttttcctagccttctctttttctcccctttcctccagtttcagtcagtctagtttattttcttcattaattaactataaaggaagatgaaagaagttgtggatgtcatagcacagagaaagccagctgaaaatgaaattcacatggccagaaccttccttacgaggattttgagaaattccatgaggtacagtctgggttttacaattgctttccttccatggggtgctgaatttgtcttttatactttctctttggttcctgggaaactgtcataaagtcagcatgttccacattttgccacccgtatacttttcctcgttaaaatgatctgagtcatcgaaaggtttgtgttatacatgcttttcagttttattttgtaaaatgttctttattgcataatgttctttaatgtttttgcctgctgggaaaaacatctgatctccacaaagtatttaaagaggcccgcttgagctcgttctccattcttgattgggttatcagctgtcagttctgtcccaaattagagaaatgtaaagctggcttcctaccatgaggctggagaagtgagctcgggaggaggatctcacgcccagcagtgttcccctggaggccctattgcattaccgacatccattgggatttctaaccagacacacctcatcacatctgggcagatgtggccaagacactaagaagccacacatgggatggtggggactgtggcgggggagcccaggaaagctcgtccatattcaggagccctggctgaagggactttagccttttggtgtgggttgtcatgactccctggggggatctttggttgactaagaggctcaggggaagatgcggctactagtcttagttaaccagaaggtggctgtctttactttgttacctaggtaaatagacacagataagctgtctgaactgtgtgtgacccagccgcctgagggacccatataccttttctccagcaaaagataggagatgctgtttgtgttcatactggggcagggagagggcaacatttgcttacttatttatttagaataaatgttctttatttatttttacatttg

SEQ ID NO: 136114 - DNA, 1343 bp, Homo sapiens
tcctcaagccccctgcactgtttggcacgagcgtgtgccctgtgtgcggtccccaagccccctgcactgtttggcacgagagtgagcgctgtgtgcagtccctgaccccccgcctcccctgcgttcttttctaggaggagcgagctgggctggaggcctcactcctggcatgccaccaagttctctgacagccaccccgagctagcggcctccccattcacctccaccagcggctgtccttcctggtccggccgacaccacgcgaggtaggcacccattcccgtccaggatgccaggtttgttcagccttctgcagggagcgcactcctgactgcagaatgattttgatgtttctgatgagactgggccaccgacacataatcacagttggagggctctgaatttttgactgaaccggcaagcgtgtgacacaaaatgaaatggcaagacaaggcatgagcaagaaggggagcataggacttgggtttcagccaagcttctttgggattggccaggtgggatgccaggcagtagggttctgagccggtggggtggcatccacggcacccctctcctttccagggttttacacatggactggaaggcaggagatatatatggggtggcaggtatatcttgtaaaagctcccaagaggttctttaagctttggtagcctctcctcaaccctcttggagttagtggcagtatcctcactagtctcctgttaagaggatggcggtaacagcagatagtctgcttttggtgtgcgtgtgtggatgtctccctgcttgcgtgagtgtgtgtgtgtatctgtgtatgtttacgggtgtgagtgtgtgggggggtgtgagtgtgcatgtgtatttctacacgtttgtgtgtgtgtgtctttgtatgtgtatgagtgttcatgtgtctgttcgtgtgtgcctgtatgtgtgcctgtgcatctctttgcttgtatgtgcatgtgtgtgcacatgtatatgtgtatgtgagtgtgtgagtatcagtgagcatgtttggtgtgtgtgtgtgtgtgtgtgtgtgcgcgtgcgtgcacacgcaggtatgtgtctgtgtttggagctaatgtaaccactcagtttttggctgttaataaatgctggtcttggctgggcgcaatggttcatgtctgtaatcccaacactttgggaagctaaggtgggaagattgtttgagttcaagaccacccgggacaacacagcaagaccccatctctattaaaaataaaagaaaattagctgggcattgtgtgcacacctgtagtcccagctactcaggagactgaggcagtaggatcactgaagcccaggagttc

SEQ ID NO: 136115 - DNA, 1048 bp, Homo sapiens
ggccgaggcaggcagatcacttgaggtcaggaattcgagaccagcctggccaacatggtgaaaccccgtctctactaaaaatacaacaaaattagccgggcacagtggcaggcacctataatcccagctactcgggaggctgaggcaggagaatcgcttgaacccaggaggcgaaggttgcagtgagctgagatcacgcgtctgcactccagcctaggcgacagagtgagactgtctcaaaaaaaaaaaaaaaaccaaaatcaacaacaacaacaacctgagttgtggtgtggccacccctgcgcttaactgttgattgaccatagacgtgtaaatgcagacgttgcctgccaacgatccgggcatcaggctgagaatgtgcgctagggttgcaaggcatctgtttggtaaaagccatgtaacagggaggacacagtcttttcagcctgtgcccagtttctccgtgtctctactaaaatccagatgtgctgagctgcaacctcagcctcagcaacatcaccgtgggaaattactgtttggcattttggtatttccacagagggtcagctgcgtccaccgccttgccctttgccattgctgttgctaaagcacaccatgccttgtccttcttctcattcttgcagttcttcctcccacgacctgtccagttcctgggagcagacgaacctacagcgcaccttagatcacttcagctccttggggagcgttgacagcctggaccacccctccagtcgcctctcggtggccaagtccaacagcagcatcgaccacctgggcagccacagcaagcgcgactcggcctacggctccttctccaccagctctagcactcctgaccacaccttgtccaaagccgacacgtcctccgcagagaacatcctctacactgtgggcctctgggaggctcccaggcagggtggccggcaggcccaggccgcaggcgaccctcagggctcggaggagaagctcagttgtttcccgcccagggtccccggtgacagcggcaaaggccccaggccagagtaca

SEQ ID NO: 136116 - DNA, 1523 bp, Homo sapiens
gaggcggctgcggcacagcactttacggccctggcccaggctcagcctcgtggtgaccggagaccagagctcaccgatcggccttggaggtcagcacacccggggagcctcgggaagggatcgggaggcccgggctgcccacaggaggcccacgcagacggcagctggccgccctccaaggatggagcttccagtaggctgcaggcctctctgtccagctcagatgtgcgcttccctcagtctcctcatagcggccgacaccctcccctatacagcgaccacagccccctctgtgctgacagccttgggcaggagccaggggctgccagcttccagaacgacagccctcctcaggtgagggggctcagcagctgtgaccagaagctggggagcggctggcagggtccccggccctgtgtgcagggagacctgcaagcagcacagctctgggcgggatgctggccttctgacacagcccttggagccctcgagagtcttcccccacccacggtgggccagagcccacgccatcacctacctcagcctgagggtcctccggatgcccgcgagacaggacggtgttacccgctggacaaaggggccgagggctgctccgcgggagcccaggagcctcccagggccagccgtgcagaaaaagccagccagaggctggcagccagcatcacgtgggcagatggggagagcagcaggatctgcccgcaggagacgcccctgttgcactccctgacccaggaggggaagcgccggcctgagagcagtccagaggacagcgccaccagaccgccaccgttcgacgcccacgtgggcaagcccacccgaagaagcgaccgctttgccaccaccctgcggaatgagatccagatgcatagagccaagctgcagaagagccggagcacagtggctctgactgcagcaggggaggcggaggatggcaccggccgctggagggccgggttgggaggtggcacccaggaaggacccctcgctggcacctataaagaccacctgaaagaggcccaagcccgggtcctgagggccacgtccttcaagcgccgcgacttggaccccaacccaggagacctatacccggagtcactggaacaccggatgggggatccagacactgtcccccacttctgggaggcaggcctggcccagccaccctcatctacaagtggcgggccccacccgccccgcatcggaggccggagacggttcacagctgagcagaaattgaagtcctactcggaacctgagaagatgaacgaggtgggcctcacgaggggctacagtcctcaccagcaccccaggacatctgaggatactgtgggcacgtttgctgacaggtggaagttttttgaggaaacgagcaaacctgttccccagaggcctgcccagaagcaagctcttcacggaatcccgagagacaagccagagaggccgcggacagcgggccgcacatgtgagggcacggagccctggtcgcgcaccacctcccttgg

SEQ ID NO: 136117 - DNA, 1048 bp, Homo sapiens
gaagtggacgtggggtcttatttcagtcatctcaatgaaatgctttgtagaactgccctggcaaggcaaacccacaaatgagggctttcataatcacagatgtcctgaggaaggcagcttgaggacttggtgtctcattatgttgccctttgcaggaagcttctgtcgaactgcgaaggcaggcaggggaccccggcgagcccagagaagagcttccctccgcagtccgggccgaggagggacagtccacgccgaggtgggtgaaatttggattcagagttactgaagaggcgtctgagggtgggcttctgtacgatgggtgggtgcttggttaacatggctagatgtctggcttttgccaaacccaaagcggctgaaatccggcgtgatttctagcatccctgacgtactggaggtctgggcagagcctgtgcaccctgcagccctgcctggagacacatcccagggcggggaggccttcttacacggcggtgacattttttggttcttaaaatggctactgtgttttccgcacggtgagactgcttatggagacataatgagaagtccagttgaacatactggagctgcacgctttgcacagagcgccttatggaagggcagctttagctatctagcacacagctgtgtgcctagccgcggcctggaaatcagagttgcctctaaggattgttagtaagaaaggaacagggcaggccttcctaaattggacctagttaatgagttaattttgagctttaaaatagaaatcgagttagtcacctcccaaagagaggcttcaagcatctgcaggaactgtggcagcagcaggagattagagcgttttgtgccataattccagaatgtgcgccgtagccgcttagttgagacaaggacagggttagattaaatacatagtataatctgtgctgggtgtggtggttcacacctgtattcccagcactttgggaggctgaggcaggtgaatcgcttgagcccaggagttcaagaccagcctgggcaacatggtgagatcccatctctacta

SEQ ID NO: 136118 - DNA, 1028 bp, Homo sapiens
caaacacacacacacacacacacacacacacacacacacacacacacataaaggaagactgccccccaagccttttggggttttaaattacaagacacacacacacacacacacacacacacacacacacacacacacacacacacataaaggaagactgccccccaagccttttggggttttaaattacaagacttttggggtttaagcactgaagtgttgggaatgttccccactgaggcaaggagttgctgatgaagtgatgggaaatgcaagcggagccttgagccgtggaggtgaaggttgacggagcctgcgtgagcttgcccatcaacaagacagcaggcacagacaggccagctgttgtgagcttggctttaggactccattcagtaggcaggaggagagctgcagcagaggcgggctgtgggtccctgaagcacatcgctgccttcacagctgggcgaactcccatccagcacggtaagcagagccgggtaagggacctctgcgtttgctctcggggcacttcatcccagatgggaccggtttcaggacgcctgcgccgtttgttaggggtttgtagttcccagtggctcttttgttctgctatcttgaagggcaggttgcttgtcagctcacaatgctgtgggtaaggtctggtgaggtcggcgaatgtgttctcattgtttattcttctgcctgaagatgagaaataatgcaaatcagggtgcagattccggctcgagctccacaggcgtgcacgtatgtgtaagggcatgctcgccggtgctgcatgtcctcgtggatgcatgcaatttttacagctttgggattcacggttagctgaaagcacattggaactggaaggcggtgctcttaacaccgtgttctaggctggaagccgtagagccatcatctgctctgatgggactgcagcccttggtatgtgggacccttgctccatgtgagttctgcagatgggttccccgagggagctggctggaggacgccagcatcgcatgaag

SEQ ID NO: 136119 - DNA, 1028 bp, Homo sapiens
atctgtagtgaaatacttgtgctcttccatgttgatttccttcggataaaattctgggcatggagttgctaggcaggcgctagaaaatatcaccacgttgccctccaaaaagtgtatgcttactatttacactctaggggcaccgatcgcccaggacagtcctacttctcccaaaactttgtcaatattagacatttttaaaattctgtggtttgataggcaaaaaagttatttcatttttaacttgcatttcttcagggactagcaaagtcagacttttttggtgcactgactagccatttgtgttttttcttttgtacattactcttcagcgcgtgttcattttcctactgaagatgagccctttcttgattattgtcatttaggttgcagataacatccctaccgtgtgctgtgtgccttccagatgttagtgggtggttacagttcaacttttttgacatacaagtgtgttgaattttagcgttgtcgcccttgcacctggagcctctgtgtggccagttctgccttttggtggctactggcttctgttagttgtacattgccattactggtctcttgttaccatgtgtgccgcagaaggtgtagccaccaggagctctgtcagcatgaattccctaggaggtgtagacatccatctcggaaggctggtagaaaaattgtctctgtggaaaaattaagaagtgcccagctttccgacaaccctaactcatcgtagttcccatcttttgctctggttgacaggaaactcgtggtcctattggaagcacaaccataggacctctgtacattctcgtgtccggtctgctctttgcataagggtgcttgcccctgcttgtgcccttctgctttttgtttacatttgctctcactgtgatgtttttatgttcattttgatactcaagttgtgtgtttgttctcctgcgtgagacacttctaaacatttcatcatttagggtatacatagatcaaagtaagtggggaccacataaacatatgtagaaaca

SEQ ID NO: 136120 - DNA, 2247 bp, Homo sapiens
gggctggctcaacatccacattgcctggagggctttccctgaaacacaggcttgcaggcatgccagcccttgctatttcccacctctgcccaggcctggccctcatcaaggcgggagagcccagctcccagggctcacgctctggaaccaagaatgtggctctccaggcacagagacaatagaggcctggaacagatcctcaaaatgtgtgtgctgaagacatactcagggtccgatacttgagggccatctcacattatcatctccaaatctaggcaggttctgttattgggcattaacccctcgagaaatcagtgcctgtaactatgatttggatcatctgtgctttggatttctcttttaatcttctctgtctcctcccattcttaaccacaagtgatttatcagcctctctaattcaacttcattactctttgccatccaagtccctgcaagcacaaataaaacccaaaggaagcagcagacctttttatccatctgtgaagacactcaagaaacactaaattcatctgactttctagagtaattgctttccccacatggcactagaatcctggcatacagggagcagcttcagcagagacacggcagtagagaaatgactgactgaaggatggttcagggctgttgtcctccctgaaggtggttccaacaggacacaaaagttgcagcagagcctgtgagaacagctgtgtcctttgtcgtcactagctggtctgtctgttcattgggcaatttcagtttttatgactgaaagctgggcatgcaaaggacaaccaaacagcctctagcctgctgatgctcacagtctggaaagtcctatggtaaatcaatatttcttttttgcttttcagagacagtctcactctgttacccaggcaagagtgcagtggcatgatcatcgctcactgcagcctccaactcctgggctcaagcaatcctcccgcttcagcctcctgagtagctgggactaaaggtgcccaccaccatgcctggctggtttttcaattttttgtagagacagggtcttgctatgttgcccaggctggtctctaactccttgcctcgggcagtcctcctgccttggcctccctaagtgttgggattgcaggcacggggcaccacatccaggcttttttcatttgtttttagagacagggtctccctctgtcacccaggctggagtgcagtggtgtgatcatggctcactgcaaccttgaactcccagggtcaagcaattctctcacctcagcctcctgagtagttgggactgcaggcatgcatcaccatacctggctaatttttaattttttttttatttttattttttgtagagactgggtcttgctatgttgttcagagtggtcttgaattcctcccacctcggcctcccacagcactgggattataggtgtgagccactgtgctcagcctggtaaattggtatgtctaaggagagtgtttggtgccattgttcccaggtgttcacactgtttaaaatgtttctaatacatctcagcattgataggttggttgcttggttggtttcttgcctcttttgggctccatcgccttccccactgtctcctttttccacctcatctggcctttgtggagtgctgtgttggcaaaagagctttccacctgtgcctccccaagggtgtgtgtctgtaagagctgcccagggcctgggaaggacagtggagacaccaggtactcgttcgggagacttgtgctcaaaatgacatgggtgtgccggctcttagctgcctgacccgcattctgaggcctggtggcgccgtgcttcttcagcgtgtgaacacctgcctggcagcgtctgatacacctcaccaggctgaagggcagaccagctacctgtgattcctgataaaaattctgtgctttacagaatcccttctatttatgcccacaaccaatggaggagtgctttctagatgataacctcaaactgtcagtgttgagcttgagttgatgtttgagttactgagcgttccacgttccatgctcatggaaacctggctctgtttggaagcagcaatgctgggccctaccccagttgtcccatgagataattgtgctctgtgcacacagttccggtcccagaccctggctttgtagcatacattttcaaggaggactcttgggccaccacagatactgccctatccattgctatttttgatggtatgcttgtgtataatacgt

SEQ ID NO: 136121 - DNA, 1425 bp, Homo sapiens
aaacaaatgcaatttgtgtgtgtatgtgtgtctgtgtgtgatgtgtgcgcctgtgtcttgaatgcttcatgttcccttgtgggacatgccagtcgacagcctcatgttgtctgaggtgcgtcacgactccccaccttgcatgaggagttgcggtggcgacaggtgtgggaaagtgcatatggatttaactcctgaaagtggcttaaggggattgtgaagatccaggtccagtcccttgtggtgggaaggtattattggaatcgttgattaatttgtacttgttcttcctctagacaagcagatgcccagtgtcgggaaggcagcccaggatcacagcagcacccaccgagtcagaaggcaccgaacccacccacattctctgaactatctcactgccggggagccccagagctgccccgggagggccggggccgagcgggaaccctacctcgagattatagatactcggaggagagcaccccagcagacttgggaccccgagcccagagccctggctcacccctgcatgctcgaggacaagactcgtggccagtgagctcagccctgctctccaagaggccagccccacagaggccaccgccacccaagcgcgagcccaggagatacagggccacagacggcgcacctgctgacgcccccgtgggcgtcctcggcaggcccttcccaacgccatcccctgcgtccctggatgtgtatgtggcccgcctgtccctctcccacagcccctctgtgttcagcagtgcccagccccaggacaccccgaaggccactgtctgtgagcgtggaagccagcatgtgagcggggacgcatcacgtcctctgccagaagcactgctccctcccaagcagcagcacctgcgcctgcagacggccaccatggagacctcgcgctccccctcgccccagttcgccccccagaaactgacggacaaacctcccctgctcatccaggatgaggattcaaccaggtactgtcctgcgacggtgttccctccccatgaggctcctaatgtgggacgcgggttctcagtgggtctttctggggagtcacctgggcaccttgctttagctcaaggcgttggacttaaagtcagtactggggaataactgtgtggacagaaagtgaagcttcagtggtggttggatttttatctcactggggggctgctgtttcctgcagggaacaggggtagatgtgaataggtgatacatcttccccttcctccaagccagatgcatttatatctgcattacccacaggcatctgcagggtagaggtctgtttttttttgtcgttgttgttgttttaatgcagtcaatatttgtgattggaatcgagtttaacctaagcatgcgacctttaggtgaaattggtatttttcatggtgtccagtattttcttac

SEQ ID NO: 136122 - DNA, 1031 bp, Homo sapiens
gtgcagtggtgtgatctcaggtcactgatctcagctcactgcaacttctgcttcccaggttcaagcgattctcatgcttcagcttcccgagtaggtgggattacaggtgcgcaccaccacacccggctaatttttgtatttttagtagagacagggtttctccatgttagccaggtgggtctcgaactcctgaccacaagtgatccacccgcctcggccttccaaagtgctgggattacaggcatgacccaccacatctggctgacacttttttaaaaaaaaagcaaaactgtgccctttggaagtaatacagaaccgatgactcgctgcttactgcgagatcgtatctcactggtgtgcaaatctgtgcaacgctagcttgaagcacagcgggcggggggtacaaggacagtgttgggtgggctgtcctgcatatggcacaggaggttctcccaagtggggtggtggggggctttggcctgactccaagcacggccactccggagaggagccctccccaggccctgagaactacgcaggaacccgcgggcctgcaccaacctaaggacggatgggaatcctggaaaatgcccatccactgcaggcttcccctacaaaagaacatttaacccaacagggcttgttgaagtttgcattatcatctgcggaatgacaaatggtattaaatagtcctcacagccctccacgaacccctggaggacaccttgggatgcctcaggggtggcattggcggtttgagcatagaaaggatgctgtggttggaaggcggaggtaggagtcagagggagcttcttgaggcctctgcctcatccaggatgtgggatcatggaggctccttcgagttgggtggctggctagtgcctttgagtcaggttcccatccagaggggagggcaggggacacgtcaatcagggtctgtggctggagcatgctttgcgatttcagcagactgttcatcttccagaattgagcgggtgatggacaacaacaccacggtgaagatggtgccc

SEQ ID NO: 136123 - DNA, 1016 bp, Homo sapiens
agaagcccagcaacggaggaagctgctccccaaaatcccctctcctagaagcacagaggagaggtgagtaggcgtggcctcccagcttgggcgtgactctgcctggcatctcttaggcttgtaaagggaagggggtctgcctctctgttttcatgcgtgcttttggggaagacgggttttcataagggctcctcgatgcttagcactttttggcttttttgtgagcctccggaaagagaaatggagggttaacggctttgggcctgacatgaaaatacacactgcagaccaccaagctgccttggcctgaggccagcaggatttctgatgatgcccacaggtctcctttctcgtaagacagctgttctcagtgggggccgctgtctaccctgggggacagttggcaatgtcactgtggggaggggtgttccaagcatctggtgggtggagcccaggaacactgctcaacatctacagtgcacaggagggccccccccacagagagtcatccagcccccacgtgtccctagtgccaacatgagaatgaaggcttagattgaatatatatgtgtttctttatgaaatgtttttttaaaactttatttgaaatttttttacatctgcatttaaaaaatttattataatttggccaggcacagtggtgcacacctgtaatcccagcactttggctgaccgaggtaggcagatcatttaagcccatgaattcaataccagcctggacaacatggcaaaacccagtctctacaaaaagtacaaaaaattagccaggcgtggtggtagacacctgtagtcccagctactcgagaggctgaggtgggaggatcacttgagcccaggagttggaggctgcagtgagctatgatggtgccactgcactccagtgtgggtgacagagtaagaccccatctcttgaaatagaaatgaaaaaaaattacgacaatttacacctgcctgaacaaatgtattttaattggttttgtaagtagcactttcag

SEQ ID NO: 136124 - DNA, 1048 bp, Homo sapiens
atccaccttggtgaagagcagctgaagtgcttattggacagccttcagcccgaaaggggcaaataagagaccagtccccggtggaggaggggcacggggcctccgagctccagctccgttcccaaggatactcgtgaagaccccatctgtgttcatggcctggaaagagacttctcccatagcaaagaggctgttataaaagcaataacttttgtgtttgtgtgggatgatttatttaattttttagtttcccctttgattgctgagagccattttcctttacacataactacacctgacaccaggctctgctggatgtgagtttccactgcatgggctgtgggctgggcctgtggtgcctgccgagtggtcactgtcagtgggaaacccgttgttcctcccgtcttcagatgctgagccaactgcttggacagcagccagcgcgtcatgacgtgcatgagagggggaccctggtgctcatcttctcttgtcattcatccaggcatgggctgccaggttttgtccctgctcgttcaacagtgtgagcatttgtctctgttatctaatgatgttctctgacccagcagaaatcatcatcatgatgatgataatttattaactttttggaagggtgaatagtttcctaatggttaaaaaccaactgtgaaaggaaccacctgtgtggttgggttcactcattctcagattaaattgccacttaaagaaataacgtgcatgctttaaaaaacacagtcacgcaccaagcaggcaaatagctttagtccttctcacctcacatcacagttgttctgcaaagtaaaattttttggttaagagcgtgtccagtagtaatgtgcttgttagctgtttctcaagaccaacagaagattttttcagttactttccccccatgtattttgtatgcatatgattgtccgtgataattggctacttttccattgtttcctccttaaatcgtttagcatggcatgagggccacattccatggacgggaagaccccttcctcttcagaggtcccgtggacta

SEQ ID NO: 136125 - DNA, 1111 bp, Homo sapiens
atttcattttgtcagcagcagtgaccacagccttaccaaagcagacgcgtgcgcgtgcacagatgcacacacacagatgtcttaaaagactagaatccacacttcctgagccagaggggccgtgttgacggtaatgcattctctatagagccaagtccaaactggcaagctcaatgatgcaggcaataaaccgcctttttggcagcctaccaatgccaaaaggataaatgtctttccaaaagtgtgtattcctgttaaattaagctcttgctaacttgaaaaatccctgttctgccagcgaagcttcctcctcctctccagctggtagtcacttgcgtgaatgctggtcagtctgaaaaggtgaagctggctgtgcacttacccccatctttctccctcggggagacgacccaaggaatttcagagtattttgtttggcagagcttttacctgttattctttgccctcaaatacagtattgtggtcattttgatgatatgtgtgtaaaatgtgaataatccaattggtgtctgtactcagccttttgatgtctttttaggactttctcttctacacagcaatacgtcgtgctcgagtatccttgtagcaaagcacatagagccagctgtcctgtcagttcccctgtttgcctctgaaacgtctggttagtggggacccaaagattctagtgagtcaacatccataactctgtatctagttgtattattcatagaaaatcaatctggtgctaatggttggccctggtgttgttgggtggcagctgctccttcgccctcttgtagtgtggctgtggagggctctgcctatggggggtggcctgtggcttgtatccttcagtccaccacagcaaatgtgtgtagatttcatgctcgacacttaccactcacctatcaacagatcatcctgcttgactgtaacaaaataaatagtgtctcttcaagtgaatggagatgtctttgatttacctactttacagcttttgtaaaaaaagaatgtcctcaccatacgtcagattcttaagccatctgagtaaaccgtgggattgattatatgtgtgtaatttatttacactagtcggtttgtggtgagg

SEQ ID NO: 136126 - DNA, 1015 bp, Homo sapiens
tctgcttggaacaggtgtgaggggaatttacagcctgtctgtcattttccccaaatcatgcttccgtgagctgcccggcttgcactttggaatcttactcctcccctctgttgcaggtggagttaccaggatgacggtgtcattggtggtcatcatgtttgaattaaccgggggtctggagtacatcgtgcccctgatggcggcggctgtgaccagcaagtgggtagctgatgcatttgggaaagaaggcatctacgaggcccacatccacttaaatgggtaccctttccttgacgtgaaggacgagtttactcaccgcacactggccaccgacgtcatgcggccccggcggggagagccgccactgtcggtgctcacccaggacagcatgactgtcgaggacgtggagacgctcatcaaggagaccgactacaacggcttccccgtggtggtctccagagactccgagcgcctcattggatttgcccagaggagggaactgattctcgcaataagtgagtaaagagagggaagctcacattttaccaagagccgaatggcatcctttgtacccctaacattatccaagatttttgaggtgatgtgcattaagccaggggctctcaagctttcacatgtctctgggtcacccaggggtctggctcaaaagcagattctgattgagcaggtcttgggtgggatccgatactacatccctcacaagttccccattaacgccgatattgctggtccccacgtcacactgtaaggaaaaaggctttaaacccaagtcttgggtagacattcttggttgcaaagtgactgcatgtttgcaagcagccccctggccctgctccgctgctgcctttcagcaattgttggctaaagctgagaaggaagagaggcgacagcctggagtggcccgggctgagctgtctcagagactttcaggtgtaccaaccatccggctgagatcacgagttctctgccccagacaccccttgccaccacacaa

SEQ ID NO: 136127 - DNA, 1023 bp, Homo sapiens
tgggctggccgtattggtttcttgttcctcccaggattcataatgccatttgggccagttataagttagttcgtaaaaagaaaaacaatgtattaaggtcatcgggcagctaagtaagtttcttgtcacctcaaactccagcccatgatgaggtgaaggagcgtaaggaaagccagagtggagggccctgggctgtttggggtgcccggagtctgcggtgaagcagtgaatgtccccaaaggggccatctgggtcaggcccatcttgccagactttggcaacaaatgatccggtcacagcaggggaccctcacacagcattagctgcagagagatgccaattccacagatgtttggctaaagccccttattaagaatgtgtggttcatcctccaaaccccttttctgtgggattctagatggtgtgtgtgagtgtggggtggggaattgctcagcaaggggtttttgtgtggctcattgttcctgctcaccccattctagagaacgccagacagaggcaggagggcattgtgagcaattccatcatgtacttcacggaggaaccccccgagctgccggccaacagcccacatcccctgaagctgcggcgcatcctgaacctcagcccgtttacagtgacagaccacactccgatggaaacggtggtggatatcttccggaaactggggcttcggcagtgcctggtgacgcggagcgggtgagtagccggacatgtggccagaatgacctagggagaaaaagatgagtgagacatggtctcagccctgaagaatgtggagggccatggggtggaatagtccttgacagagaatggcagtaagctgtggtgaatgtgttgaggaggaaatgtacagggagcttgggactgagggctgggcagccgtgcagccagagaagggggtggtccaggctggactgctgcctgggctgagggaggttgagtaaaaaggggtggagccacaggagaagggcttggtgttgcttttctaccaccccatgtgac

SEQ ID NO: 136128 - DNA, 1937 bp, Homo sapiens
ccaagtatgtgtgccgaaaaaatacttatctttgccagttttactgctgagccaaccattcagataacatcacattaaagctccctacctgagaataaagagtattttaaaagaagcccgtatgaggttgacagtttggtcctttctctcctgcgtgagttggccttgaccttttcaggtgaggccaagctcctcaaccaaatgaaaatgggcctaacagagaacaacacctgtgtgattttaaaaaaaaatagatgagccctgtgatggaagaaaatattccctttaatgtttttgccttcattttgactctttgttatcaagtgtacgataacatcacatctgagagtcacaataaatgctgtttttgtgccatcataagctcccccctcgtccaaaagcaggttgattttattctttctaactggtggactcttgtttcaaaggccttgaactccagactccaggctgttactgaaagggctttcacatgtcaaaaggaagcatctttagctggaacaaaacagctcaaagcctctattctctctggtactgagccttgaaaatgaaaataaaagcaaggcgagggcaagaccaaccaatcacagcgcagatacaagagcccagcagccgagaaattcccaggggcccctgcactcacctctcggtgatattcttagcagtctgtaggaaacgcgcatgatcattctccttcagagagtgttccgcttgggagatgagtgatgctgaccgctcaatgcactgtttgcagtttgcaatctgctgagccagtttgcgaagcctcatcaccttgaacaaaagaggcatggagagagatggttacatgggtggtcttgcttaatgaaaaggcatcaggctggatccttcattttgttgtgttatccttccataaaagttcaaaaagtaggcatagagatatatcaaaatatggaaagctccgttatgggactctggtttagatattccttatctcattggagaagcattgctaattcgttttacgaggaaacactgaattgtgaattgcttccctgttgatgggaaaaaaaggtgttgcccagtggcaacttacaaagggtcaccagacgtcttccctggactattccacacaatgactgcaagactgtagggaaccctggaactttctctatctcaggtttatcttcttttcatcaagaagataaaacatctttataggtggtgaatctatggtttaaatgaaaaccattttctaaaaagtgttttttgtaattcatgtaataaaatcgagaatggaaagcattaagtgttactatttcccacactacctaaaactcatgtgttaaattaacagaaagggagcatttttcccattgattaatatttttcctgttgagcagatgagagaaagccaaaaaaagcacagctgggccatttcccctcactgggaacgtcatttccaggcactttgtgcttacttgataactaggaactattttgataagcatttcccagttgggataaaaacgcatgattgcttcacaacctccattccaattcctgattctgtctcgcttgaaaatgtccctcaaacataattgaccataacctccggggcaggccaagataagtccaaggtaacccacttgaccgttcgctcttgtgtttgaaatgtgctgtgagatgaagtcctctagccagaagccaagttaaaattagacagctaattggaattgctgtgtgcctactgcccccaaccacacacccagggacaggtttcaaccggctttatgataattctggaatggaaaatagccctgggtgaaagggtacggaggagaccagtcaatctgtcttacagacaaggctggcccaaggctctctccagaattcctgctaattccaagaaattctttctttctccaagtcgtcattac

SEQ ID NO: 136129 - DNA, 1035 bp, Homo sapiens
tgttccttagaggcctcaagttctgacatctctttccttccttttcttagattagagttatacagggatggtaatgacgacttggagaaagaaagaatttcttggaattagcaggaattctggagagagccttgggccagccttgtctgtaagacagattgactggtctcctccgtaccctttcacccagggctattttccattccagaattatcataaagccggttgaaacctgtccctgggtgtgtggttgggggcagtaggcacacagcaattccaattagctgtctaattttaacttggcttctggctagaggacttcatctcacagcacatttcaaacacaagagcgaacggtcaagtgggttaccttggacttatcttggcctgccccggaggttatggtcaattatgtttgagggacattttcaagcgagacagaatcaggaattggaatggaggttgtgaagcaatcatgcgtttttatcccaactgggaaatgcttatcaaaatagttcctagttatcaagtaagcacaaagtgcctggaaatgacgttcccagtgaggggaaatggcccagctgtgctttttttggctttctctcatctgctcaacaggaaaaatattaatcaatgggaaaaatgctccctttctgttaatttaacacatgagttttaggtagtgtgggaaatagtaacacttaatgctttccattctcgattttattacatgaattacaaaaaacactttttagaaaatggttttcatttaaaccatagattcaccacctataaagatgttttatcttcttgatgaaaagaagataaacctgagatagagaaagttccagggttccctacagtcttgcagtcattgtgtggaatagtccagggaagacgtctggtgaccctttgtaagttgccactgggcaacacctttttttcccatcaacagggaagcaattcacaattcagtgtttcctcgtaaaacgaattagcaatgcttctccaatgagataaggaatatctaaacca

SEQ ID NO: 136130 - DNA, 1049 bp, Homo sapiens
ccactttgagacaggatggtaaggtatcatgaggaccatagggtaaacttagcaatatacaattgcttagttttcgaaacttgggagaggaaggggctgccactggcgcacaatgggtcaaggccacggatgctgctaaacatcctgaatgcacagaacagccccccagacagatagtcatccagccccaaatgtcattggtgccaaagcggagataccctgagtcgaagcaaagcatctttgttaatgacataagagaaatgctcagttttactcttacagacatttacttgtttgtgtgacccctaaaccaaatctactttgagatgtagagagctgagacattgcagaactcccctcccgccatctgcagatgccctgagtggcagcctggcagcctggcagcctggaagcagccccagagttctttgcacagcgggcttctctcacccatgcccccagcccaactctgagcagtctgggcccgcacatgccagccttcaggctgtttcaacagtatttaaacctccaaaggcttatgaaatattctttaatcccttcccaaaacatgatttaggtgtatttgatattatctgctatcccctagatttcctagtgtttgcagcttattttcaggactaccttccaggtgtagccgtctgtgtcagagacaggagagcctgaggctttcctccaagtggggagtctgcagagaacaggctggcagctgagactttcgcccaaatggcttatatttgatgtataatagttttaattgtgatattattaaaagtgaattatttccatagatcaaaagttaactcattaaatctgttagtctattttaagttggtcttccaaaggaaccatttatatttatatagcattgcgtctttatccttgcaaaactgtggattctaaactcctcaagtcagagacttggaatagcataaatcagatgtgagtcttcattgctgaggctgaatttattcagtcataatttccaagcatttgttcctgctggaaggtactacttatttcacaagaag

SEQ ID NO: 136131 - DNA, 1228 bp, Homo sapiens
gcatggaggaatttgaggatgctttcattgataagacaatagatttgctttattaatttgcatatgtaaggaccctggtgtctttggaaacatttttgtccttctgttagtaaaagtttattacctgaagaagggaattctgcaattattatgaagaataatttcttgcaataatactaaactttgggggacatattttactcattagatctcagtataagagatgtttgtttatacaaaaaatcagaatatcattttgtacattacaatctttttctaagtgtaaaagaaaaagagataaaaattctaacatgttgaactcgtacaaataaaatcatccacatcatgtaaaatagcatcatgtcagtaatctaacgctttcggagactatgcattgagaggcactcatgaaatattgaagcaaagagaaaattaaggtagcatttcctgaactctactaagataaaaagagaaaagttttcctgccaagtgcaaaggtctctaagtggagcgtatccataatgtggatatttctttacatcgttttaattgaattttaagaagcctctcagtccttcaaacttggaggaaaaatttgatttgtgaaccacataacatataagagaatttaatataattaatgcattccagagttttcaaggaattaaaatgcagtagtcctctttttctgttccaacatacaaggttggagctcttgtttcttttctctaattatacctataaaaatatacaaattgaaaaaaactgacctttccttgcctttcagtttcagcatagccccttcaaattagctgaagctgaagttccaaactattgttttgctattcttattctaaaggctggctgaggaagtttgtttgtataatgcatgtttcaacggatcatcccattgtaattttttaatagtttgatttaaaagttcaaattaaagctcagcatttctatgtagcactttttatctggaagtgaagacatgagatttcattcttgggtttaatttatagattgtaaggttctatgtttgaaaaatctttcccagtttgcaactaggaaagttgtaagtgtatactgagctagacttctttttattataatttctataacttgtttcttctttgaaaaccagtagcaggcatagtgcaggttctagtgctatggtgtgtgatgcacacacatacttgcatatacatatacatacatgcattta

SEQ ID NO: 136132 - DNA, 1052 bp, Homo sapiens
gtgacccaagatcgcgccactgcgctccagcctgggtgaaagagcgagactctctctcaaaaaaaaaaaaaaaaaaaatcactctctaagtatggatagaaagcactagggaagaaataataagccaagtctccacatgtttgttcaatttcaggcaacagtgggtctaattattgaaaactcagctgagagagtttgagtgagatactatgttcatcagctaattttagatcacaagacaccaattaaaagaaaggaagtataaattaaaagctctaagtaaatatatattgaagtccttcctctcaggaaaaacacataccatgttgttgagcaaacaaaatgaatcacatgatcaaaagagtgttatcacttagaaaacagtgtcacctttaacaaatggtttctatcacctctccttagcgctaatgggtggttgtgtttactgggaccacatagtttattctgtgacagtgggattaacggaccacatctgggatttggctttgctatttcttgacatgttgagggaagccgacatgctgaagtcaattcctgcttctcaatgtcacttgggcaacaaaagcatcacctgggcagcatgtttcacttcaagtatccaaagaattactggtgcaaatccatctttaaaccatgtagaggaagtcaagcacaaggactcaggtgacacagacaacagaagacagccgctgacaggctttccagaacagtgcatggcagcacaggagaaaagtaccaccaaagttaatcatagcaaaggcaatgcatgtatgagctgtgcctctagagcaaattctgaagaaattgcgaaggctattaatttttacaaaccaaggtaatctttttttttttttttttttttaccccttttttggttggtggtggagctgaagggagaatatttaggataactgaacagagatgtttgatttttgttttccaaaatgtaaacatgccagatctttgtttctttattaaaaatgttcctttgattggatttgcactaccttttaatgattgtttgttaaaac

SEQ ID NO: 136133 - DNA, 1046 bp, Homo sapiens
aggatcctgcccaggacgctgtgaagacctgtgtcacttgtgaagtatcctactgtgacgagtgcctgaaagccactcacccgaataagaagccctttacaggccatcgtctgattgagccaattccggactctcacatccgggggctgatgtgcttggagcatgaggatgagaaggtgaatatgtactgtgtgaccgatgaccagttaatctgtgccttgtgtaaactggttgggcggcaccgcgatcatcaggtggcagctttgagtgagcgctatgacaaattgaaggttagtccgatccgccttaagccaacccctttctgccagaaaatgtcatggaaataaaaagtgtattcactgctagctacatggcaggtgaaggttttctcctcacctttgttatctgattagttttagcatgtttttggcaacctataaatgttacacaataagggtatcttgtaaaagttgactgctgcttgtaattttagcgttgtcaaggtgagggcaaattctaaaaatctggatcattttcaatccatgcagtttttctggatcattttcaatccttacagttcttccaaagagagtgctgcctctctctgagagagagggagagagagagagagagagagagagagagggagagagagggagagagagggagagagagagagaatgacagataaaatctggctttgggcatttggggaacacttacttttctcactcatctgggaaaactaattcactctcattgtacctgtatctagttactgcacaaacaaaagaatagagggaagaatgtctgtagcaaatgtgggattttagaggacacgtgaccttttattccttgtataaacgatatccagcttattggtgaaattcagtgctctgacaatctcaggtttcacgaaagaattccttttcgtgtaggctctttattcagtaaggttacagtcaagactatttgaacttcattttttacatgaaattattaacctaactccagcttgggggataatgattaatatgactatatgt

SEQ ID NO: 136134 - DNA, 1313 bp, Homo sapiens
tgcataaagcactatgccaggtgctatggcagtaaaagaaaatatctagttttgagcagctactattaattcgttcttacatgagttgcccctaagcactcgagtcacataatttccattgatgtcagattcaaagcccattgcatatcatttcccattagcactggaaacttgtaagtgcttgttcaagtcttgctccgccatccttgctgctgttgcccacacagcattttattcatacctctctgagaatgattttcatttatgttctggttatctgtatatgcctctatcttccaatacatggctcaacaaaataagatgtgcaggccaatgctggcctgtgacctgtttttctaaatatggttatgttggaacacagccatactcattcctttatgtattgtgtctgattgcttttgcactacagtggtagattgagtagttgcaacagggcccctttggcccacaaagccaaaaatgtctactattttaccctttatagaaaaagtttgttgacctctgttcaaatatattgagagatccttaaagtcaagggctgtgtttgattctttttggttttagctgaaaagtcagtacatttaatggaatcaatgaatgtttgagtcattttgtgtgctgagtgctgttctaggtgttggtggtacgttcttcaaagagcaaagcaaaatctctgctttcacagagcttatattctagtgttgaggacagtggggacagaaggagcaataaacaaactaaaagaatatgtcagtgataaatattataaagaaaaataaaccgagatgggggaagaattaccacgatgggtaggtggtatagtggtagaaggggaattggttttatgtgggttcagagagaaagtgacactggagcagagagtcatgtggattctgaagaccttgcaggggcgagcaggggattgatgtgcttggcatgtttgaggagtcagaacgaggccatgtgctcagagcagagaaaggagtgggtagcgtgggaggaagtgagctcactgtctgagtctgtgttttctggggctggtttattctggtgaatttctctctgggtgaaatgggaagcccttacagggcagagcaaaaggagatgcatgttctgtcatgttttaacaacaggctctcttgcttctgagtggaggatagactatagggggaagggcaggagtgaacagaagccaagagaccatttagaaaggtcttatgatagtccacataagagatgatgctggcttggcccatgataatagagatgaggtgatgtgaaccccagattct

SEQ ID NO: 136135 - DNA, 3182 bp, Homo sapiens
gtagtgaaggctttagagttgtacaaagtgaggggctggaagtaaaattattgatagaattgatagaattgcatgttctttttcatatactccaaattagaaaaataattgtatttcatggagtatgcagacataacctagaatacttgtaggaaagcattgagaggtgggtttaccttatcattaaaaaggtcaatgcctccattaagggaaatttgggataaaaattatggatgatgtgctgatgatgggcgatctccttattctaatggatgctgtaacaagttagcacaaacctgatggtgttaaacaatgcaaattcattatcttacatttctagagtcaaaagtctgacacaggtctcactgggctaagagtaaggtatctttagggctgtattccttttgggggcccttggggagaattcatttccttgccttttccagcttctagcctgcattccttggcttgtggccccttcctccatcttcaaggccaggcatggctggtcgagtctttgtcatatctcatcattctgactctgactcttcttcctgccacttccacgtttaaagagccttgtgattcctttgggtccacctagatgatccatgctgctctccccatctcaaggtcagctacttagcaatcttaattatatcagcaacagtcagtcccctttgctctataacctaaaatattcacaagctctgaggaggaggctgtggatatctttggggaccataattgtgcctcccccaaagagggaggagtagaaactgtggtgtctgctgtctggtgaccaggaggacagaagccctgtgaggagacaccaggagccctgtagagaagacaaagacaggctaatgagggaagaggataaatcccacatcatgtgcattccaagtctgaggcacttgcagtacatgaagcaaagaactgtcagtgctaaaccgggttccagaaaggggttctcgaccatcttgggatacaagcctagcagtcattctcagagaggcagtacatgaaacaaacaaaaaactggatggccctgtcaaaggaaccatagaccatcagaaaacacttaggctttgattagcaagaggtagaagtcagcagtggttagacagaggaaaactaggaaagtacagtttcagtgacatacagtgatgtggtttgtttgtccccaccaaaactcatgttgaaatgtaatccccaatgtggtggcattgggaggaggggcctagtgggagatgtctgggtcatggggatggatccttcacaaatcgcttgatgcccttcttgaggtagtcagttcttgctctcatggagactagattggttctcacaggagtggattagttcccatgagaatggagttgttataaagcaaagttccttctcttgagcagatgccagtaccatgcttcttgtacttcccagcctgtggagccacgagctaaataaacctcttttgtttataaatcgcccagcctcaggtattctgttatagcaacacaaaatggactaagatacatattatgagagaggaaaggaaaggaagaagagggaggtgtgaaaacatttacatcattattttccagcaaaacatctacttattaattttccattttaaagaagtactttcctcataagtcttgaatctataagaaagttttttcaaaagatgtatccaatgcctcccacgatgtggggcttcactgtaatctgtcactgaagactctcctgcctaggggagtgattagagtgagtgctagagggactgtagggaacatctgtggacactcacccatggatactcagacagctaataagtagcagaactgcaggatgtcttagattatcccgtcacctgtccagctctctcccctttcattcattattctgtgctgtgttctagatgtttaaaccatggacaggcagaggtgtgagctgtgatttgttgccattcccagtttgttgcaagggactctcaagattatctagatcctcttctcaatgaggaccaatctgcccattcacaaaaatgttaagctataggatttcctgacaacaatatgcatgtgtgatttccttttattgaagtagaaatgaagaagtttttttttttttttgaggcatggaaattacattatgacagttaagaaaaggcaaaagctgctgttttatgatattggggtttttgttgttgttgtttgtttgttttgagacagagtcttgctctgttgcccaggctggagtgcagtggcatgatttcagctcactgcaacctctgcctcctgggttcaagtgattctcctgcctcagcctcccgagtagatggaatcacaggcgcacgccaccacacccagctaattttttgtatttttagtagagacggggtttcaccacgttagccaggctggtctcgaactcctgacctcaagcgattcacccaccttggcctcccaaagtgctgggattacaggtgtgagccaccatgcccggcctgatactgttattaatgatataaataacaatgtaagctatatatatatgtgtgtgtgtgtgtgtgtgtgtgtgtgtgtgtattagatacatatatatatagagagagagagagaaagagagagagaaagggagagagaaagagagagagagagagagagagagtgaaaagaaagataacattttgcataaaattcccacccatgtaccactatctgcttggtgaatccctgttcatcttttaaaacccacttcatactttacctccttcaggaagcttctccctgtctcctctccccctatatagagttgattattccctgtctgtctttggcatgcatctttttttatgttgcattacaccttgttcatttttttttctcgatatgggctcactctgttgcccaggctgtagtgcattggcatgatcacggttcattgcagcctcagcctcccaagtatctgggaccacaggcatgtgccaccactcctggctaatttttttatttttattttttggtagagatagggtctcactatgttgcccaggctggtctcaaactcctgggatcaagtgattatcccacttcagcctcccaaagtgctgggattacaggcatgagccaccacacctggccttgttcatattttctctctcggaatgaaccataaga

SEQ ID NO: 136136 - DNA, 4817 bp, Homo sapiens
agaatagtggcaaaacatagaaaagagaaaaaaaaagactgaaatttttaatggagcgcaaaatcagacatatttttttacttttttgaacttctttagagactacaataataattcttatgtgataagtccaataagctatgatgatgttttattaaatgtaccatcatactagcagcttttgcagaatttgcatcagaagaaaagtataagatattaccaccatgacttggcaaaagcggtatactatattaatgttagccacttagttgctgtcattgtttctcagcacagtacccattgcctagtttccctgggagttcttgaaagctctattgaaaagttatatttaaagtgtaagttagagtgtgctgtgaatggagagaaaattgtttttctttttgtaaaaaattcactttccttgggactatatactaagttagctcagttatttgacagaaccagtatcttattttacaaagagaaaaacatagatctagaaatttccagaagcagatcactggttgaaagggcggggcgggggggggcatgtgattgaatgtgatttgaaggcagttttaattttatgacactttacagtgtgtgtgtgtgtgtgtgtgtgtatgtgttttaatgataacctaattttattgtcccagacttaaagatctgtgccacctggagaaactacagttcatccattagcatgtaaatctgttaagagtatttttgcttgaatttctccgagaaggctcccggctttgttctgtacagacacacagtcccgacgctgttcttaatatcctgttttcatttgtcagcgctgttgtccttttcattgccatgttcccatcattcctcttctttcatgtggtgctttacaataacattcagaacaaaagagtcactcctctttctgttgcctttaaaaaaaaaaaaaaaagacttcttcccctgactgcagagcttcagtgatcaggggaaatgtttaaagcatgttattcgtaatagttaaccaggagttgtgaataagggttcgttttccttactttttaagatcaggaggtagcttcagggtattgtgagcaaaaggtttttgtgtgtggctgactttgaagttgagggaaaaagcgattttctttgagaaaaggaggcatcatatttgagagaatttccaatctgctcacacaatgggaatcagttactctataacatcgtcattacctccatgagtcacgagactagtatttgttcttgtctttgaacttaagctttccagtgttcagagaacagttgtgaaatgttgcattggccatcatcaataactattttgctcctggttggtaataattgggaaggggagggtgtgtactttctctgccttctaggagagtattatataaataaagtgagaaaaagtttccccaagcggcaagcttttctccagggcacaatctattatacttgctgcaaaaatcccacttgactggtctttcagagaatagatcacttgcgtcattttgctcatttccaggtgaccttttgcagatatgagcaggcagttgtttttaaataaacattatctacaggtttctgtttctgcactaaggaaggaatgtttctgtaatgcagaagggatgctatgactgaggggtttgtgaagagtgaattctagccagtctcaaataattctgaaaaggtgcttttgtatatgtatatgtgtacttatgtatacatgcacattgtatataactacaaaaactaattccattatggacatatataggactttatacagacatagttatatgaatatatatagaaatacctatcaaactataaatacatttgagaaagcattcagggacagcagtgttaaaagcttttcatctgtgactggtttcacagaaattagtgacttccatttctgctaccatcacgctgttggtctgttcaccaggagggttgatttagacttctgccaggagactaggtgtggccatctctcaccctcttcctctctgtccagtctgctatcattgccttcagaaccaaattcttgcatgatacccagtacagcatagacctggaaaacatcggtcattttcaatataatgtaaaataggttctgtgtgcctttaaaactaaatgctttatttcttaaactgtaaaagacatgaaatgtctgagacattcagatagtgggaaatttcatctgcaagttgtcagattatgccctttagaagattgtaattttttttgttgtttatcattttctcttgaggggtggagtaaatatttctttcctgatgtttcaacttcagatgttcaggctaattttccactacagtgccaaaatagggaaaagttaggcctgtagaattttgacaatttaaatgttgttttaacaaaagccatgtcttgatgaaaagttctttagaattctacttgatgatctatgtgtgtctcttccgaggacaatgagaacttcttaaggaagtcatctatatgtgaaattgagtaatccttttattcattgttaaaagacaaatgaagttataatttggagagacataagccaaaaaatctatgtttgcatttttatgtcctaacatgtgaagcatgctttgatttactgtgaagtgttgcaatggcaataaagtagatgttgagacgtgcagactgggcagcccgaggaagcagttcttgcctctgcttcccctttatcatgaatgttccttaaacacctttggtggagtccaaatgtctggattatgaattgaattgtgcaagattctttttttaaacactttcctgatgatttactttacttgcagtttcttgtcttgcatggtgataagcaatatccttcaaagaactgcagcgcaggactttttttttttttttttcttttaggaagactacttccccttcctcctttagtcaatcaaattttaaaagattacttctttccattctcagttcaccctttctttgccattctggagactgaaattttggacacccatcacagatttgctattatatatataccgtgtatgtaatattaaatatatatatatatatacacacacgatgtttttatatatgtgtgtacataatgtatgcatacgtgtgtatgtgaaacctgtgtgtatatacatatattttaaattgtttatcaggatgatagattgctatttaggtcactatttttggaagaaataaatgactgttctttgtgtctgtactggagattgttcttcctgatataactttgaagaaaacttcttccagacattatacattaattcagaagataaaggcacaaaataatgtgtatattatttttttaaatgaacaagccagcatgcagagcataatgtgatcatgtgctcagtacgacactgaaaggccccaaaggcaaatgagtctagtgcctgttcccagccccaggagctgggcaggacggctcctattggtggcattgaaagctagcattcagccttctgccacaggacagtgtctcattcggccaagctgctgctggtccctgtaaggaatgagagtacagatcccgttgccaagtcctcatttttttggaccaggcagtgggtgttgagctgacctgagctacctttccatttgggttcagttgaacattgagtaggccagaggatagggaagttgtggcgggggccgtggaaaaggcagttgattcttcaactcgggcaaccctggcggagtggatgaggtggagctggccttcctggaattgttggaccgattttcctgttgtgtttcactgttgacgcactcacagacacacaggaccgctccagcactgcctgccacccaccgtctggtctcggtggcctgtctatcatttcgtgggtccccatcctctgcctacggcgatgtttcttcaaaaagaactagtgtgcagtccattggtgggtattcaaggtgatctctttgtcagaatctagagaggtgctcaaagaactattaaggaccaatgtactagttcctgtttttaacctgtttatcagtctttcaattgaacaaattggatttctgaaactgctgaggggttttctgcactattaggacagaacaggatagggtggttgttcctccaggaatctgggttgttcttttgcattgccatttgtctttgtgcttgtctgcttgtataaatgaacctcgagaaggagtgtttaagtattctgttaagtaaatttggaagactaggtttcaattaaaataaccagacagtgtgacccagcttccatttccccttaattttgatcattaaagccttcatatccccacagacatctgccatgcttcgaagtgattcttctcaggaatgttcattcattattaatcaggttgcatggtcaggcgagtatgtgattattttaaagaatgtcctagagatccagttactaagaatgagcatgttataggcagatgtgaaagtacagaaaagatttggttaacagtttaatttgatttgcatgaattccaccaggtgggtgtttggcgaaattaaaagtcttccctggttctcacttcagatatgaggtaaaaaaataataataataataataatttcagcacttcttaaagaagaaatgtcaagttattcaaaatatctattgtattaattattttaaaacttgaggctagcatctcagtgctcatctgcttgtcacttttttttttcaaacagtccctctggtcccctacaattttcttggcagaaattcttagttgtctgttactggttgagcaaatgaatttgagtgtgc

SEQ ID NO: 136137 - DNA, 1099 bp, Homo sapiens
aaacagcctttatctttgattcaggtgtcttctgccagcattcatgaaacgaaactggcaaatagcaaaaatctgaaacatttcactgttcttgatagtttcacatgctccatccatgccagggtcccttatttcctgcaaaataaaaaaattctgacaaagagtgcatatgggacagggtgaccttcactgggaagcggaagtgaagccccaagttcatggtgggagatcagtggtaatgaacagaggtatgtcatagtgtaggaaacagatgaaattgccaatgtgaagataagtcattagtgttaagaataaaaatgctagttcatttcacattcacatactgtttgttcacataagatgctccataaatgttattgaataaatggatttatatccttcttgcttgcaaaaatggtatgaagaggtttccagtaaaaaacacagataatgaatttattcaaagaagagtgggaagaggcgattcaggacaagaagggaagaaggaccccaatcccccatcccctaccaccctgtccttccataagagtgagaattttgtcaggcattttaaaaagttcacctcactaatcctcaaaggacccttaagattgctctcagataaggaaactgcatagaagataggaagagcatctgtgagtataagatatgtacagtatctggctccgatctgcctttgcaaggaaatggcagagccaggatttgaactcaggttatctggcttcaaggtactacatgttttttgtttgtttgtttgtttgttttttgtttttgttttgttttatatgactgagtttttttactctatcacccaggctggagtgcagtggcgcaatctcggttcactgcaacctccgcctcccaggttcaagtgattctcttgcctcagcctcccgagtagctgggattacaggcacccgccaccatgaccagctaatttttctatttttagtagagatgaggtttcactacattggccaggctggtctcgaactcctgacctcaggtgatccgcctgcctcggcctcccacagtgctgggattacaggcgtgagccactgcgcctgacctctacatg

SEQ ID NO: 136138 - DNA, 1029 bp, Homo sapiens
tcctctttaaaaatgtaccatttgctcttattttctaattaaggctttgaaggttaaaaatccctttgttgttagctcctttacaagtctcctgcctgagtgcagaaaacataagaagggagtgtcctcttcagagcataaccaaaccaactaaattttaaccaggtaaattgttgattagcattggatcatgtaaagaaacagtatgaaagtaattgagataggcacaactcctaattgtgtgatcccagggggcttcaaacattgtttgaaacattcacctcagagattatattccatgtctgatccttatgctaatttgaatactaggatcctgaagaaaaactttataggatttcttgagtccctaattggtatgtaaacatcgtcattcccaagctgcccaaagttgtgaattatagtataccatgtgtctcctgttgtgatatcaatttctacagcaatttttctgcttgttgtaggcaaatgtaaatatatttccctcctcttacacaaatagtggcctttcacatacattattcttcaccctggcttttttctgctttagagtataccctagagatctttccataacagtccacagagagcttcctctttaaaaacaaaacaaaactgcatatcattgcactatgacgatgtaccataattgatttgacccttcccctactagtcacgtggagtgtgtccaatattttgccattaaagcaatgtgcactgaaaaacgttgtgttcatcagtttgtatggggcggatgtatctgtattaaaaatccccagaagtgggattgctgggccaaagggcaaatgcagtttctaattttgataaataaataacattgtctaaccagcctgtgtgagagcactgccccagagcctcatcaatagagagcattgtccaacttgtgcacctttgcctatctgatatctgaaaagcggcatctctgtgtagctttgcattctcttctgagtgacgttgagtgtctctgcatgtgttgaaggtctatttgca

SEQ ID NO: 136139 - DNA, 1027 bp, Homo sapiens
tccctgcgaccgacttttcataggctgggggagaaaaggttgagaaacttgacattgtctcgagcagagtgcgtgtagcaacagatcaaagaaaaagaggacgaaaacgtgctctttgctgcccgtagatttcgccgggttgcttttgtcttgcgggctcctgtcgggttcggtgtttccgctctgaagactgcgacgcgggctccgatgcagctcgctccctgccggatgggtcatgggattctaaacatgaggcaggtaagctcaggcggttgcgctggcggcggagggggcgggcgccgcccgggacccctgcgacgtgttactgcggagagcttgctgggttagcaggcgcctggccgtagtcgatgcgtttggcggaaagacggggctgcattttcctaagacaaccaaagaagcacattttacctgagccaccccggtctggtcctcgccacccgcccccacttttgcctctaattgtggttgatgtcaggcagtcgttgtaaagggcttacaagcagtttgtagaatatatgtaaatcaattccagtttgcggccgctggaatgtatcgtgcaggatgtatctcgagcttttagtgcctctaccctatgctttgggctagaataaagacagctgaatgtcctgaaaaagaatttcacggggcctcttatctcattttggtttcgcattctgagcacttactgtgtttctggcggagaaggcggaaccagcttgaaatgagcacagacagtccttccagaaaaatgcaaatttgtttttctgttctagcagtttggaaactgtattgcttctggacgtgagaaggcagccctgaaagtagtgagcggagaaagggctgggggattacttaaatgagtctttgaaaagaattctaaaccaacagcttcttctgtggctctggggcatgatgataaaattccttatcagtccaggaagaggtttatagctttgctgttaagcaagaaaaggaaagaaaaagtggatgtaggaagccaaggaga

SEQ ID NO: 136140 - DNA, 1219 bp, Homo sapiens
cccagcctcccctgttatgaacatcttacctaatggtggcacatttgtccagactaagaagttcatctgtacattactattaattccttgtacttccaaatagctgctgtctctttttcaggcattaattaggagcccagataattctaatgttgatatttgattgaaccaggatacttccttgtgaataagaagtgggctctataaattcaacattgtacacacaagttatcataggtctttctttctttcttttttttttttttagatggagtcttgctctgtcacccaggctggagtacagtggtgcaatctcggctcactccaacctctgcctcctgggttcaagcgattgtcctgcctcagcttcctgagtagctgggattacaggcgtgcaccaccatgcctggctaatttttgtatttttagtagagatggagtttcaccatgttggtcaggctggtcttgaactcctgataccatagatcttttgtagggtccatgtggtcctaacaaaattccatcacctctggcaggcccagagaactgctggttaattactaaaaaaaaaaatacataaagcagactcctattgaaaccaatttaaaatatgtgtttgagtattcacaaacttaccctcactgtgtttgaaaccttcaagttttttttggtgaacacagaatatctgtttttgaacaaaacattctaacctgatgtgtaaatgtgatatgctcatagaaagggagctgaagattgcagcactcttttggacatgatatttgatacaagttagattataagactcaagattttgaaaagggccccttggaaacttcccagatgagatggttcaatggggaacataccagatggaatgtataggcctctgtcctaaacagatgttgtacagctgggaaagctgtgacaagaaaatgcaccccaaatgcttctgatggacagatctctgtgcacacatgcacacacacacacacacacacacacagcgttttaagaatcaaaatattcagattgcttaaaaattagaatttcaggtgtcagtcaccagtggtgtatatatatatatatatatatatatatatatatccccattgttggaatggcccagtttgtcagcatcaaatccatagtccatctgtgattgcccttgaaactgatgaattcacttcaattccaacctaatcaattctgaactagtgcc

SEQ ID NO: 136141 - DNA, 1082 bp, Homo sapiens
tcaaataagacaaaactgagctgtgaccaattcagctgtttctgtaagtcatttccgttttctgtatgtcactttcctttttctgtccataaatcttaccatgtggctgcactggagtctctgagcttcaggaggctacctgatttgagaatcatcctttgctccattaaactcttaaatttaattcagctaaagtttttcttttaacactacccacctcaggacttggagaccctgagaagttacataggttgccccaggacacaaagcatgctggtgacagagaaaattgaagagagccctcctgaccccctgttcacttggactttcagccatgttgcactgccccggctcaactaactgtacttaccactatggtagaaaagcttgagaacaaagtgccatgctgtcgcacctacaacatttaggaagaagttcaaaagatgtctgacttcaatcacggcaatgacaaagcagcaaatgcaagaaagaacaggatcaataaaagtcccagtggaattaaaaagaagacaagagaggtttaaaaggaaactgggctttggatacatactctttctgcttgtaatctgtgcttcttacactttctgagtttgaaaaggagtaatgtttttgtgtcacacttggaaattttgccacatgactgtcatcatgggaactttggaccctgttctggagctaagaatagctgagatactaattaggttgcttgaaaagtgctaaagaactgatcaagtccagagaattcacaatggaacttcatggccagaccgaggtctgttctaactaggattcttgtgttgccatcagcacatcaactgccccttgctttttcatatgaaaaactaatacctgtaatgatctcaaaattcaaatatttgagtatcagaatatttattctgatactcaaacatatgaataatgaaaaagaaatgtcgtggtgggaaccaataaagacagggtttggaggggccgaagatcctagggacggataaaatagggagatggctgagaggaaggaggaatgaaggtctcctactgaaatttaagcaccacacttctgg

SEQ ID NO: 136142 - DNA, 1036 bp, Homo sapiens
tttctgatttataaatttaatgatttcaatattatggagtaacttcagtgaagaaaaattgttttaggggcttactttcctgcaacgattattgccctattgcttttaattccatttgaatgcatgctatggagtagttgagttaaatccatggcatcttggttattcttcacggatgagttccagttctttgggtgatacaactaaaagctcacaagatgctgtgtatcggcactgaaacaatcagtctttgagctttggggaaattactcaagcagcgaattaatcattgcgattctggtcccccttcacaaatgctaggtctccgaaaagactccccccacacacccctgttcctggtgctcttattaaaggtgtaaaatttcataaaactttagtaaaacattatgaattctctttttgtgcaatacagctggtatttcttccagacatatatttccataattaaacatcctaaaatacaaatcccattattatttgttatgtctagtcagtaattagacctcagctggtagggcaatttcagaacagagtttaccaatttacatactaatccagcagagtctggtgggacatgattagcatagattcagtcaacatcttaattagccctaatcccagcatgcactccgaggtgcctttaccccacccccactcatgtaggtcttgtttagctgactattttccttcaacaaattccagctcttccaaacatattttccagtgctctttttcacagaggagatgattacatctcaaagtggtgtgccagggaggacattttgtgtaaagccagggaaatgtgaggcattgggccaggcgaggggtgcatacacaagtctgaagcaaaatcaaggtaccagaatctgttcttctagaatgttagagtatacccacttccctgtcccacccccaactctaggtagcaagatctgtaaaccattccaaacctgtgagaattttacctattttgtaagaagaatattccttattcctgtccatgatcaggagccca

SEQ ID NO: 136143 - DNA, 1092 bp, Homo sapiens
aaaattggagaaagttcttatttccctgctgtctaagaatttataaccacactgagaaaaccatattgcaatcataaaaaatagatgaccaaaaattaaatggttccaaggccctctggataaatatgaagtgagagcatagttcttttctaaaagagagtgggaaagaacaaggcaataagaaggtcaagatgatgggatgcagagccattgtgtacattcattgaatgacttaatgtgttatgcacttgcattctcccatttccaacaacactataaaataatggcagggtgaaatttgaatcccaaggtctctcactctgctatgtgtgtgtttaaagaatgttgggacagagctccctttgaataaaatttttaaatgccttaggaatcctaaaatgatgcttacattttgtaagatcttgataccttgacgtagttgttcttcattatcattatcattgactagttgttgggtggagctgccctgggcgtgtgaagatttcagtatcactcaatataggtgggtctttaaaagaaaatcatgccaagaaagatagatgtaaacttatttttttttacattctcttttattttctttaatattctgtatctttgtagaagctataatatggaattatagactatttacttatgggctttaaaaagcactgtggtaatcattaggtaataaatttcttaccaagagatattactgaaaggaatgtggtttttattcttttatagccagatcaccaggaagatatgagaccttgccatttaagtttgctttttaatttgtgtaacagaaagattcacatttaaccttttctactagacatgtatttaacaaacaattatttggtatctactatgtgaaagggacacattttattccatttgttccttgcaattcttgttcggaaagaccctctttacagtggaagaaggagaatctcagagaatggcccagctagacttgaactcctgtcttctgtctcagcccagaagacttgctcccatgtcctttaacctacttagctaagacagatattcaaagccactgaggaaggactccatatttcttcattt

SEQ ID NO: 136144 - DNA, 1037 bp, Homo sapiens
gaatgctggcagtcaatttgggagtcctgagtgtgagataacagttaatcaatttatctgtgaactgtgaagttttcaggttttgatcaacattattcactattctccaccccatgctcattctggttataaagactatttaccttcattattatatttgaacctgagagcgtcaagtttattagaattgattttctttccaggttgatcttctgaaatactttggccatttttcactactgccttatgaggttatcattaatctggcatatatttattgagtgcttgggtgtcactcatatggcacacgtttgctgttagagatgaaagctatgttttgtggagtttattgcagaggcgaccaaggctagaagggaaagaccaactcgtgctgttctaacaattgtttgccagctcccgtggttcagttgcgaatgtggtttcagcaacaacgaaaaactcttaattcttctgaattattgatacattaaaatatgttactggctacttggaacctgtgagctgagttaatcaataaccctctcacattgcacaagacccactgtgtgttattctcatcactggccatttaaataattcaaaagaaaggtttctcgtgaattaaccttgccattgcacaaattgggaaaatacagaacaaaacattccagcatccttaatctttagagcttataaattactgttccttctcatttttttcttgatgtattagttttttctgttagatgacttttgttaaatgttttgatatatcataataatacacataatttgcaataatgtcagtaagaaaaaagaatcatgggaaagaaatgaacatgtcttgaatccaccatataccagacactgccctggcccctttacaagcatgttatcatttactcttctcaacaatactgcaaaataggtattattgggcccattttaaagatgatggaatgaaggaccagagaatttaagaataaattcatgccacactactaaggtagcaaacccaaatctgttccctgctccac

SEQ ID NO: 136145 - DNA, 1057 bp, Homo sapiens
cccccatctgaatttcctgccctaggaattctctcattgccagcaacaagttcccacacctgtaataacaattgaccgtgaatgttggaccgccaggtagcttctttccccagacaaccccagacacataatcttcccccaatggctagacccataaattcggggcagttaaaatgagctgtctcatttagaagtgaataattcctttaaaaaagaagaagaatctgctgtctttctctctccccacatcctacacacactccctcttccaaccttctccagacttgctgactttttcacttcctttcctgaagtttgtcttttgaatcaaaatcgtcattgcaattaaagctgggtatactgagttagaacaaaacaagaaagttttaactggcttttataacctgtcacaagaggattacaactaccaaaatatcatgccatccaaaaatgtacagggttcagaaaaaaggacccagtgatagttaataaacagcatgtgaattctgtaccacgtaagtgaatccacttgtataaatttggactcaagtttcaatttcagtgggtgacaactatgatggtggtcagaatttgctaactgcctctggctgcattcactcaagtaatattcatctacttctagaaacttgtcaagtcaccaaattctttcttagacaaatgagccagaaagggcaaaactcgcctaacccgcctgaagcctgctgttctgtctctcccagatattaaaagacccggaactctataataacaaccatgcagttcattgcacacatgatatttctaacagtggaaaaggaaagataccatcagctaacaactagctaacaacttcttgttcttttttgaagccaatgactgatctacctttttggttattgctgttgttgcaaattggcccaatcacttaatgattggacaatgtcaacttttaggttaaaaacttcttgagcactcataccaaagagagttggaagtcagaacattggagatttttgaaccttgaaataataccctttgaattattttacaccattaa

SEQ ID NO: 136146 - DNA, 1695 bp, Homo sapiens
tattgggaggctccctttccccgctgccagttgtgaccaggtatcattttagagagacagttaacaactgcctgaccatcacctgatggtcacctgacattcctgggggtaaaggggaccctctccttccctactcatgtcagactacctacttttaactgtcactgctgataatgcttgaaataattatttaaatatggactttgaatccaacaaactgaattggatgtacataaatcagagtttctcaaccttggcattatcgataattggggccggtaattctttagtgtgggaggctgtcctgcatattgtgtagcagcatttctgtcctctacccagtggatgccagtaacactcttctcccactgagttgtggtaaccaaaaatgttctagacattgccagatgtcctttgcagggaaaaaataaccccttgttgagacccactgcattaaatcattcacaggtcactaaaatatagaaaagcattagaagatacattcgtaagaacatgccactataatgcacttgagcttcactttcaacagctggtcactacaaacctttatacactgcctattgcatcttgattctttaattcatcaacttgatgatcctaatatttgctccttctctttttttctaagaggggaaaatcatgaaaggagatgaaaaccacaattgaaatacagtgtaattttactttgggctacttgaaagaggcacagccagaattcctgaactgttcctattgtatatgggatcaatatggctgggagtgttttaatcatgtttcatgtcatatacacctcaatgtgttttattaacttataattattggagcagtttgcttggctttagtagacactataaaagcccaaatttacagaggcctgaaagaggtccattaataatttgaaacttgtcagagtattctggaacgagggtgagctctgaagttcctctcaccaattgaaaagctatttggaggctttcctacttaaaacaatacagaaaaccttcattaattgactgtcactttccttgacaagaaggctgttgttcatcctggcttcttaaagcaccatgacaatagctcattaatacaatacagagtctgaagtaagggaggaagggtactaaaaggttccactgcataaccatgcactcttgtctcttcactgcctaaacctgaggctggggggtggggatgtgaagaggaggcaccatagtgccatcattgaggaggagaaaagatgaagagccatttaatgagtgcggcagtcaggctaaagaaaagacatggccggtttctgtctcccacagttatggtgacaatatttccagagcaaaattgaggagcatggtctgacacaagaatttgtgtgacttccagatgtgaaaagcatctgggaaagggggattgaaagtcagcatgttggaattttctatgatatttatatggattatgtaagaagacaaaataagagaacatatgatatttttactctcccacacatgctgactaatgtgattgaagactttgtgtccagtgtttgaatgtgatcagtcaatgtttgtcagcaagagggagggataaaggaagaaaggaaagaaggaaagaatttggggaatatgccctggtctcctccaaagtaagagtggcctggctggaatctctcaaaacaagcta

SEQ ID NO: 136147 - DNA, 1045 bp, Homo sapiens
aaaattaaaggatgaaacgtttaatttgtaagtgtattttttttccttttcagaaagtcatagaatgatatatttggataggcatgtgattgctttaatttttgagcaaattttcagtgtattttccctttagaatcatgacttaagtaaggattagcattcggtagccaaggtttaagaatgcaccgtggatttaccgtggcagacacggttttggaatttaatttggtcagcctctgctttagcaggacaaagagagaggaaggtgatagcatgccttacattagctgtgttggaaatgtgaccctctcctttagaacggctcccagtttgtctgcaggagcaagcccctgtgacacaggagagcagtcaggaaaggacagtgagtgagcacggatgacagaagtgtctgtgccacccattcattagggactcacaaaggggtatagaaattctgggcttttgtggggattgagaagttcctatcaaatgtctgtcgggtaatttaattacacgggcatggtaggaatgacacagtggttacattaataaactgaagcattaaagaataatagcccagttattgctgaattatgggaaacacgctgcctattcattgctggtgatattagaagggagaaggcgggggcttcctactttatactcgcaatgcataaagaaacagtttcttgcctttccagacctgtggaaaaccgggtagaggggaaggcccaaagtcacacccaatagcataaatcttgctttgtttaagatgcttaaaatatcataagctaactctgtttttatggtgctaaataaaattgacttgggccagacatagtaatgagcatgtgctgcacaaacatctccaaatagcctttccaacggatctcattcctgataatttccatttgttgtcctgctcctcttgttaatggaagccattttataggatcacaggctactagcttagtagttttaaaaaagtagcctattaatataatagaagcaaacattatttttcattctcactcatccctctggc

SEQ ID NO: 136148 - DNA, 1030 bp, Homo sapiens
tgtcagtttttataactgtaggtgctggagtttcagactcctatctgagattgggaattaatgaatacagaaggcataaggaatatgagggcattgagccaaagggagaggtggggcgagggaggggctgtggtagcaacatgaacagaaaaggagaaaaaggacctgagttggaaaattgaggtctccatatcaaattactcttatttcaaaatgtttcctaggtttgcttattcctactgatttttattaccaagagctttatagaaacataatatacttttttattactttaagtacagctagttttagccacttatacctccagacatgccactcaactgtgaccttgagtatcatttattcataaagtaattttcttagaatgacgaagcatctacatttcctaaattacatatcactagttatttttcttgagacatcactttatatgactcattttacaagtttacaagttgcttctttactagaatgtttccccgtccccaacagtggaattagtcttctacttggtttaattttatggtgttcctgctgcaagctcagcaaattatgaacagttgtctcctttccccagtggacaggcatgggacaattgcctttctcctctaggttcttaataagtggaaaaaaaaaagattgttttcaaggactgaaatcttctttcttttaacctaagaaggaaagaatgtatttaaaaaaaaaaaaagaggggaatgaaaagaaagcatgccctcgtcctgtgttgttatcacttacttaattcagggttcagccgagagcccaaggctactgtcttgatctgcacttcctgtctgcacacagatccctggtgtataagcctctcacgatcctaaaacatttccagaatttctccttgctctgaccctcttagtgttgaaagtggtagtcttaatttatttccaaagtctatcttttctctccaaattaaataacagtgtcatgaaatgcttcatcttctaatgtcctatcagcaaaatcctagctt

SEQ ID NO: 136149 - DNA, 3245 bp, Homo sapiens
ggggaggggaggggaaagagaaaagaaaagaaaaaaagaaaaaacaaaagaaaagagagtggttttaattttcttaaaataattcttttggttatgcaagtagtacgtggaaacattcttattatacaatattcaaatttaaaaaaatatataaagtagattcatttaaaaaaaatagatccctcattacccccactattactacgcactcaagggaaaccagttttaacagtttggtgtttcagttaattttatatgctttaacatacatttgtttttaacatagctaggattatgtattttctactgtggtatcttttttcagtcttaaaaaattttgccatcattttctaataaatggtaggttattgagataaatatagtgtcccttttttagacttaccagcctattccttgtctaagttaactgtccacaataaacctgtatcttttcctactgtcttagaacagtttgagaacatcatatgtgttgtgtggactctgggagcttgttgaattacacttgtatttttctatttttttttttttactttaagttttagggtacatgtgcacaacgtgcaggttagttacatatgtatacatgtgccacatgtgccatgttggtgtgctgcacccattaactcgtcatttaacattaggtatatctcctaatgctatccctcccccctccccccaccccacaacaggccccggtgtgtgatgttccccttcctgtgtccatgtgttctcattgttcaattcccacctatgagtgagaacatgtggtgtttggttttttgtccttgtgatagtttgctcagaatgatggtttccagcttcatccatgtccctacaaatgacatgaactcatcctttttatggctgcatagtattccatggtgtatatgggccacatttttttcatccagtctatcattgttgcacatttgggttggttccaagtctttgctattgtgaatagtgccacaataaacatacatgtgcatgtgtctttataccagcatgatttataatcctttgggtatatacccagtaatgggatggctgggtcaaatggtatttctagttgtagatccctgaggaatcgccacactgacttccacaatggttgaactagtttacagtcctaccaacagtgtaaaagtgttcctatttctccacatcctctccagcacctgttgtttcctgactttttaatgattgccattctaactggtgtgagatggtatctcattgtggttttgatttgcatttctctgatggccagtgatgatgagcattttttcatgtgtcttttggctgaataaatgtcttcttttgagaagtgtctgttcatatccttcacccactttttgatggggttgtttgtttttttcttgtaaatttgtttgagttcattgtagattctggatattagccctttgtcaggtgagtagattgcaaaaattttctcccattctgtaggttgcctgttcactctgatggtagtttcttttgctgtgcagaagctcttgagtttaattagatgccatttgtcaattttggcttttgttgccattgcttttggtgttttagacatgaagtccttgcccatgcctatgtcctgaatggtaatacctaggttttcttctagggtttttatggttttaggtctaacatttaaatctttaatccatcttgaattaatttttgtataaggcgtaaggaagggatccagtttcagctttctacatatggctagccagttttcccagcaccatttattaaatagggaatcctttccccatttcttgtttttgtcaggtttgtcaaagatcagatggttgtagatatgcggcattatttctgagggctctgttctgttccattggtctatatctctgttttggtaccagtaccatgctgttttggttgctgtagccttgtagtatagtttgaagtcaggtagcgtgatgcctccagctttgttcttttggcttaggattgacttggtgatgcgggctcttttttggttccatatgaactttaaagtaattttttccaattctttgaagaaagtcattggtagcttgatggggatggcattgaatctataaattaccttgggcagtatgaccattttcatgatattgattcttcctacccatgagcatggaatgttcttccatttgtttgtgtcctcttttatttcattgagcagtggtttgtagttctccttgaagaggtccttcacatcccttgtaagttggattcctaggtattttattctctttgaagcaattgtgaatgggagttcactcatgatttggctctctgtttgtctgttattggtgtataagaatgcttgtgggttttgcacattgattttgtatcctgagactttgctgaagttgcctaatagcttaaggagattttgggctgagacgatggggttttctagatatacaatcatgtcatctgcaaacagggacaatttgacttcctcttttcctaattgaataccctcttctgcctgactgccctggccagaacttccaacactatgttgaataggagtggtgagagagggcatccctgtcttgtgccagttttcaaagggaatgcttccagtttttgctcattcagtatgatattggctgtgggtttgtcatagatagctcctattattttgagatgcgtcccatcaatacacttgtgtttttcacaatggcactatcagacaatctaaaaattttgaaaatacaactcgtaggccaggtgcggtggcttacacctgtaatcccagcaatttgggaggccgaggcaggcggattaccagaggtcaggagttcaagaccagcctggtcaatatggtgaaaccccgtctctactaaaaatacaaaaattagccgggcgtggtggcatgcgcctgtaatcccaggtactcgggaggctgaggcaggagaattgcttgagcccaggaggcggaggttgcagtgagccgagattgtcccactgcactccagtctgactgacagagtgagactctgtctcaaaaaaaaaaaaaaaaaaaagaaaatacaacttgtaagaggagttggcattgatgttagttggtgagttcccataatgaaaggcacatagaaaaccgtcaattgtatttgacattcaggttttcaaatctcatatgaatgctgccattgcccattgttggaaagtaacatacgtttcccattcacttt

SEQ ID NO: 136150 - DNA, 1061 bp, Homo sapiens
taaaatagcacttttcctctatatgagagggtaaaaatattatttcaatgaaaaaaagttagaatatttttaatattccaagactattggtaaatgtaactgttacctgaagtattgcaaatatcatattgtaagcacacacacacatgcacacacacacacatgcataccacccaatgacacatgcatgtgtatcaaacttgatggtgggtaaattacttaaaccttcctaaactcagaaatttctgggttccaggagctccagctacaggcttcggtgattgtcccgtttggactcccgttatgatcaggacccacatgtctggagtcttgtagtaaacaccagtcaatttttgttattgtctcttctgcttttctgccagtgccaactgcccccttttatctgggctgagacgttacctcaaagcaacctatttggcttggatgcttctttcttcctttcctcttcaaatttgaggggcaacaaagactttatggtcatattagccatcgtgttttctaaacaaacttgaaacatggtcttgtttaattttttctatttccagatgcctcccttgtaaaccttccccctttgatagcaacctctgtattgacctccttgtagccctggctcatgtttcccatgtgccccattctctttacattctcatcttccccaccagtctttgagcctttgaggaaagagactgttttcttttcccatctgtgctcccaatgcctaatgaagagtgtggtactcacaaggtgctgaacaaatgtcagttgaatgcctgcatgcgtgcacttaaaacttcaagaattttccttcatatatgctgttgtattcacccataacttccttatattaacattgcttttaagcaataatttatgaaagatccagatgtctatcttcagcaaggatattgcctaccctttcatccgtccattcaactgtcattagcaaaacaactatgttccctgtaaaatacacaaaattgtgccaggtcaggtgacagatactacacaaagaatcaaaatacaaacacacgtatatatac

SEQ ID NO: 136151 - DNA, 1029 bp, Homo sapiens
tatgtttatatcaatattggcctcataaagactgtgtaattgacagaaaggggctggaactattttgttggttgagcttttattattattattattaatttatttaaaaactatgacttacttttctgttatatacttgaaattaattctaaagtggcttagtgagcttcagaatctccgagtgagagctaggaaagaagcagattggtgggcctcagtcacagaaattcattcaaccattctgagaatgaagcctgagagtctgcacatctaacaagttagcaggtgatgctgatgctgttggtccacagacctccctctgcagcactggttaaaggtagggacggattgttgtaatggctcctagattctgaggagggagtgaaagatggtaggattcctgcacttcttggtcatggccagtagactgaagaaaccaattgctaagtctaatgtagaaatgaaacaaactcttctttggaccatttagaaaacgtgtcaggaaaggctttagatttgaggaattgtaatttatcaatactagttcaaccctctctgatcagtatagtcaacttgttaaccacacagctgcataacccccaggggactgatgaaaagtgtcacagagctttagggtttccagttcccatagtcacactggagaaatattaaacattgtttgcatgtttgcactttgctattccttgtcacttgcccatgctgtgaggcagtctcaagttttgagtgaagaagccacgtaagactccattgaggaaggctgtagctaggacatgtgagctcatgacatccctaagagccaagtaaaccattttctttcttccataatgagaaacaccatgtcgttggctgcttctgtctgtaatttcactggtgcagcatgtttagatgtgagcactaatggaagacaaggaagaagtgatttcttgttctggctcagcttgcactgaccattctgtgacttatgactgaccctttggggtcagttaagttctctagtgtagagttgct

SEQ ID NO: 136152 - DNA, 1050 bp, Homo sapiens
cactatctctccaacaaaacacaccaaagagtccccccactctctgccacctgagacccctagcaggaatggttatgctcagtcattgttattattcagggtctcaaaagaaagcagatggcacactcaaatgagtttacatggagagagaatagtgaactttttacagatggttgggcagggctaaaagactgatgaggaatggggttagcaataacgggaagctgcagctgccactcctaggtctgagtgggcaagagaagggaatgtccgtaatggcaccagaaagagctagagctctggaagtgggatgtcttaacaggagccatagctatagcagaatgcagtcactggcagaaccacagcagggaggaagtggaaagggtaattaccatgacctcttcctccgctcactcatctgtctcttgccagagcttcctcttggccaaacccaaccaaactacttaccacagctggtatgtagtctagatgatacagtccatgtaggtctctctgagagagacaactgggtgaaggtggatgggaatgaatggaacacagagactatctaatacagtttttttcaatttagcaaatattttaatgagcatttattgtgagccatgctgtctgttagatgctgaagttggaggtactctggtttgccttacgaaactcagatactaccaggagaacacggataagtaaactggcaataacaatatgatacaacaaaaacagagtattatggaaacacttaaaggagctagcccatacttaagaggtctgtgaaagcttctagaagaaagttaaatctaagccaaaaaaaaaaatgaagaattcattggccattgctgacttttactgaagactgttgaaagcgctttgctcattgtaacacatttcatccttccaaggaccctatgagtcaagatgtgttattaatcctcgatttaaagatgtggaatttgacatacagagacatgacttgcccaaaatcatatggcttttaattggtgaattcaggtgtctaactccagagcttccctt

SEQ ID NO: 136153 - DNA, 1101 bp, Homo sapiens
tccaaaaaaattgtcccctaaaagaaagtaaaaaataagagggctgcatgatcaatttctccaatttcattatgattttggttcctgtttatgctcgaataactttctcagattataaatcctcaaaaagaactcagtcaattttaggttttgggggtttctttattttttagatactggcccaggagttaaatcagctttggctcagaggaaccaattgaattgaatcaactgaataattgaataaacattgaaacagcactccagaagcaattcctatccatactgatgtctaaagaacaatgaaaaagcatctatagaaagaaatacaagtactggagctaaaaatttccacatacaaatgaaactgggatttactctgcactgtacacaaaaccagagcctgggtcatcaaatactttttaaataccttcaaatattgaaacacaatgcaggaacctacttaattcattttaaaaagcaaataaatgaatatagagacttacatcaaggttaaacattcagctgttgttcagttccagtgaaccaaagaagtgtacactgaatttaaaataaaatgaagacacataatatatgaggtactgaagtgctctttacatttgcagagctagcttatgcttccagacaagttcagacatacatgtacatggatacacacatacttgtgtatatgcgcatgcatttatacatatgtgtaatatatgtatatatattcacacacacacacatttcctaaccaaaaaggaaaggcttattgttttcatgttgagcctttgaaataagacattagcactgagcaagtggagaaatcagagtggaagtagccatcattcaacattactcccagatccttgccactcaaaatgttgtctctggctcagcagcaacagtatcatctggcacctagttagaaccaccccacacctctcagaacagaacccaagtttttaccagattgcctaatttatgtgtccaaattaaagtttgagaagtgctgccctggatatgtgctgtccattaccaaagttactagccacatgtatctgttcagctattgaaatgtacttattgagactgaga

SEQ ID NO: 136154 - DNA, 1040 bp, Homo sapiens
ctctccatttcaaaagccctccaacttggcatagggatgacctaagggctctaagattgcagctaagataaggacccatggatcccaatgctcagtgccctatgtcctctggaagttgctgacacatgtttctgagggacactcagaaaacctggaagcatgttatattagtgagcacattttggattttgagtgagaagtccagcttgagttaacttaagcagaaaaagaaattttgggatcacactcttaggaagtctggggtgggtaaagcctcaggaagggctggatccagtcattctgcctctatctcttggcctgatgccacttagtttgaaggcctctctcctaacttctttaacatttgggggaatttgctctgactgggtcacattctttcccctgaatcaattactgtgtctggggaggtgaggcaatatgattggctaggtctggtgtgttgtgattgacagcccacctgggaccacctgaaatgggggagaggatgttcctcagaggaaatgatgctgaacagacaaaagcagcatgaatctccaggcaaatcatttgtctgtatggacaggaagatcaacaagctggaaacaggaagtaatccattagccaatagtaaaattaatcccaattgctgttttgcttccttagattctaacataggcctaatgaaaaagctctggattcttgtgtaaataatttgggaaatgcctctactaattcaaagaggatcttggaactgttttctattgacaaatgtccataaagaggaacctgagttgtattcacttgcttcttttattcctacaataaggaaagcaccaggagttcaatattgaatgctgaaatgaaaaggaaacattctgtttaataatgaaaagtaccaacaattgcatttggggctaaaagtcccaaaattatccctagaaacctcttaaggtctacatattatttgcaaggctccctaatgcaaatgatctgctttctaagtcaatcttagtcatataaaacacatgccgcaacataaa

SEQ ID NO: 136155 - DNA, 1097 bp, Homo sapiens
tgctagaaaagtgtttcttggctacttcatatgtatataagctttctccctcaacacagtttctgctttttatttttggaatctcacatagcctatatcttgttttcagagtagatactatcactgtgggtggctgagttctcatctatatgcaaccaaggctaactggctctctaggttaccttgatgccacccactgagagtcctttctggatttagtgatttagtgctgcttattttcaccttctctcaggatggagcctcagaatagagaccaggttgaaaatcagtcttttacttagaaccatgaaagcagatactacatcttatccgtctatgacctggtgacccagaagccattaatttgacattaccaacatacctccacacaaagactttataatcttcagtgtgagaattaaacaaacaaacaaacaaaaacttaaaacaactttggaggggagaacgataacctaaattttaagcataagaaaatccctaacaaaaagatccaactaattgccactggggggcgatggaagttcgtgaactgctctgctaatccctgaggcaactgagcactttagttggtttatttattcaaagctggaatttggacgtgtgacccatcaagctcagggaaattcctggatgaggaacacagtcctgggagaaacctaccaaagatggaattagcaccttggcgaaccgccttcagcgcaaagaactttctttccttgtgtgtcttaagaatttacttcagttcccttctgtctgaagcagaggaagccaagttaaactgtgaataagcacgacaacaaagaagagttcttatttatcactacctgcaaacacatgtaagtgcacagtttaaacagcattcagacatctcacagccactaggatcagagttttggtgtgagtaggcctcagttggtaactttcctgaggaaaggagggaggttatagaatttatgttaggaaattctgagtcatagataacactttaagtgacagttaaggaatctagtgagagggactttggacaggtttagaaaagtaccctatggaaacaaaggaggaaaaaaaaagtatct

SEQ ID NO: 136156 - DNA, 1087 bp, Homo sapiens
agctagagcatgggcttctactttctcagcttgctcaatatatgtatatatacacacatgcaaacatactggcatgtagtgtgcattatgtaactacactgggactatttaactcattgccccttctttctacctaccccaaaccaacacacacaatcattcagaagcagaaatgggggcggggactcgctattttcgagtggtgaaaactgttattattattgaagttattatgattaagttgctgatccagttgttgccacaagtgggcctttatgagtcactagatttaacatgatgtgccaaaaaagatgggaatagcactggtaagaatgggtgaagtgaacattgctttggggaggagctctggagagccatgtgaatcaccacccacacaggcaggagagatatcagtatagtcttgcctagaggagtgaggaatttcatgttttcttccctatggaaataattagtagtggatttggttaccaatggtagagagaaatggggaaaccacggggttatgttaatgaaatttccagtgggtattggatttgccctccaatttttaaagcataaactgtaaccaaagaccttctgacatattattcttttaaaaaggaggagcatggtagattacagttgtttgaaattaccaccttactgcataaagagaaagctaaggtgaagtaaataagaagacaggagtaaaaaaatggctgctgattttgagaaatatttagggttaggggcaagatgagttcaggttagacacattgcacttgagatgataatggttatctaggcagtgaaatcccagaagcggttcagaacacagaattagaactcaggaaagagctggttgcagataaagaaatgtaaattatcaggtttggttggatgttaagacataagaatggatggtaaaatccttcaaggctttggttttctttgctctcattccaaatttaccaaagaactttgcgactttagtttggctttcctattaggaagagaatgcatcactagccaacctaaatttcttcctccttggcagtcttatttttttattctaaacattgtgaat

SEQ ID NO: 136157 - DNA, 1442 bp, Homo sapiens
agtgttaataaagaaacatatatctttctatataactatagtggctctgtgaaatacgtccagatgtcccctggtgcagaaagtgttgggggctcacagctttcagctgagtctccaggaattgtcctctgcctaagagaattgcctcacacaaaatcacttcccctccttggggacgatctgcatcctatgagggtctctgcaagggcacataagtccaggcccctagccccaaaggggacaactcagaagggccatcccagcatcagaactgcctacaggatagcccaaggattccatttcaactatcacagctcaacttctctctttacccacaattcttttgtccctcccacaattccttttcactcccgcaattctgttttgttacccacagttctgtctcccacaattctcagttctttccacaatcttctgtctctcccacaattccttatttctcccacaatcccatgtcactcccaaaattctattccttcccacaattcatttttctgtcccacaattccttgtcttgctcacaattctcttgtttctcccatgattccttgtgtctcccacaattcacttttctgtcccacaattccctgtcttgcccgtaattctgttgtttttcccaaaatttgctgggtttcccagcaagcctttattctttcctacaaattcttgtatctctcaaaattctgtttcccacagttccattcctcccacagttctctgtcttttccatcattccctatgactctgtctgtcacaattcctcaaaattattcatttccacaatgttctgttcattcacaatactctgttcttattccccagtctctcccataattccccattatctctcataattctgttctttcacaatattctttttcatgatttcctttctcccacaattctcccttcattctcataattattccgtctctcccacaacactgtattctctcccatggttccctgtatctcccagaactctctgttctctcccccaatttcctgtctctccctgagttctctgttctcccacaattccctgtgtctcccataattccatgtttctccccacaatttttggtttcctctcacaattctctgttctctcccacaattccttatctcaaccataattctgtattctatgctacaatttcctatctttcctataattccccatctcccccacaattctttgttctttcgcagaattctccactcttacaattctccattccctcaaaatactccatgattgttcacaattccccagtctctcccctaactcccattctctctcataattctgttttctcacaatattctcgttcacaattttctatcccacaagtgtcccttttctcccacaattttgtgtctcttccacaattttttgttctctcccacaatcctgtgtc

SEQ ID NO: 136158 - DNA, 1043 bp, Homo sapiens
aggtttgtgactctaaacaagttaactctgttagcctcagtctgtcatctgtaagatgaagatataataatgtttcacaggcctgtcatgatgattgaggtagtacatgagaacgtagtgagtactctaaaccagccccaacttcccaaagtttacttgtgcctacatcagtggttcttaactggaggggggcaatccccccttcccacaggggacatttgccaatatctggaggcatttttggttgtcacaactgagaggaaagtgaatagagggcaggagtgctcctaaacatcctacaatgtacagaacagccccccaacaaagaatcagctggccccaaatatcaagagggccaaggttgagaaaccttagtctagatctagctgtcttaataaataacttttgctcgtatagccatttcagtattttcgtatataaaagtaagccatcacttaacgggcttgctgtccattctttagataagaaaatgaaaatggaaaagctgtctttcatttttaattcattcatgtctactttagattttttatattaaagtgtggcttgaatcagtaagtcgtgaagggcagaagcaacatggtgtgcttactgagtactaatgtttgcgctgttattcatttcttcagtcagccagcctattctgagaggtcactgcccattctgtaccaagcattgctggattttgtttgtttctgcacgagagaataacatcatacaaaatggagctttgcctgatagagcttacattctcatcttcataagctatgtggtcttacgacttcataagctaagttttctccctattttatagtcaaggaaactaagacttggagtaactgatgctccaagtcacatagtaagtggcaaagccagcaaaagttctgtgaccttggacaaggacaggcagtgttcttctggggtttctttgtacaggaagaattgagacagatcagccaaagcaggtgtgctcctgttctgagtgtcctcagggagattctagaacccttactttggttttattt

SEQ ID NO: 136159 - DNA, 1102 bp, Homo sapiens
acctaaaaaatctgagaatatttttttaaaaaagcattgctgtacatgtgtgctatgagagttttccccagagaatgaatagtcatttttgaaaagcttgtcgtaaagtttttagaaatgcctgaagatcgtggcgttagtttctacttcttattccttggtgacattacttctaaatttgttcaaaggagaaagaggccaaaaatttaaccacagtgtttaccatatttgagaacttaatcagtgaagaaacacaacctcagtaatgtgactcttcaaaacagtcaaattatgtgagaagtctgaaattttgatgtcactgatttaataagtaatctgtgctttttgtgtgatgtattgctttccaggaagtagttaattatattgccttttactttatatcctataaaagcaaatctgttcattttatttagatgccaccaccaaatcaaacaccagctccagatcagccatttgcattgtctactgtcagagaagagtcatccattccgagagcagattcagagaaaaagtgggtttacccttctgagcagatgttctggaatgcaatgttaaagaaagggtgagtgaacatattatttaagataaaaatttcttgtcagaatatccaagagttatatgctaaagagattttttaccttcaaaacaatatagtacatttttatgtattaatcagtttataatcacctgatttttcacacctgtcagaatgtaagtgcgagaccagtgtattaaatcagggttctcaagagaaacagaaccaataggatatgtgtaggggggcaggagacaaggaaggcaggaagatatttattgtagggaattgacttacacaattatataaagctgtggagtcccaagatctgtagtcagcaagctggagaccgaggagagccgatggcacacttctggtctgaaagccagcggtctcaagatgcaagaagaactgatgtttcagtttaagtccaaaggcaggaaaagtccaatgtcccagctcaagcagtcatgcagaaggccttccctcttactcatggaagggtcagcctttttgtcattcaggtctgcagctgatcagatgtga

SEQ ID NO: 136160 - DNA, 1088 bp, Homo sapiens
acacacccagcataatgtttgaccaaatgtctgggcatcctgtggcatagtcaggttgacacataaaattaaccatcacagctagtaataggttttttaaaaaactgaaaacactgttagataaaatgtttagaaaaagttaggggatcattgatcagtggtactatctgaacaattgtcaccttaaaaatagatgattctgtaagtctggtttactgtgactcagtaaaatgagactaaggtgaaccttttatatttgttttcaatgcttctatagtagctttggatttatagtgctgctccatgatcatgggtaaatcttgaaaatgagccttagatctgttaaattcagagaaaatgagcattcttagttctttctcaaaggggaatgttgaataaatcatcttatgaaaatatgtggattaactttatggcattatcaggaacagttgtcaaattttaccaaatattctttcctaggtggaagtggaaggatgaggatatcagtcagaaggatatgtataatatcattagaattcacaatcagaataacgagcaggcttggaaggagattttgaagtgggaagcccttcatgctgcgtaagtatgtttgagatcttaaatgtttcaagcatctttgttatttcatatcagctttctagagttttaacattcaaatcatttgttctaataaaacattttatgtagcaggcatggctcagtgacaattgttgcatgacaggccacccttcttagttgaaaaatagcaaccattttattaggcttgtggattcagtgggtctgggtagccaaggacagggcaaggatggcttgtctctggtccttgatgtctggggcctcagctgcaaagacttagtggtcaggatggcttccgagccgtgggctagagtcttctgacggcctgctggtttactcctctggcgagtggtcatggcctctgaatatggctgttttcggcttcgtcatatggtggctaggttccaatagctagagttccaaaaagcatctctatctccattttctgacccagcctgggaagtcccaaagtgtcagaagcctgcccagat

SEQ ID NO: 136161 - DNA, 3254 bp, Homo sapiens
gctgtgaactccacgaggacagtgctcagagggtcttgtatagcaggtcagtgccctgctataccctggtgcctacagagggctggcacctagagagtcctcagcaggggtctgcgggtagagggagtgcatttgccagctaggactctgccactcctcatcttatgtgtagttattaaggagctggtccaacattaattacaatccatttctagggattaatccatcattttcttttcttcataaaggctgttcattggtttgaaatgaaagaagagtataggattttcttgtttgtctgaaaaaccccagctgctctgtgccaaaaagaagcatgatgcacaatacttgaggctgtttttttttttaatttgcctttcctcctccaccaaatggaaaggccctgtttcctgactcctcaaagtgcagtgtagatatccagaaggaaggggaggcaatggaatgcaccagtccagaaggaaagaggaacatttttaacaaataggcacttgttgtttgaattattttagaacttacctttctctgtaaatgttatattatgtgaaatgtatacaggaaaaaaatggatattactaaaaaattagaacatcatctttgtcaaagaaaagaaaatattttaacagacttttcttatttggggaattctagagagtgtccttgtggtccatcattgatccggtttggagggaaagcaaaagagtattcaccaagggcacgaattcgttcctggatggggtgagtgtcagcgcagaagtgttgtttcaccatcctcaggtcagggtcaactttctcttcacaccaaaaccagtctaagaattgcagtgccatcttgcaaaacttaatgcatattcaactgtagatgtctttctctccctgaggtttgcccattaatgggcagatttattagggtgtagtagattgcttcctatatatcatagggttgaatggagttattgtcaatgttcttggatctgccctcttactcttcccgtgatctgtgtctttgggtttatgcacttagccatcctccctttcttttctagcatacttgagattttttgctcacacctgcatctctgcagtatctcagctgacctccctggcttaggtctcttccccattggccttattcctttgtagacagatgagctgtcatctgatacggacttatcacagttcttcagtgccatcttcccttagtgctgttcactgtgtaattcttcaagtctgacttccccagttaggtgtttgggagcaggtgtttgcatgtgcttcttgagttttctcatggcttaaaccgggactgaatgtattgcaagcattttaacactcagtggcatgtttttattccaggtatgagttgccttttgataggcacgattggatcataaaccgttgcgggacagaagttagatatgtgattgattattatgatggtggtgaagtcaacaaggactaccagttcaccatcctggacgtccgtcctgccttagattcactttcggcagtatgggacagaatgaaagtcgcttggtggcgttggacctcgtaaagcactgtttcagatggaaaaatataaactatttttttctgagcgatacattaaactattttccccagattgaattgcactcatgatgtaatgggaacttcaagtgggtaatcacactttttccttcacttaacgaaggatactatgcactgttcacttttgacttgtgttgtaccttgcagtttatagcagatcattttgttttcttcctacttagcttaagtgggaagcagtctctcagtttttcctttacctgcagtattgtctgtatatttcatctcgaaaagcctgaacaacctctgaaaaagagcttttaaaaagtgatgaaagttgcttttttttcttactattttctcaggaatactccagagatgtaaagcctgagagtccatggtgatgctcaagagctttcatctggccaaatattttaactaaagctgttcattataaataagaggtgattataccttttttaaaaaaagttaccattatttctaaagcccctatggtatgattgtgacctttaacaaaatgcaaaggtatacactggaaaggtactcagcaaaattctctccaaattctgatttatatgaatttcttggactggatagagtactttcaactataccttcctttggaacataccttttaaaaaatgttccctttaaatcctgttattctaatatgtaactctgctcccaacaaacaggtctcctcattgtccttggcatttgacaagttatcccaacttcgaatctcatttcttcctttgctggcagcctccacccttccccacatcagtcggcctaatccaaaccttgaaagcctggcttaagtcccagtatcagtgatggtccccctctaaaacatgattttatatttggctgagtgttaaaattcacaagatgagcatttttttcccagatggagaacgcttcaactcagtctagattttttttgtttgttttaaggaagctctaagtttgccattgaaactttttgtaccagtaatccataaactggttgttctatttatagcagcatgttacaaatgactgctttttttttttaactgtctatactattaaatcctttaatttatcctgaatgctgtagtgttaaattagtggatgaaattggcagtctgtgggtgattaatttggtatggatttgtcagttttgtgtggagtttaagaaatagaacagccttaaactctacatttcaaaatacttgtatattttaaaataaagctgattagttcacaggttttgaaaattttttggaataattttacacttaacgattgtttcttcagacgtattatctttataaaaccaatgctttatgatagaatgatttataacccagcacacatatgtttattgcagcactgttcacaatagcaaagacttggaaccaacccaaatgcccatcaatgatagactagataaagaaaatgtggcacatatatactacagaatactatgcagccacaaaaaaggatgagttcatgtcctttgcagggacatggatgaagctggaaactataattctcagcaaactatcacaagaacagaaaaccaaacaccgcatgttctcaagagtgggggttgaacaatgagaatacatggacacagggaagggaacatcactggggcccgtctcggggccggggggggg

SEQ ID NO: 136162 - DNA, 1023 bp, Homo sapiens
gtgtgaacccgggaggcggagcttgcagtgagtcgagatcgcgccactgcactccagcctgggcgacagagcgaaactccgtctcaaaaaaaaaaaaaaaaaaaaaaagaaataaaaacgtgctggttgatccctacagccaggaggtccccatcctcctagttgagcagccggcttagcatgagccagtaacgtaattattttaattaaccaaaacaacagacaatgcaatgtaaatgcataagccaagtatataaagactaatgaatgataaggaaggctttgaaggagaatcccaaaaaatgttgccatgaaactggaaggggtttagaaaatatcataaaaatcagaataatttttcactcactgctttgtagtcgtttcttaaatttgctgttaaaaaaaaaaaaagccctggaactggaagaatagatgatgcacagtggatgtggttcatccactgtgcattagtaagaaggatgaagtggcactgctgacccaccgcacccagagatgcaaaaggccttggctccttgttgaaagattagtaaatgatgtacatttatgctttcaggtaaaatgtaacatgtgatcattttatgatttctagtttcagctggatttttttaaaagtatgatttgacattgttcaggccaagcattgccttagaacagcattttggatcttgctgcctttccccttccacctctctcccttttgtggtttccccagcaagatgcttttcaagcttttgtgtactatgtatcagaatcccctagagggcttgttaaaacgcagatggctgggcccccacccagaattcctgatcctgtatgcctggggcggctgagaattcttgtttctaacgagctcccaggagatgctgatgctgctgggccagggggcccaatttgagcttcactttcctctggcatcttttgaatcctttgagcttccatccacccccatctttgtgatgcatttacagttgcctcatagtcacatagccgtgggtcgaagtt

SEQ ID NO: 136163 - DNA, 1099 bp, Homo sapiens
aggagtggctcctctgggcatgcgtttatttcccagatatctgagacttggagtgtggcctgcagggaccctcccagccaacgactgggctcgccataccttcctcttcctagagtaggcgttcagcaggtactcggtaaatgcaggttgaattacagaaacatcaaataagggagagacgaagagaaggtccgaagagccccacaccatgccacatgcaacaagaggagggtcgcttgttttggccagcgcctgctggccaggctccagttacctttcccaagccttggtccaggagaactttcccttgactttgacgacgacaagtggcccaccagcataaactgccctggcactctgtaaagcttctccgagccccccggggccgcgtcctcttgcatagccagcagggagcgctcagacagcactggggagttgttgtcataaggggagatgtctccgctggaggccttgttggagtctgtagatgaatgcctccctcccacggaaaaggaaacttccgactgcagcatgtcagggcttctggcacaatgagacaattacaggtgcgtgagtttgttaacaagtagtgaccagatttaaacaatatggctattacacaaatgactggaggagtatgcgtggacacgggctgaaacaaaaagaccattttgagcaatgttccaagacatgtacatccatgacgtgaaagggtttcaacgatatgaccagcagagggcagtaaaacccaacagatataacaggaaaaggcaatgatggagaaggcacggtgagaatgaaaccgacaaggagccctgcatttgccaatgggcatcgctaagtgcctcagggactcattcctgcttccatttttaagtgaaagtctgatgctcactatctattaggtaaggatacactagtagataactctttcactttcctcaatatcctgcattaaaaataattcagataaaactatggttgacactttgcttgaagttcattatggctttctggacaacttttccatcccaccaaaatacttactgtacttagtgtaaataaatccatccttcatgtgataaagatgttgatgcca

SEQ ID NO: 136164 - DNA, 1050 bp, Homo sapiens
tgtgactccatcagaggcaatgaaaaccctggaggttttccctgagacttctaagagaggatacagggcctgtatccatatgaggcctgatgattgcgctgacaattgagcaaacaataccaagaaatagagataaaagggatgtcttgatatcatctgagtcccgggacaagctatgtctgaagccatatttgcttgtggattgttcagctatgtgagccttcaaattacttaagctagtttgagttttgcattgcaaagaaaaatacgtacttgatgaacctttgatacaacagctttcaaatttgtctgctatttccttaacatgtgcagcacatttcttctctatgtggttgtcagaatgccatggtcaagacactcatttactggaaactctttttattcccatggctgaagccatccacttgcatactgtcctcaatctgtctttcccatcttctcccctagcagtcattccacacaagctctacttcagcaccactgtgcttctccctcaggtcttctcttccctcccttcctttcattcattgcataaatgttgagtgaatgcttcctgagtgccaggtattggatgctgggaattcagttacaaaccaaacagacaataatccttgtcttcatgaagctggtaacaaatatggaaagacgggcattaaacaaacatacaagaaaaacatagagaaacacaaggcaaagaagggcaatgagaaatgcttgggaagacgcagttttcaataggattgtcagtcccagagaagctgacattttagcagaaaactcaaactgatgaaggagttggagaaaatcattccaggtagaaggaaggaaaagaaagccaatgataaaggtcttgagtcaagagtgatgaggaggtctgtgaggctggaagagagtaggaaaggaggcgggtggtaggaaggggtcatagggccaggaccaggtgtcatggagtcttatgggtcataataaggacttctgcacttacttgcagtgggtggggatccactggagattttgaacagatgacta

SEQ ID NO: 136165 - DNA, 1038 bp, Homo sapiens
caaatctagtatttgataactaaagaaatagaagaagatgaggtcatgtagccaatatataacagggacaggacgatagtaaattttctggttccagagtcagtttcttttcatagaccaagacttgagatatttgtctccctcttcctcccactccactgttatttttctgaatatatgattaccagaatccttctaaagaggtcaagaatgattacattaatggttaacttactccaagaaaggtatccttaatttctccatgcccaaatcttttcatacgtataaggagtaaggcttggtaatatggaaatcatatgtcacagaacaaccattgagtcattcattaattcaaccaatatttattgtgttcctaccatgtcccaggcacaggggtaatgcagtaaagaaagtactatagatagaaatggaccaaaaaaatcatcctgtcatgtagtttacatttctagggagtggcgaacataaacgagaaatttgtaagacccaatgttaacagtggtgagtgctaaggggaaaaagcagggaaaggaaatagggagtgatgatgtgtgtgtgtgtgtgatggagggtggaggtgcattttagacaaggtggccaggaaaggcctctatgagaagtaaagactataactggagaccaaaaatatgagagaatgccgacatcaatccctacagagaatggcaaacaaagatcagatttgggaaaagctggaaaaggtagaatactgatgtttttatactgttcttagtaattcaggtggcaggaaatggaaagaagagggatggcacaattaaaatggcagcagctatattttcaaagaagccaggaaaacttttgttggtatctgagttgaaaagaaatgctcgatgatatgtggtttcatataaaggagaactttgcttagataatagaattaagtttgatgagaagtattattttgttaaaaaaatccagagaacatgaagtaatgccaagactacttggcaagatgatatgtgacttaaacttgatgaaaat

SEQ ID NO: 136166 - DNA, 1112 bp, Homo sapiens
ccaggctgtagacttgatgctaactagctttctctctttctccccacctccctcacttacccacgtcgctctagtctactctcaaatacctttcgttgacttttcttctctttccctcatggcttctgctccttcatgacatctgatgtctcttggtttctgctatctctctatctacccataatttcttgatagatacaatttattctataacttaaaacattgcaataatttttatatttgctttccttctgctttcaatgccttctggaactaggtggaatctgaatgtatgtatgtataaacgaatgaatgaaatattgaatcagatctactaactttgtctttgtatcctcactggctgcccatgatgtcatagttgccagttaatgagtactatataactgccattatgccacttacacatttcttcaaccttcacacattcttaagaagagatggttttatggactgaatgtttgcgtcccaccaaaattcctatgttgaagcctagccctacagccagtgtgatgctatttgcaggtagggcctttggggagtgattaggtttagctgaattcatgagagtggggctcccatgatgggattagtgcccttataagaagaggaagagaccagaccttgctctttccctgccatgtgagaacacagtgagaaggtggctgtctgcaagccaggaggagatccctcatcagaactgaactctgctggcaccatgatctcagatgtccagcctccagaactgtgaaaagcaaatgatattttgttttggcagccaaggctgactaaaaccagtggtattcctctcccattttttaatgtataaaaaactatggctctcacagatgaaattgctttccttagatcacaatgcaagtggtaaggccaggaattggaaccccaatacctgaattattttatggttttctgcattcattttataaaacaataagccaaaagataaatgaacaattattttttaatgaacgtgaatatgacgtatttaatgaattttatctttttgttctgcttttctattttggtctacatgacaataacacatcactataggcatatacgttacttaatat

SEQ ID NO: 136167 - DNA, 1138 bp, Homo sapiens
aagtctgactcacagtcttttatgttttgaaaatgttcaaagaaggtggaaccaaaatgggtgaaaaaaacttgacacatatttgaattgttctcatttgttcatatttgtaattctttaaaacgagacagacaaacgtacagcatacttttgtggccaagaacttgggaatcagatcctaaatctcaatgcaatgttgtactttgggtttgtgtttggaatcaggcatggtttcaaatcccaactcttgtatctactaattggatgacttccagcaagttatttgtgagccttagtattatatcataattgagtcagcagacctatctttcagagatggagtcagaattaagcagaatgatgtacataaagttattggacagtgatgggacaaagtctgactaaataataacaccactgaattttaaaatttaacatgttatcagatctccttcaattatttatatgtatatatgtatgcaatgaaaacataatgcactagcctttttactgaattattcttattctaaaacaggaaatatatacaatcatatggttttatttaagctaacaaacatttgctgagttttggtaatgtcaaataacttactgttggatactgaagggtatatttttgttcaggtcgtaagtatcctaatatcctgtacatatgaatggccgttaggtcacagcttccctcctgtagctcttaacatgtaatgcctctagccctgtggctctcaactgggggcaattttgccctcccccacccctactcccccaccaagggacatttggcaatgtctggagacatttttgtgtatttgcttgccacatcttggggagggtgctattggcgtataagcaagtagaggtcagagatgctactaaatatcctacagggcacagaacagcccctacagcaaagaattatccagacccaaatgtctacagtgcctaggttaagaaacatggtcttgatattatgtatttttctagagtttattatgtctttcatcatttgtgactttggccatgctatgaggactgtctagataaaaattgtccagtcatgagctggttggacataaagctgtgactacttgaactcaaggtgatacttacctaatagcatcgt

SEQ ID NO: 136168 - DNA, 1048 bp, Homo sapiens
gtagttaagacataaacatcccactgaactagacaccagacttctaagaaactcgactttctaaaatcaaaagcaaaaacatatctgagcagccaccaggactgtctatataatttgataaaaatgttgcaaaactgaattaatagttatggttacacaatttggtacatttactaaaatatcattgaattgtacacataaaatgcataaattttatgctgtatcaattataccaaaataaagttatcttcctataaatatatgttcatttgtttatatatttatgtttattatatatgcatatataaatctaacgtaaacatataaataaatgtttatatatttcatatatatttgtatattttatatatatatatatatatatatatatatatatatatataaataatgtctgccagtgacacaggcccaatatctatattccacataatgaagtcatagcaacagggccataatcttatcttattcatcttattttgggatattttggccttaaccatgtgacactgaaatttgcttgggactgttgaaagcattccccttgtttaaagaggttctactaaaaacaacttttcacccatttttttgtttgtttgtttctctctttttattttttctagcacagtggtaacaccctattcccactttaacttcttttccttccttcttttttgaaaattttctaacttgtatttataattctcttgctcatcaaggtcatccagacactatggttctgttcatgtggaattttagtctcatagcaatcagtaagactgtcttgcgagagccggaaatgtgttcattaacttgagaggccttcctgctaagtggtcaaacatggaaacacaaagttatgtagggacattttgctctgtaaactcaaggtatagcatcatttgtttaaaccctctctattgagatgtaattcacatgtgatacaattcacccatttaaagtgtacagttcagtgggttttagtacattcacggagttgtacaaccatcaccactagctaattttagaa

SEQ ID NO: 136169 - DNA, 1127 bp, Homo sapiens
tgtggtttttcttgttttcctaatttttgcatgagtttcttttgttatctgttgattttcatcttaagtgtcaaacataaagagtcatttcaattcaacagacatttattaaacccttattaaatgccagggaagacatcatctctaccttcaaggagtttccagtctagcagtaatttcaaacatgtaaaggagtggtattacagtggggcagattgttaccaaggtgctatgcatcatggagaaagggcattgtcttactctggggagcaggggagtgacacctgtgcggggtgcagaaggtactgtagacagagtgagcagcaaaagcaaagctgaaagtatagatgagtgggggttgtgagtctccagaatgttgttcttcagaactgttacttgtattgctagattcgctttcatataaaccctctttcaacttgaggaaccacgtttgaatatttatcatcagttgtaactaaggttttacttcttgaactgtaatgcttgagtggactgattgttctgtgaaagcaattagcaaatcaagtcagatggcaccagaaagctgcactgtgaactcaaggggtacagaaaatatactccggctttgttgctatggtaacaagtggttctcctgcgttttagttccattataggccatggtgataacagtttctctttgggtaattatgaaaaataaaggagagagaaagaaaagccacatcttggtgtttgcccctgcgtctaacagctgcattttattcctgcaactgttaagggtattggaatgaattcttgtaaggggcagctattgtgataactcttccctgaggatccatgtgacattggctttatgaacacttccaatgtgtgcaggttacagggaggctaagcatccctgggcaagctatgctgcacagccagatccacgaatgggaatgctggggtctctcacctgcactcatattaacagccctcttggtaattctccagcaagatgccatcctttggaccagtggtttgcaacggaggtcagcggtggggaaatgggggaggattttgccacccaggggacatttgataatgcctggagacattttgattgtcacaacaatggagggaggtgt

SEQ ID NO: 136170 - DNA, 1020 bp, Homo sapiens
atcagcttcacttctaaatacatactctagggaaattctcatatacgtgcatgagactgttcattgcaacattatttgttatgggaaaaaatcagaaagaacatacccttatgagaatagataaattaattatgggataatatttcagtaaaaataagtgaaatgggccaatatgtgtcaacatggataaatctcaaattttggcaaaatataatttatatattgaaattcaatcaaattcaagcttacagcaacaataatgatatgctgacttatattctagtatcctattctgattgcaagataaagaggtggcagccaattgtgcacaactttggggattatacccgcatggaagaatgtcgtgtatgtgagcatcattgtttggtgtgttaaagtgaaaaaaggaaggttgagaaccattactctagagttttgttgttcaagtagtgatcaattaggaagaaaaattttcatgaactctgtcttagctcaggctgctataacaaaataccacggactgggtggcttaaacaatgggaatttatttctcatagttctggagactggaaaatccaaaatcaaggtgctgacagattcagttcctggtgaggcctctttacctggattgcaaatggaccctttcttattgtgtcctcacatggcagagagagagagagagagagagagagagagaaggagggagggggaagggggtgggaggagggaggcacactctggtctttctcttctcataagagtactaatcccatcatggggtcccaccttcaagacctcatctggacctaattatcttccaaagaccttgccttcacattccattacattgggggttagggcttcaacatatgaattttagggggatacattcagtccataacagattcccagtgttgacttactctaattttactgaaatagggctatagttatttatgtaagactatgaataaacttcttatgttcagaaatcttatctatataatccaactaagttat

SEQ ID NO: 136171 - DNA, 1010 bp, Homo sapiens
gtgcggccggcagggggcgctcacagggcgctacgcccgggagtcggggcggggtctgggatgcttccacttccttccgtcaggccgggcggcgcacgcgcggttgggagcctcgcccatgctttgtcgcgttaccggggctaccgtttgcgcccccgactgcaacggtggccgctgagggaggaggcttctcgaatacggtttctgtcttcgcgttaaatgtctccttctgtgcggcctggtgccgggtgggctcctgtgggacgccctggccgtccgatccaggttctaattcatagttacacggcgctggccgctgacttgcgacgttgtgtccctgggaccctagtccagtttaggccccatcccgcctgtaggccgtgaaccccatcccgagggcaaggttggcccagtgttttcgtaccccagggccttgcagcatttacgttttcaaactctgaaggatttacgtgggtctgaccatagttgatgggaatcgcgccccgggccggtccacctaagtctccgggagctgagccacatcttgcagctcctcagatttgggtggcgggcaggagttggcaccaggtctcccagatccccaaggaaagcacccaggtgctttcatttcagagacctgggttcctagggccacctgggcgaagccttaggcggcagggacaggggcagtcccaggtgtgtctttggcgatgtctggacagctctgtccattagagatgctaaaggacatccctaaagggatgagcatattctgccttcagttccctcccctgctgctcctgtcttttaaccgcgtctgctatccctctttctcctcgccctccagcctcctcggggcggaggggggggggcacgccccatcattagttttagttgttccctctagggacacaacagggagggattccagagtctccagctagccatcctggcactggacataggggagcccaggagactacaactcccagagctctcagggctgcagc

SEQ ID NO: 136172 - DNA, 1873 bp, Homo sapiens
tttaatcctcccagtgttgacctttgtaaggagatggtggatggattaagaataacctttgattacactctcccgttggttttactctatccatatgaacaagctcagtataaaaaggtgacttcgtctaaattttttcttccaattaaggaaagtgccacaagcactaacaggtaagttatatagcctgcactttcaccctcacatgtcagcagtacaatgatcagatccttgttttgaagagttcaatctgatggtgtgggccaacatgtttggaggagggaaggaaatgaaaagtgtgtgtcctggtggttttcttttttcctgggtaagctaagtcatcattcactttcatatggctctggcagattttaccaagtgaagaccccagcatagagaacttaggtgggatgatgagcagctctcccattttggggaagacggtagtgggtggggtgaagagagcacaggccggggagggtggaaggggcaggtttgaattgagtcccctcactggctgtttgtgttagttgcagaggtttcttaggagcctccttcttttgcaggtgtgggatggacggaaggcaggcctagctagtagtattaaatgggaatgttcacacagggcctgcaaactttggccttcagtaaaagttacttctcttcttgctctgcgatgtcaccacttttcctccctcagttaccgagcatgctctgttcttttttgagggggcagggagggggatcctgcaacctaaagtctttcccttaatctctataaggtattgtgctcgctccctcttccctctcttcctgagagagtggtctgttctcatgatttccactcatctgtctcctctgttaaccacttattatctgccttcatctactgctgtgctgcaaaactttgcctgcacgtgaactgataacctcccacttgcagtgtgctgccctttttctcggccaccttgccctgccctccctttctccctctgcttcatggctgtcagctccccagcttctctttccgcctggccgccatctcctctcagccatccttcctttggtagcttctctctctcctttccctttccccatgtcagtttcaccccaggtgagaggcctgcaggactcactggggacctatgtcaaagtccccagggcctacttcaaaccttgagactcctccggggtgggttgtgtgttttcacacagcaaccccaatgcttttcttagtcctgccagtagttacgtttcaacgaggtggtagggtattcttgttctctagaccagcgtttctcagcctcggccctattgatgttttgaatcagatctttctttgttgtggggctgcctgtgcaatataggatgtttagcagaattagtggccttcacccactagatgcggataacacctctttcctcagttgcagcaaccaaaattgtctccagacattgccatctgttccctgtcagggcaacattgctcccacttgagacccactgctctaagacacatataacaggggcatcacaatctttaatgccagcgtgccttgcagagttatggagagggtccaagtgacttcggtacatatttacgaccctcctggagtagagagagcatttcgtgtcttcagaagcactccatgttctggaaaggccctttgagccatgtgtgacatcctccatcttccctaggagccaggaggaactctctcccagtccgcctttgttgaatccatccacgccacagtccacagagagtcagccgaccaccggtgaaccagccacccccaaaaggcgcaaagctgagccagaagcattgcagtctctgaggcggtccacgcgccacagtgccaactgtgacagg

SEQ ID NO: 136173 - DNA, 1021 bp, Homo sapiens
agagtggagagtatcccagccagggaaatcgtcttgtggttttaagagatcctttcatgtaggcattttgaataaagtgtccatgagtggaattagacttcacaacattttcttggaaacaagtttccaaaagaccctcttccctcccagcctcttcctcaacaaaacccacaactctgtttggcataaaattttgtaaactgaaatcaaatagtgccaagaaaatatgaagagtcagttgcaggatagcataggaaatcctgctaattttgatgcatgcctaatacaaaatagaaattagaattttaggaagtaacttaggaggacttactaataaacctagtaagaggttttaaaaacgtattcgaagatatcaaccagaatcaatggactcaataatgatcataaaaagagtacactcatagaagaaaaagagttagctatccaatgagttttgactcaatttatactgaagaaggtttgcacatttttaggaatttgggcaggtgggagtcactgggaagcaagcataaggcaaatgtgcttattagtgaatattgcacatgtgagaatgtcttagccctccatggcaaaatcagttgaagtttgagtcaagatatcatatgtatattgaagattcttgaatgaccagcacatttttaacatccgtcttcatacatatgagtctttcctgtgtcttggtactgttagctagaactgtaacatgttttggcatggcaaattaggacaccaaatgccattactagttgttctgttcaatttttgtatgactttgctcatataaatgatgtacatttctgaagtgagatttattgtttataatcgttttttattttttattttgtttatttatttatttttgagacggagtcttgctctgtcgcctgggctggagtgcagtggcgtgatctcggctcactgcaagctctgcctcccaggttcatgccattctcctgcctcagcctcccgagtagctgggactacaggcacccgccaccac

SEQ ID NO: 136174 - DNA, 1040 bp, Homo sapiens
accacattgtctctttatttgttagcattaaacaaatttttttttgcaaattggttttatttttttgatgaagccgagcaactctgtccaaaaaggtttagtttgtactcggaaaccacaaagtagtctcaaagtattttagagggaatcgatattgatggcaaaagaaaatttgcagctatgcatttgcttctaacggttccctctctgtgaaacattatttttggtgatctaaagaaagcattgcctttcttatttgagattttacagctatactttgttgtgtaatgttatggttccctttctgtaaaatgttatttttggtgatctaaataaagcctgtcttgtttgaaagaaccaggagagagagttttcactctggccttgtcctctttaatgcagggtaacagtggggtaaccttttgactcataactttaggtttcattttgtttttcctttgtgcctttttttgttaaatccctctttggttttgcctcacttggcagcaggaccagacagtggttcctagaagttcctgcagttctgtgctgtcttgttgctgcattgtggtctcatctggggctaacaccagcttatcctcctcctccctcattaccaactgacagtctctgcagtcactcctctaatccttattttagtcgcacatgcctcccctatcttcagatgttttagaaagttctaacttcgtagaaatggtatcagtaccataccagcattgaatatagcacctgccttgtaactcaactcagcagaccttaacttccaaagatcactggttgtgaacaagggccacaaagattttttaaaaatctgtagatggtttcatcaaagtgacttatgcatacactgaccaatgagaattaatactgtgcacttagttgctaagttagacgtgggttttggtgtctcatccggagtagtactcaggttcctggtagcttttatctccatttggtttatgcaatgcttgtttgaatctggcgcacctgcagtgtgctctgaattgcttaaaaagctg

SEQ ID NO: 136175 - DNA, 1012 bp, Homo sapiens
gccgggaagccagagcagcgcctctcgcccaggcctcgctttctctggacgcccggcagtccccggggctagagcgcacggggcggggcgcgagacccgggccgcgctccccgcccccgcctcttgcgccctgcctggctccctctccattgagttttcctgcctcgggtgcctatcaatggtcctgctcggggatgcacacgcagctcgcggccggaggggggtagcagccgccgcctccaggtgcaggttctctccggccgccgccgccacccgctgtcgccgcgactcgagccccgggcgcactgaggtcttggccatggggctgcggaggctgctgttgctggcgtgagaaggggcgacggagttgtcgcgctcgggggtccccagctgcctgcatggatgtcttcagctttgtgaagattgcaaagctttcgaggtaggggctgcgcgggttccgtttgcacccagggccgctgccgcgggcaacttggtgccttatttttcgggaggctgggtagaggcaaaagctggaaagcgcgacggggcttaagacaaacgaagtggccgggggcttccacgttcaacttatttctcactggctgctgaggcttgtgtagcggcgggtgtagaccacacacagagaggtacatacatgccctcaccaacacaccgacattcacgacagtttgttttccctaaggaaaagccccagcggtgtttggggtcccatgtataattcagggctaagagaagatggttgtaattgctactgctagggaaacccagaagtgcttggagcttgggtgcctgccttccaagctgcaaagaccaaaagtgccgccttcccccaactcctaaattacacctccacacctccacaaagtcagctcctagattgaccaggtgctcccaacggtaacctagatggcgaagtcatgtagatagaagagaaagactttcagcctttttttttttggggggggggtaactatattcttaagcctcgaaa

SEQ ID NO: 136176 - DNA, 1048 bp, Homo sapiens
ccattaaggactgggcttgcaagttggtgtatcataatttctgtcatatgctgttgggcaagtacagagccctctcagattcaagggcgggagactagaccctgctccttgatgggaaatgtgttaagagtctgtggctatcttttagttaccatgcccgtttattgttgagtcagtgacgctcttcagcgtttttatttgggggtcaataaagatcctctggcagaatggcaaatggatgctgccttctagccacaattttttaaagacctagaataaaggtagtcatgatcatctttttgagtagaagcaggactagctttaggggaaaagttgccatggtgatgatattctctgtcctcccctggactgctagtcatatgagaactgaggttcctgagtaaaaacaggccaaagaatctaatcttgtgggataaacgtcataagaccaggagttggcaaagtttttctgcaaagggccaaatcgtaaatattttaggcagtgctagcacatgtagtctctgttgctgcggtatcttacagttctgtaagttacggtaatgtctgtcacaggttagcagggctgtattctcttctgaggctctaggggagaatctgttcccgtgccttttccggtttccagaggcagcccacattccttcactattggcctcttcaccttcaatgtcagcaacaaaatgttgctctgaccctgcttctgctgtctccctcttgcatttttaagggccccatgattacaatgggccaatttaaataatccaggataatttccccatgttaaggtcagctgatgagcaacctgaatgctatctgcaaatttacttcccctttgccatataaactcacatattcaaaggattaggatgtagacatctttagggggccattattctgcctaccacgccattcttaactcacaggccatagaaaaacagcctatgtgctgtgttttgtcaacctctcagctatataatactgtacttgatttctgctgtagttcattttgtgctgctataacagaatacca

SEQ ID NO: 136177 - DNA, 1064 bp, Homo sapiens
gtacatgtgtatgtttgtgtatttctaagtggctccattcagctgggtacactgcagttttctgcagtctcgggataagaggttgtgcataagaaaacatgaaattcatgctatgctcaaattgttccaaataatatcaatcattggaacaaatttgccttttcaaaacatagcagagctgaccatcttcttggtttggacgcagagctctgggaaggacatgcctgagcacacagcactattttctgtttcttcccaccaaaggaatatgccagggatgagctggctctccctctcatgttggacatccagaattctgtacctggaaatacagaaacttccagacatgcaattttcaaaaacttagctgctatttactctttctccagaagctacgcaaggatgccaaccagcaaaacaaggaagtataccaagaaagaggatacagaaaatggcaaatggagtgcaggagagggggcagggaatccccggatggcagctgtgcacaggcagagagataacccaggcctgccacccctgggagggatgcctgcaagacgatgaaatgcagatgggacttgaggcctctgatcttgggagattttgattgttagtgaagggtttagggtggaatctggattcaggattcagaaaacttagcagataaaaaggtaagagaatgacctccagggaaaataaaaagaaaagatgtgcataaaaagaaaatacaagcattcgtttaagttaattgcatggcagagctctgagcagcatttgcgcagttaaaaacgtacagtcaatctttaatgtgaatattgatctatattgggatgatggcgagatgggaagtttacattgcaagtgatggaactgaatggaaatggagttcagtcctcatcttccatagtgagaagtcaatacactttgcctaaaatgaaaaatcaagacacagcaatacacacatagtagctagacttgaaggaaagtatccaaaaaccctatcaagagttgaaattggtggcctctgggcactttctctgttatacgtcttacagaatggtttg

SEQ ID NO: 136178 - DNA, 1031 bp, Homo sapiens
ggctgtgtgagggtctcttgacctcagtgatctcacatgtgccactctgtccttctagaacactattctcctcgcctttgctaaacttgccttaaaagtgatttcctcagagggaccgctaataatgatcttgtttaaactttatgcccttcctactactatcatctctctctctcggtaccttttatttctacacacttaccatgatttcagttacacagattgtgacattacatgtacatatgtttaactgtttgcttctttcatatttgttctctatacccagcgtcaagcacttagttttgcagtagtatatgtaaatagtaaatatttgctgaataagatggaatgaatatatcttttgctgtcacaacatgtataattttctttttgatgcttcgttgattgcatctatgatttatccttctcatgtacgtcttagtgggaggaatctaacagtatccatcttttcctgttataaaattaatgttcttacttgtagagtcgtgccccaatttctgcaaaacttgtggccaatatgctgtcggtggctggggcggatcacatcatcaccatggacctgcatgcttctcagatacaggtatccgtgttttccttctgcaaatggttaaatcaagtctgttaaattaaataatcttaggtaacattacttgtgtttgagtttatatatggctactctcttggatttttgtctttactaaacttgaaaatataatttgatattagtacttccagtctctatcaccaccttgccccccagtcaattttggaggagtggggatggctttttggtagtaagctctatatagttccatctcagcttatggaaaataattagaacggcagtcataatgtacactttttaacttcttcataacttattttctttgtctctaaaacaggccaaattatactgtgccactttgtgttatataatgaacgtgaagtatttgatttataataactacttaagagacaacaaaccttttccctcaccgtcctgcatagcc

SEQ ID NO: 136179 - DNA, 1062 bp, Homo sapiens
aatttattttggaataaagaatgaaataagaatccagcccccccacccccgactctactgtctagtttttccaaaactatttattaaataatccacctctattgatttgaaatggcatctttcatcatatacagagttccccatttcaaatagatagctatttgccaactcctacttttaaaaaaatgcagaataaagtaaacagaataaatggctggggttgagatgctgttttgttttgttgagacctcctttcaagcagtctgcactcaatcacccctgctccctctgccaggaaaatcaagctttttagggaagtacatttcagaatttttgtcacctcctttctcttttccaagtgtttctgctacacattattgtcatcctcatattctagcccccaactgacagtctcctcagaacagccttgcgggtaatacatgacatatgcagttgacattatctgtgacttctttgcttgatgcaaaaggtcatagttagcaaaataaaatactgtaaatttctgtctgaccaattggagcttgttgctttagaaaaagctttgaagcttgactcgttccgggtaaaactgaatgttgccacaggaggtcactcttgggtaggctttgtagcttggttgggttgaccacggaaagaaaattaaacctaagaaacctacctaccactgctgagatagcaagtgtcaacctaaaagtggtatgggaagagggtaaaactagataactcagatttaactttttttctgattacataatctttgaagatgctctataggaaatttggaaagtagaaagaagaaaatcttaacactttatatctcaaccagtgatgccactatgaataatttggtgtactatgtatctgtctctcctgggggagctgatatggcacatgcacccacagagaaaagattgtaaatatgtgcccagaagaaatccaaaactgtatgtatataattttcgttctgcctttttctgcctaagatttcagtgtggtatgttgtgtcaacatcatttgttaggagtatgtattaggtctcca

SEQ ID NO: 136180 - DNA, 1076 bp, Homo sapiens
cacaggaaaatctgaaatgccccaggctcaccagcaagcgaggcctgcccactttctcttcctgttggcagctcagctcctcctgagctagtgatttttttttttaaagagatgggatcttgctatgttgtccaggctgtattcgaactcagacgcaagccatccttctacctgcgactcctgagtagctgggcctacaggcacgatgccatgcctggcaccattgatgtctgagcatttgccttagatgagcagaggagctggactcacagtttaaagtctccttagaccttgaatgcaatgaagcccatcctgactagcctacatattagatggctgtattaaccaggacttttgtccccactatctgtgccacaaactgggcaaatagtagttcctaaataacttactttaagttgtacctgtcatggttttaaaatgctacccacaaatactaacaaactgaatatcaaattcttacccagtagttctatccagtggccagggtgccctgacggtcattcctagctgccccaattgcaaggtccgccattagcacatttctccctgtggattgctaagtgcctgccccagaccatgcctgggctgatcaagagaggcctgattcttgcatcatctctcgggtgtggttgcctgctacattcccaaaatacaactttaaaggcgagatctctagttgactgtatgaacatgttcatttgtgcctttgccagggttacatcaattgcagacaggttgaatgtggaatttgctttgatccacaaagagaggaagaaggcgaatgaagtggaccggatggtcctggtgggcgacgtgaaggaccgtgtggccatcctcgtggatgacatggctgacacttgcggcaccatctgccatgctgcggacaagtacgcagggcggtggggaaagcgttaggacttctcactaggaaagggaaacacatcagcttttagaaattgggctcttttttcctgattattgccggtcttggcagtggagttttagaccaaaggagattctaggcccttttatctttatacttctttctctggtag

SEQ ID NO: 136181 - DNA, 3296 bp, Homo sapiens
aaggtcaaatatgttaactatttggtcctctatagtttgctgacccctgagttagatgatcacagttgtgctcttaaatgacgcagtcaccgccttttcagaaacagaaagaaaaaccttccgtataatgattaaacttaatttaaaacaacaaatgcccctggaaaaggatgtctctggttaacagtatccctgaaaagccttctgtctctgcattgaaaatctcccttccaggatcccatatgggtctggttcaacgggttgtaatttgaagacataccccaaagctgtctgtcctctcaaaagtgtcggaagttttgatagcaacacatcatgtatgctgcagaaattgtttctcagctttccagcttttcaatgtttaaagaactctaactaagatgtcctgcttcccttctccctttgtttttctcattggcatttaggtcattgacatttccatgatcttggccgaagcaatccgaaggacacacaatggggaatccgtgtcctacctgttcagccatgtcccgctataaatccagaatgggaagtgtccagcaagcctactctgacttctgacttgtttttgttttctggatttttagctgtaggtattcagcaatgataggttaatcactggcaaaagcatcagatctttgtatatgctaagatttattgtttccccttctaaagctcaagatcatttctttccagtttttggggaaatggtggtggttatttggtctttaagtgaactgtcttaaatgagaaacgtttttgtcattttgacttttaacaggtacaggtgatctcttcctttgttctttcagtactttgaggcgacaactttcaagtatataatttcattgtggaagtcatagtttatatatttcgaggttgccaaaggtgacttcagattaaagccttctgtgtaaatatatactgataatgcctatggacatttgggtaaaaccctgtatagaattaattatccttttactttggagtgaaccttggaaaatttataattataataccatggattttgaattttccttttttttttttttttggataactcagtttcagataaaccatcttggttactgtgcttaatttggaccaaattttatttagcttaatatggacactgacacattttggggggtatacattagacatatcagagcagtgtatttctggatcattttttaaatgacctcttctaaaacataactgtcacttacctgaaatgctgcatcctaaaattccaaaattatattgagcaatcgccaaggcctaaagccaactgacttaaaggtaatcatttcagctaagattaaatttaaagcctaagaatgtatagagctagttttaaaataatgatctcagatttttaaaaaggatataggaacctgcattgtcattctctgaattaagaactgatggtttctatcattatttagccccacctttgtattttaaaatccttcagaatacatttatgaaccaatgcgactggacttagccacacacaatggaaattcagaccttgactatttggtgtttccagttcacaaaggtgatgaagactgtcttgggagcagcttaatcccaaaatttgtacatttcttgctgctcctggcgtggaaacttaagtgagaccaccaaatacattggtcctgtccaattctactgaatgggggtggacctggcatttatctggccaaaaacaggagccagagaaatatgaatataccaaagttgtttgtttagcctccaacttaaattacattagtcaacttatagatactcatatgatcacttttctttttagatactacatcaactagattcaggagtatatcatttgcagtgcttgtattggtttaaaatgtaagattttaagatcctctaacactgtactaaaacatttcaataaaatcattctgactgcgttcatagtttgtatgtatcattgtggagtaatatgttttgacggagtgatgtgttgcagtacctgaaaatgtttgctactttacgattataggccagcatacaaaattacagaaaagccagaagttaattgatgtcagctgttttccattttgaaggtgtttcttcctgaagaacttaccagcaatcgcctttcctcaaagcgtaacagctgtgccacataaggtgtccacgttgttaattccacatgtttcctataaaattaaagatggtacagtgtgttcacgcatcagagtagtgatgttcaatatccatctattggagcaaaccaaacttaaatgtaggctgcataaaacttgttcatattcattgatttcagaagcaccgaggaggattcctgtccccatagaacagcctgttcagtgatacttcaaactactctcgtgagcgcaaagtcaagtcataattacgttcccctggtgaagctcagctgtaaagtatgtgtaacactaagaatggcaacatggtgtcttgaagtcacagtgaaatatgaagaattacatccaggtccatctgagaaaaaaggtgatcacagtgtgagagaacatgatagaatgtactagaaaggagggaagtgaaggagaagtgaaagccaaagacacttcatcagctttacaattgcacttaataatgctgccacacctcttcagagacgtttcatttcctatggcatgtcctatctaatcccctagctgaactacaggggacagggaagtagtgaagggaaagatggagtactaaggcgtgcagaggttggaatcacgctggggataccaggaagggctcggtgatcaccattagacggttcacgtcggaattttccagaaccctatggtgtgttccagtgtggactgacgcaggacagcagagggcgtttggtacatgatgtgtttgagcaaggatgtgccagggaagatgggagttaggggctgaaacatactcagctatcctgtatctaaattgcgtgaaatcaacagggctcctccttctcattaccaatatttatcttcctgatttatctccctgtgccccaggaacacatccctccaccttttttctgcccctgctttccaagatcacatcctgggtggtttcctttattgcagtctttgagctctgtttcctattctgaaagcataatgcccaggaacacagacttcaccacttaccggagtttaaaaaccaacagcaacaacgaccttgggctggttgcttaacccctatgcctcagtttccttacatgtgagatggggataataaatgagacgttatgtgtaaag

SEQ ID NO: 136182 - DNA, 1060 bp, Homo sapiens
gacggtcacctgcccctgctcacccccacctccttcctccccaggaaaaaggaagtcaagtagatggagaaacggggaagtccaagctgctggcagtggcattcaagggtctatatataaggttgactctaatccccagcgagacaaaagcctgtgccataaaaatgattagcaaggggtttctaaaaacatttccccaggccacggaaaaggagaaggaatattttgcacactgccttgtctcttagaaataatcacagctaggcctctttataaccggcgagtctttttcctttcacacgccatttgcaggcgcgtggcatggtatttgtaactaattttcagtagcaagtgggtcactggtattcacagagtcaggtgccattttgaaaactgcttccctctacccgaatctcttatatttccagatgcagatgcacttcagcgatgtcctagtgctggaaacgctcccttgaaaatataatttgatttttgaatttcatcttaagacattagagataatgtaactgtagtctttggaattcaacgctggcctccttagccatcacttttaaaatttatgaaaataaggaagaggaaggtaaagaacttcctcattgtccggcagtaaagtcaatggcagagcttgagcttgacttattttgctaagagggaggtgttttaccctataaactccaaattaccttacacccagcaaatactactgttgagtgctcacaaaaattatgctgatgaaacaatatggatgtttcagtgatgaaactttctcttttaaaatcacttaagggtgctttacgtcccacccaaggcaagaggaacgccagcgaggaagacaaagaggcccggggtggggcgcatgcccgccactggactgaaagctgagtcacaggaatcgtacccctgcagcgggccaggccctccagggagggacaccgcgcccttgtgtggagatgtccacagtagacaaaggcagtttcgaaataaaagaatgcctgtcaccccaggtgccaccccgacccttagttattatgcactggtc

SEQ ID NO: 136183 - DNA, 2438 bp, Homo sapiens
cctccttcctcctgccgtcctgcctccgtccccgccctttcatcatccgcgtccctgtgaaggcattccctaaatccgagcccgagtggttctccccgggaaggctactttggggagctggggggatgcgaaacaccctagatactggataatggggtggggaaatcgatgatttaagaacaaaaccgaaaaactggcgttttgccgtgccgctcggaggggacattaaaaaatttcttagtgtttgcccgcaaaggtattgtgcgttgccttggaggctgagatatgggggaatagacaagtcctttgttctgaggttcatcttccgagccccgagcctcctcccagcctcggacggctgcgcgggctgcatctgtgcagcctggcggcggcggggctgtgctatgacatctttacagtccttcttgcagagacatgtgtgccagggatgccgaattgccgggagagcaggcaagaccggcttcggggcgcgcggcggccgctttgtgtgcggggctgcattgtgacgcgggcgatgaagccggtagggcggtggtcggaagctccagccgcggccgccgcctttgtgagaggactagaaagccggatccggcccgcatccttgcggagaggccgcggctaggaaatggaaacgcttttcctacctgggctccattttaggaattcttgccgatttttcccacttgaatttggaagtggctttcctcttctttccttgtcctagccagcctttaattttaaacgctgtaattaacaattcgcagtggtcaatttcctttattctgcaagattcggctttgagaggcatccgccctctttggtccacagcgttttgaaatatggggaggaggggcgcggggggtgtcgcctctttttctgtagaaagaggaagctcgtgagcgcggaacggcagcagtaggagagcgagaagggtttttttcaggctgcgggtcggagggcagaagtgcagttcccagcccagagacagcggggcgggtggctcttcctcacgctcgctcttggcttgctccctgcagcttttcctccgcaaccatgtctgacaaacccgatatggctgagatcgagaaattcgataagtcgaaactgaagaagacagagacgcaagagaaaaatccactgccttccaaagaaagtgagctccgacccacccccatctttagaaaggctgggtgggagcggccggtgggagggcgggaggctgggagcggccgcgggaagaattcgggaggggggagtgcgggggaagagccgacagttgatgaatgtggcttgcaaaggttaattaaaaatggttttgcagccaacaaacacggggctttagtaatttagtaatggaatatttaatatgccatattaatatacaaacatttatccattaaaatgtatttctatttagtatattcaatatacatattttattccattgtggaataccgtgtagaatgtttatgatttgaaaagatgctttaaatgaaagccctttagtctgtactgaatcctttaatcatctccctccatcttttttttttttttttttctggtcacagcgattgaacaggagaagcaagcaggcgaatcgtaatgaggcgtgcgccgccaatatgcactgtacattccacaagcattgccttcttattttacttcttttagctgtttaactttgtaagatgcaaagaggttggatcaagtttaaatgactgtgctgcccctttcacatcaaagaactactgacaacgaaggccgcgcctgcctttcccatctgtctatctatctggctggcagggaaggaaagaacttgcatgttggtgaaggaagaagtggggtggaagaagtggggtgggacgacagtgaaatctagagtaaaaccaagctggcccaaggtgtcctgcaggctgtaatgcagtttaatcagagtgccatttttttttttgttcaaatgattttaattattggaatgcacaatttttttaatatgcaaataaaaagtttaaaaacttagctggtgtgtctgtttggtttctggaaggatcgcggatgaaacctttgcaaagaggcctacctcttggtccattggggagggacaagcatctggtgactggataaattcccttatggcatagaaatgggtttcacccaggtatgcaaaataccttgtctatactaggagatcattttctcaggctgattgaattcctagtatgaattgtgtgagagctttaataaaaatatctttgcagttcttacgggttttgataagctgacattgcacgtgctcaagaaaatgaaggtgataatttacagcacagtatcttatttcagggtatcaaattgaacttggttatttaaccaagtgctagcattaacatagatgagtaaaaattacatttttagcagct

SEQ ID NO: 136184 - DNA, 1006 bp, Homo sapiens
taaggtccttaatggattcctcggttctgtagggaagggtggagacttttttttttaaataagcaccagttttattaagccgaaacaacagcatttaagaaggctcttagttcactgaatgttctgcaaagctaaattttacaacgcaaatgtccaagaagttaaacatttttctctcaaaaccgatttatgaaaataccctttttgaagcggaggggtagggaaaattgttgatcactattaaattggttgctttcatttcctttgctcaacgcttattttgagaaatgcacaggaaaccatttacctgtggtttagacaatcaagtagaccatcaggctagaagccttgctctgcgttgcaagggaaggggtgtgtacaggctgctgcagaggctgctacaaaacctgaagcgccacagcccgcttagctccgtgaagagaggagtaagcacaaaggttctggagccatctcaagatggagacgggcctggagccctgtagttttcttgcctatagggaagggtgtgggcacagtgcaaatgcccaaggcacaaagagaaaccattcccacgtgggcttttgctgtgtgcctttttcaaacaatgcaaagacgaaagaagattttaagaaattaacacagctccagtgttcctcagttgaagaaggaacatttaggaaaagggataattcatggactaaaagacctttctcccctagagggacgaagctaaaacatagcacaaaaaaaaaaaagtaaaatggtaatgattgaattcaggctgcttgacgtgtggaatggggaaattcagaagcttctgcccatatcacactctgtacacttaactgctgcacacggggatgggagagaatttatttttttaattttgatgggggattctttgtttttcccaagagagattcttcccagaagggctgggggtatttatgagtcagtgtggggatatatgttcctgctatgtaggacttgggagtcgacagtattt

SEQ ID NO: 136185 - DNA, 1030 bp, Homo sapiens
actctgtctcaaaaataaatgactaaaattttttttaaaaaaaacattattatatgagccaaatagtgcagcaactccatgtactaggtttttgtgagaaaatgaggctgaaatggcaaagcgcttctcttgggcactgtaaatcagaacggtatacttctggccaaatgtgtctcccactgaagactaagaagagaacatggctgtcctttatattgtcactgttgataaataggccctcctggcagcatgccaggtcatatcatgaaaggacagctgtgggtggtgtgtatagtgtcagtccatgagaatgagtcatgaggccacgcggtgcaagaacgaaagataaaggaagcagcaccgaccaacgcttcaatgtttaatgcttatgtctcactatgccgatgaactgctgttacaaaacgacttccctttaaaacaaagactcaaaaaccaaaatgaagtgaggcatttcatggggcagtccacatgtcaggatcacctccagactgtactactcctggttacaagccactctggcagaacaaaaccccagatgacaggcctcagtttggatttcttcatagcaatggaaacagcaactgcgcaggcaggcagaggtctttgagtagagttggtgtccccttgttccatttcattttgtaagtgttctatatttttctgattaaagagaattttgaagaatccctagtaacaaaatagtaaagatgttgcactgcctctgaattttcctcttatgatatgcaccaatgtattagtacattctcacaccactgtgaagaaatacctgagactgggtaatttaataagcaaataggtttaattgactcacagttctgcagggctggggaggcctcaggaaacttacaatcatggcggaaggggaagcaaacatatccttcttcacatggtgaaagcaaggagaagtacagagcaaaaggggaaacaccccttataaagccatcagatctcatgagaactcactattacaagaacggcatggtggtaa

SEQ ID NO: 136186 - DNA, 1017 bp, Homo sapiens
gccattagttacataaggcttgatcacttgaaatgtggctagtccgaattgagatgtgctgtaagtgtaagacacagtgaattttcgagaattagcatgaaaaagaatgtaaaatatctcaatttgtttatattaatcacatgttgaaatgactattctggatacactgggttaaataaaatgtataattaatttcaccaatttttattttttaacatgactactggaaaattttaaatcatatttgtggtttacatgttatatatatgttgcacagccctgctctagaaaagggtcaacaaactatggcctgcagccaaatccagcctgcctgtttttgtaaacaagtgttaccagagcaagatcatgcctatccatttatgttattttctgtatctgctgttgctgctacaatagcagcagagttgagtagtccatagagattgtatggcctacaaagcctagaatatataccttctgatctttaacagaaaaagtgtgctgaccccctgctgtagaacaatgcctggtttggtagatatttttaagccttttaattgtagattcacatcctattattcacacttactgtgtgacagccatagttcaaagcactttatcaagactttcatttaattctcattaatcctaggatgttggatttctcccattttgtagatgaggaaattgaggcacagaatggtcaagaaacttatccaacttgctcagcacccctcacttctgggaactggacctgcttgaccttccttatgcaaatgttttgacccctcaaacccacttcattagcccacagtgggcaccatggtttttttgtttgtttgtttgtttgttttgttttttttaacaagatttatttgaactagaatttttgaatgatttttttgaactagaatcgagatgggcttggtctcctacgaaagaagccaaggggcactgggcttaggtgcaatgagtacaagcaagctggtgtgtagtgaaaagaaatgaagctcccaa

SEQ ID NO: 136187 - DNA, 1151 bp, Homo sapiens
ttttagtatccagaagctgcgactagcaacggcaaacttaagaaaactgaaacctcttttttctttgcagctgtaaagatgtctgacaagaaccagatagctgccagagcttctcttattgagcaactgatgtccaaaaggaattttgaggatcttggcaaccaccttactgagctagaaacaatttatgtgactaaggagcatctccaggagacagatgtggtcagagctgtgtacagagtcctcaaaaactgcccctctgtggctttgaaaaagaaagccaagtgtttgctatcaaagtggaaagctgtttataagcagactcactccaaagcgaggaacagccctaaattatttcctgtgaggggtaataaagaagaaaattcaggaccttctcatgacccaagtcagaatgagacactgggcatctgcagctcgaattctctgtcttcccaagacgttgcaaaactcagtgaaatgattgtgcctgaaaatagagccattcaattgaaacctaaggaagagcattttggggatggtgaccctgaatccactggcaagagatcgagtgagttgctggatcccacaacacccatgagaactaaatgcatagagcttctttacgcagctttaactagttcttccacagatcaacccaaagctgatttgtggcaaaactttgcaagagaaattgaagagcatgtttttaccctttattcaaagaacatcaaaaaatataaaacttgcatcagaagcaaagttgccaatttgaagaaccccagaaattctcatttacaacaaaacttgctctctgggaccacgtctccacgagaatttgctgaaatgactgtcatggagatggcaaataaggaactgaagcagttgagagcctcctacacggaatcttgtatccaggaacattaccttccccaagtaattgatggcacacagacaaataaaataaaatgcagacgctgtgagaaatacaattgcaaagtcactgtaattgacagaggaacacttttccttcccagctgggtgcggaattcaaacccagatgaacaaatgatgacttacgtaatttgtaacgaatgtggggagcagtggtaccatagcaagtgggtgtgctggtaactgtaaatcagtgttct

SEQ ID NO: 136188 - DNA, 1068 bp, Homo sapiens
acttttaagaagccagcctttagtttttcctttagaagattatgaagttatcatgattgcttctctagaactttagtagttatttggattcctaaatctaagacaatgctgtggcagtctggtgcttttagtatttttgtgtctgctgtggtaaattcctcgtttatactacaaagtttctcttctggagacttttgggatctgggcatattttttcgtttattatttggaatgttagagtagataggcaaacactaagtagaacatcattggctttgactccaagccgggttttagagataagggaaataataccttagtgctatcacttcttttccaacctctctcatctctttttgtttctatctcaaccatttcttctgtctggactacagtactctggaggcctaaagagaagatccttgagttctcgaaattatttttttttagcctcccctcatttctgaccatttattgagcactcactctgcggcgaatattccgtacgtgtaaatcctgtacgtacatcattttatttaatttccatagcatttcttcagtaagagctccatgttacagttgaggaatttgggggggcataggaaggttcagtctgttttccaagatgacccaggttgtgatggggtggagcggggattcaaagcaggtctgggtaattttagagtagtagttttcaactggaagagaggacaattttgtcctcgtaggagacatttggcaatgcctggaggcatctttggttcacacctgggggcaagggaggtgctgctgacatctagtgggtagaggccagggatgctgctaaacattcttttttatttttatttttgttatttaatttttaaattttgctgctaaacattctataacctacaggacagccccccacaacagagttgtctagcccaaaatgtcactagtgccacggttgagaaaccctccttttcagcagtccaagtaaccccagagcttacatttcaactgcttttgtagtttttcaaatgcaatgtcgttttcctatttgggatacctcatcattttaacagt

SEQ ID NO: 136189 - DNA, 1459 bp, Homo sapiens
ttctgcccaggcaatgtgttaagcagcaggaggaggaagtaagccaaatggaagtgtgtgtgtgtttgggcaacgcatctaacttgaaaggtgtatagataatagactcttcagtcagaaccaagcataagagaataggatttgtgactaagtaggccatcaacagagaacatttattaaggacttttttgtagaggagtgagggtgaactcaaaaaatgtttcagggagtttggtggaaagctatgatgcaattggaaggcgaggatgcctgagggaggagacgtggagccacctaggtgtgtaggcagaggggagggaggtcggaggcggtcccaggccgtgttgccagagagcccaggggtgccagggctagttagataacttggaggagaaatctctgtttctcaccatgactcttggtactgtgcatgttgtgaagctgtgtgctctgggtatttccacattctggatttttcaaatccttttgttaatttttgaccatggtgagttcaggcgttgttattatgttgcttattatgaatacagtgaggatgactaggtgtaaatgaatgtaaggtaacagctagatctgcctgaggtggagagagactgggtgtgtattttggaaaaaaaatggagaagtgaaacaggctgttcaggcttcacattctggctgcatggaagccagctcattgcattctccaggagttctctgggagtctgtggacacagactccacttttgtcttaggcctgactcgtacaaacatattctgttgtttgacaggggatggagaaacactatagaacaactggacacattcatttcattgccacattctttattcaagtgtgacagagagcaaaacagtataaaggagttgaactgactactgtattttaatttcaagttcctgtgaattggattagatttttgggtacagaagctaaggtaatttccaaaaggttagtgcccataagactgtctatgttctcagagttagaaaaacctgggaaaaaaaaaagccttacagacctctgtttctacaacttgctgtgcagaactctaacagataggagtgtttatgcagctaggtgactgctctggtctgtgcagtttcacacctgtgtatttgatcagatgtatatacctggaaatacatacataatgtggttggaagtcagattagaactgcctgaggactacccattggtgaatgcagaacattctttggaatgagtgctagtattcttaaataacatttaaaaatagttgtttgggagcaaacagttgccaccctcataatccactttaatttgtgcccagtacttgatttttatcacagcagtcctggaaaacctagcttcatgaagatatgatgtcatcgaaaggaatgcagtgcaatctaattaactcccctccagtggggtgccctacaaatgtcaagtatctatgtt

SEQ ID NO: 136190 - DNA, 1051 bp, Homo sapiens
actgcagttcaggtttcctgtgcaaatcgtccctccagctccactttcctttgtgctttctctccattttctgctgggtgcaattccttaggaagtgggtctgctagggtagcacagggatgtgggtcatggaatctacagcctttcagggacccctcgagcctccggacccggcctgtctggagaagtctcgagaagtgcccgtgtgctgttcagttcttttccagttctctggtgggaatcagctttctcattgttggctgctgctttccgcattaggtttcattgtctcttcactctgtcactcccggaccatttgctttccactttctaaattttgttgctgtcttgcatctacagttgttctttcttggtgtcctttttggatttgtaccttacgtagaccttttctgtcactgggtgggagtgaagataacacatacttgacctgccctatttagttagacctggggaagtttgtggacttctgtttattgatctataaaacatggatgatagtgtccaacttgcaggtaattttaaggtgctatatgccaggtacctagtagatattcagttaatagtggctgctaatataattacagccatagcatttattatttgagcaagcaaggcaatagcaataggtagtgcgaaaagtggacatatttcatgtgtggctgaatgaagtgcgtaagagaaaagaaagagattttcgaaatggagaaaataattagctcagttttagatatgttgaatttgaactaccatcagggtaccagatgaacatactatacaaggggttgcaaattcttgtctggctcagacatgcggatgtagactttaggaatcactggtttttatagcccagggagataccatctggaaacaggtaagggtttcagtctcgtgaaatagcttcatgaagagcttgtcaggaaagggagctgtctatgttgaagaaagctaaggggccaaggaggagagaaagcagaacctattatcagagtggttttatggacaattaggaaacattttcaagaggattact

SEQ ID NO: 136191 - DNA, 1011 bp, Homo sapiens
tatagttccccaacccctagctttgtctgctgtaaattaaagacatttggtttcttatcgaactggaagggaggcctcagaaccaatgtttctttaggtgatagcagaacgttgcagatcatttttgatttgtgttttgctgctttaatatatttttctgacatatatgttcaaattcattcctttcataatttgtttttcttcctgaaatatctacctttaattccccatgttctcatcttgtgacttttatctatgtctttgcattttaattctgtcttccaaagtgcactctattgtcaaaaagtattgtaagtaccttttacaggtaagtgtcatcgcaggtagatttatgcttggttcttaaaacttaagcaaaacaaaaaaaaattattctcacttctcaggactagcagtttcccatgagtaaggctgttcactgaactatcacagtttatggtcaaagtgtgatattcataaaagtctcatgggtgagggagaaaaagaggaaattctgctaaagacagaaactcttgaagggtgttatgagctacagaaatggatcacacataacatacaaatgatgcaggcatgtagcaatcagttcttggtgtccaaactccttaagatctgatgaaacattttttgttctttccagaaaaaaagcgcaagcacacaagcttccaccaatgctctcatccttatttcacatgtgattctagggagtgtattttctccctgaagctcatttcatggactcccaattaaccacactctaggcctgcactgtccaacacagttcccactagcctcatgtagcaatttaaactagttaaaattaaatgaaaaattcagttcttcagttagaccagctactttccagtgctcagtagccacatgtgattagtggctaccatattggacagtgcagattatagaacattgtcgtcattgcagaagggtctgttggattttgctgcactatatagtttcatgatggtttaagattta

SEQ ID NO: 136192 - DNA, 1101 bp, Homo sapiens
ctaaatttaaaccaggagtgataaattcattttaagtttttggaggggttacagagtatgtgttttaaaatctcaagttttgagaaggcagtttacaaatgatgcctgctctccctttggcagcttattaaggaatgtagtcgtttttcagcatttgccagctccctgtcgcagtcagtcaatagtacttattttaaagtgggattctcattgggattgcaagtaagaatcaatgtttttgttcctacccacacattttaatagacctcaaaaatagaatgcggggagaactgatagagaaacaaagaattttaggtacagaaagcacaaatagaataataatagaataacaagaataaaagaggaagtaatatactcttcgttctcaatgtagcatttatttgcacctcaccaaatgtagagcattgtacgagaagtggcagaacaaaaaagggacaagtgaatggatgcaattaggtgttgtgtgtccctcccagggagttgacattgtaattaggaaacagacacatacacaactgaaggtgattagagcataagtaaatgagagctgtaaagaggtggaaatgatgagagcaaagaaaagagaaagattaggttgctggggcggtcctggcttcctacatgaggtaatctggactaggcttctgatgactaagattgtcatagctgtcgaagtagggaggggcctcccaggccaaagtaacagcccgagcaaagatatggacagaaaatgccagtgataggtgcggggatggtgagtagtagggatataattgggacaggcttgtaactgacattgaatagctctttgaatgccatgctcaaaatcctgtataataaaaataataaataaatgaatttagttatctgtcagaatggagacaattagatccaggaccaataaaaaaagtctaacttcagtcacatacacagtcatattagagatttatattctttttttttggagacagagtctcactctgtcacccaggctggagtgcaatggcacaatctcggctcactgcaacctctgcctctccaacaatcctcctgcctcagcctcccaagtagctggaacta

SEQ ID NO: 136193 - DNA, 1062 bp, Homo sapiens
ttaaatgatataatctgattcgaaataactggggagaagggagagttggaggggttatggaggaaacaagatttgccataagttgataattgtgaagctgggtttagagttcatgggagctcattgtattgtactcattatatagaaattttgtacatgttttacatttttcacaataaaaatgtaagcagaaggattaaccaggaactgtgctcccaccagcacctagaagtagctgtctgtcaacgggcatctgaaatctcaccccccacaggctggctcttgtagtgtagtaaagtttttaatcctgccacaggacttctaaagaacacatatagtaccacattttcatttaaggtttatttcattctacctgaaaacacacaagtagcagcagtctcatgttccttaagtgtttgaactgcccaagtgaatcttgtggatagaatgtgctagattatattaaaaattccattgctgctgacattaatttgaacaaattcaaaataatgttcttaatgaagagaataaagtccatttactcagtggttggttcatactttatttcacagccaggtaagtcagtttctgtctctggctttcctggttaacagcacctgtgtctgaagagaggtggagggagtagtagagaaagtccctggtaggagagaggccttaagtgaacaccatcactgtgcactgaagggctgtttgaagttgttaagagaaacatgtgggctgggcatggtgtctcacgcctgtagtcccagcactttgggaggccaagacaggtggattgcttgggcccaggagtttgaagccagcctgggcaacgtggttgagaccctgtctctacaaaaaaatagaaaaattagcaaggcatggtggtgtgcacctgtgatttcagctacttgggaggctgaggtgggaggattgcttgagcctgggagttcaaggctgcagtaagccaagatggtcccatgcactccaacctgggtgacagcgagatcctgtctcaaaaaaaaaaacaaaaccaaaacaacaacaacaacaacatgcgaa

SEQ ID NO: 136194 - DNA, 1058 bp, Homo sapiens
aagagcctgagagctttccttttgtgattctgggtaacaagattgacataagcgaacggcaggtgtctacagaagaagcccaagcttggtgcagggacaacggcgactatccttattttgaaacaagtgcaaaagatgccacaaatgtggcagcagcctttgaggaagcggttcgaagagttcttgctaccgaggataggtcagatcatttgattcagacagacacagtcaatcttcaccgaaagcccaagcctagctcatcttgctgttgattgttagattgttgatgcattctaaccaactcacacatatacacaaaatcaacatggggatggagaagagaattagcgtttgcagcagtgtatcatctactaataaaattaaactaatgttgctgcttcattagttggtgggagaagggacacatccactcttggaggaatatatttactcaataatggcaccttacatttataaattgtaacagttgtctaataacgtttctttaatttaaatatgtaagttgcagagctaataaatgaaatgaccaagactttaattataataaaaataagaaacttgactattctagaagttatacttggattttttcctgggaaaatggagaactactttttatatgtgtatgtttttatgcaattagcattgtattcttggttcagggaaatactttcctaaagcaataatgttagatattaaagattaaaatctaatgtatttgcaatgcattgttaatttacttcttcattctcttcaaaatgatttaaccattcctgttttcattctacatactagaattactctcactagtaattactcatcatttgtgtgccattcatgcacccccacccccataaatcatgttccacagtctcaggcggagggtgggcccccagtggtacaagagttgcttcatacagtctgtaatacatccagctaaattcaagttgtctatgaatggaaagcctttccatagatagagttcagttttaagaaaaaggctaactactgaacttggagaacagacaaatgtgcat

SEQ ID NO: 136195 - DNA, 1061 bp, Homo sapiens
ttggacagaatttcttgcatatcagcacagtaatacaatttaacagtattcctagtcagaggtagtaagtaatatttagccctcttataaagatgaacaatgtcaagtgattaaggtataaaaatcagcaatgcctttcctcattagtgattccatttaatgattttctgtcatgcgttatgatacactaatttgagaagctgatcatttagcagtcttgtgttaaaggagagtattaaaaacctgattgttaaaagattaccacacaagaatagctttttctgaactctgagcacatggcagatttttttgttttatgtagccaaagggccatagagattaatccatttatttataatgaatatgagtatttcacacacacggtaaattctgaaagttaactgacacaggcaacatttatcatactgccattagttttgccacagatacttctcaaaaccaaaacaccaaaataaaaatttccttaagaggatgttattaacaatgcagcattttcaataaaacttaaaaatgtggtctttagactttggaatgtctttggtttttaatttaaaactttaaaatgatttcctttcagaaacttaagatttgtcagcttttttgcttcactaatactttcttctttcctagttttcaatgaatccattttatgaacccaattctcctattcgatcaagtgcatttgacagaaaagttcagtttcttgggaagaaacaccttttaagctgaatgcagaaaattccaaaataaatgatgtcaccacaatggtgtatactcaggaatgtgtacattgtaagttacttgattaaatagcctggaaaacttttgtgtattctcagcttatctaaacctaatgaaattccttttatatttaaaaatagtacattctgtctcatgtcacgtatcaatagatcaattggtatttccttgtgaacagtgttatttataaagagttcattatcaataatcatgttttttttttttttttttttctgatacagagtctcactctgttgccaggctggagtgcagtggcgcaa

SEQ ID NO: 136196 - DNA, 1147 bp, Homo sapiens
tatctgtccagatcttccagttctaaaatcatattataccatatcattacaatagcataaaaattcttacgtactttggattctgccttcccagctggcaaaaactccatttcaaaaactggattatcatggtggccaacaattacaaagtagaagctcccagacatggtcttcaatatatggctcctaattaagtgaaaaatagtacatatttttagtagtcaatcttcaaattaaaaaatgactaatgggaagtgtagaattcttttttaaatttaaacctgacattgtagaggaagatgctactaagcttggcagtttccagtatactagcgaagatacgtagcttctggaataaacaaattatgtatctatgatatgaatctgtgaatctaatgtattttcttaagtaaactggaagacctctaacatgaaatcacaaagacaacattctcatgatctgaaaatatggctcattcagctcaaggggccctaagtgtctggtagagtaagctgggcttcatttggactggaccagttagtagcagcacggacacctagaaggattaacagaaggtggtggtaagtcaaggacaatacagagtagtgggaagaccaaggaagtaattaccttgccttagaaatttccaggaggcatccgtcgggggaagctaaaaccaactctacctcatgtcacttacctagaaaggacagacactgtatcactgattcgcagactgcgtgtgctgtatttgtcttctttctacttgaagtatgtgtgctataaatgtaagtctttgcaaatctaagagcctatgatatgcctctttatataccaatttataagaaaggaagagttttgtattctagaaaagatggaagaaataatccataaaggaagacattctgaggcactgaaagatcttggaactaagtttaacatgttgggcccggtgcagtggctcacgcctgtaatcccagcactttggagggctgagatgggcagattgcttcagcccaggacttcgagaccagcctgggcaacatggtgaaactccatctctacatgaaatacaaaaagtagccaggcatggtggtatgtgcctgtagtcccagctactcaggaggctgacgcaggaggatcacc

SEQ ID NO: 136197 - DNA, 1029 bp, Homo sapiens
ctccctgtccttcccttcactttggagaattattgccagttcttctagttttgcatagcttttttatcattccagctcgtctttgttatccactttttctgtttggacctttttcttatctttcccctaaaacaggggcaaacattttctttaaagggccagatagtaaatattgttggctttgtgggacagctggtctgtgtcacaggtgcttaactctgccattgaagcgtgagagcagccttagatggtcgcaaaatgatgggcaaggctagatttggcctgcagtctatagtcccccacccctccacccctgccccaaatagcattttaaatcttacgtcatcatgccaggagttctgatctgccttttcttccatagtcatggccttccaattctagagttaaaagtgccagctgtgccttgatttcctttataaaatgtgtcattcattagcaagtacatatcagatttcttctgatttcattgtgtgttctgtgtgaatcagcagaaggcccaatgaggcttgctaagtcttggcttctaacacacctcagatgtatgttctaggagactgactgtaactcccggtttacttgatttccactccgtgttgagaagttactagtcaccacatcccagtgtgcatacggtctcccatgttattccactaacattaattgagcatgtactgtgggtcagacactgtactgggtactttacatgcattagattgtgtgatcctcataagtgcaccataaggtgctacagtgttagcactatttaacagatgagaaaacggacattaggaagttaaggactgcctgtggtcacactgccagtaagtagcagagctagacctgaacctaactttgactccaaagtccttgtgttaaaaatacacaccgtggggttaccttggggtaaatccatccatgcccccacccatccatcattcatctagatttcaattatctgtgctaaaagccatggaatcacttatatttttccccccagtttctcgtagt

SEQ ID NO: 136198 - DNA, 1014 bp, Homo sapiens
gagtcgtgcctgggtcctcgcccttgcctcagaaccgcgaagaaaggaagctcgcgtgtttgctagaaaacctagttgggagtgcgaggcagagaacgttcagcacctttgttcctcccgaaccctcgggacagaggcagggttctgagggcagggattccccctcgtcttggccccaccgcccgggctgggcactaaactcgggccgcggcggggcgagcgaggcgggctccggagggagctgacgcctgatgatggcgcaggtagacacacctgccccttctcgggcggaaataaagtcttgttttgtgttcgttaaactttcgccgctaggcctcttatggcttccccggaggccactggtctgttttcagacgttcacgttccctctgccccgcaggtaacctataaccattttgtcttttagtccaacatgtttaccgtggctgatgtgttgagtcaagatgaactgcgcaaaaagctataccagacgtttaaggatcggggtatactggatacactcaaggtatcggatttaggcgtatctgtgtcagcttttacaagtgtaacctgtaacaggtagttcaaattcaatcaaggtttaggttttaataatcgtatgatacatagattgtattggtgaattacatttttatattcccgaataactctgtatcctgaaacattacagtctcttgaaaatgtttgagaaaatgttgagtttgagtcgtcttaaaggagcatattcaaataattaattgaactgacaataagataggagaaggaaatatttgtataatgaacacagtaagattaggcttgttttataaatatggcttataggttcctaaattaataagtgggtttgtaatacatttggatgaaggacattgacaccatatagaaaatactagtgtactgcttaataatagtttgggaaatgaaaaattttatctttaaactatattgaaatgtatgaatgtttagtttgggcagaaaatacctattagtatg

SEQ ID NO: 136199 - DNA, 1309 bp, Homo sapiens
tcgaaaccagctaattcatgagttgatgcaccctgtattgagtggagaactgcagcctcggtccatttcagtagaagggagctccctcttaataggcgcctctaactctttagtggcagatcacttacaaagatgtggctatgaatattcactttctgttttctttccagaaagtggtttggcaaaagaaaaggtaaagtctttccttttctgtttctgaagtttttattaacaggttcttcctctgctgacagtaaagtgctgtatgatagctaagtgctcctcgactaggtccatttctgtttcctctttgaattcacattgtacctgcacataatatatttgttatataacaagtgggtactaaatttgaaattaatttcttggcgtctcatttagtctcacataaaacagtgatgtatagaatctctaaatgtttcagacctataattgatctatctatcctctatcttgtctaataagactctgccaatctgctgaatgtctgctgtaagcttggcactgtgataggcacactgcagatgttttgtgtgttacggatgaggaaccagactctggagaggtgaatcaatttgcccaacatcaagtaacttttaagtgacaatgcagggtggtaaatctagatctctaacatgagctctttttttcctgcactagtttcttcagatgtttctctttgtaattagataagtgagaaatacgtaatttaaaaaatctgtaaagttctcaaatattaaaaacacttgttttttttttttactacttttctaattattttaactatatttcttcaccattactgttgaacattagtactactttattattttaaaggcagatacagcagactttccctgtggatatgtgcgtgtttttttttttttaatagactttattttttcagagcagttttgggttcacagcaaagttaagtgggaagtacagagaattcccatatacctgctgcccctacacactcatagcctcccccactgtcaacatcttgcatcaaggtggtacatttgctacaatctataagcctaccctgacatgtcattatcacccagaggccatagtttacagtgaaggttgcagtgagccgagatcatgccactgcactccagcctgggtgacagagcgagactgtctcaaaaataaaataaatttcactcttggtggtgttcatatgtttttactttctttgtgttttctgtaattatccaaaagtttcatattccaaagttttagtgacacaagcttagtacagtatttgaatgaaaacttaaat

SEQ ID NO: 136200 - DNA, 1872 bp, Homo sapiens
tcatcagatatttcagtgtcatctgtaaggcattaaacatttaggcatatcatctttgatgtgaagtacttagaagttaattagatgataaagatattttatccttttgaccttgatatgtttatagtaatttatttaacagtgtaagaaagagcttgaaatttgctttattagcatagttataatcttatttaatctgaaggatgtttcttaatttcatattcagaaacatatcctaatttatcatttaaacactgatataaaaatatgtctacttagtaacctattttttcttaaggtatttactatgcaggatctattacaactcattaaaatcaaccctacttccagtctctacaaatcactggtaagatggcttagtttctgtaatctactttggtttgttaattataactgaatagctgaataaaagtgaaatattttcttttaacaggtttcaggatctgataaagaaaatcaaaaaggtaggagccgtcatctttgtagagaacagcaacagttttctatgtactttttcctctaaaagaatgaagcaaatttttagggagaagagtaaaatttaatttgatttaaattatttgatttctgcaggtcatttcccctatatttccatttttgtaataacttttagatattcaattaaaaaaactgtagacagtatcaaaggccctacagacaggctgaaagatactgtttgtaaaaatacccactgttgggaatatttctgcaaaaaaaaaaaaaaaaaactaataacttttaggccaagtgtctttgtatactaggtatccctctcaagtataattggtagggtattagatgtattaatatttccttaaagaatgagagttgtgttcagtaatgtgttatatatcttttgttcttaaatgtttatacaggccgggcgtggtggctcatgcctgtaatcccagcactttgggaggctgaggcgggtggatcacctgaggtcgggagttcgagatcagcctgaccaacctggagaaaccccgtttctactaaaaatacaaaaaaattagctaggcgtagtggcgcatgcttgtaatcacagctactcaggaggctgaggcaggagaatcgcttgaacccggaaggcagaggttgcggtgagctgagatcacgccattgcactcctgcctgggcaacaagagcaaaactccgtctcaaaaaaaaaaaaaatgtttatatagacctaataaattgccttaattttggccttgataatagccattcatagagtccataactactgtgggtttcaggccattggttagacttgatgatgggctttgtagcatgaacataagctggcaacttggctttgatgcatagttattctttaggtcttttaaaataatctgttagtaatagtccttttgtgttggtacacccttggattttgtctgttgcctgcactatcatccccacaaggacattcatttattcatccattcattcgccaattcatttagaacttaatcatttgaatacttattttctgccagccattaagtctgtgacttaatcgccaagtctcttggtagtaatgttagcagaatataaataaattggagcacaagatattctggactgcccgcaaactagaccatctctactgaagttcagtatggtaaatgatcctatattctgtactctaagtgtcgtccagtgtgactctctgtgattatggaaatgtctgtgtctatgctgtttaatgtggtagctgctatcctcatgtggcttttgagccttgaaatgtggctagtgtgactggataactgaatttttaatttacatttaattagctacacttgcatagtgactaccatattagca

SEQ ID NO: 136201 - DNA, 1074 bp, Homo sapiens
tacttgggaggctgaggcaggagaatcgcttgaaccagagaggcgaaggttgcggtgagccaagatagcgccactgcactccagcctgggtgacagagctggactccatctcaaaaaaaaaaaaaaaatctatgtagttactatagatacattatccttaaaagtagtttttccatggccgggcgcagtggctcacgcctgtaatcccagcactttgggaggctgaggcgggcggatcacgaggtcgggagagcaagaccatcctggccaacatggtgaaaccccgtctctactaaaatacaaaaaaaagttagccaggcctggtggcgtgcacctgtagtcccagctatttgggaggctgaggcaggggaatcgcttgaacccaggaggcagaggttacagtgagccaagatcacgccactgcgctccagcctagcgacagagcaagactccgtctcaaaaaaaaaaaaatagtttttacacagtctctttaaatgcatctggttcagaaagacatctggccgacagcccttaccagcttcacctagcatcccagtaaaatttctggaagccagaaaaactatgagtagcagataggtcaggcatcctagtgccaaaatttggatagaactcttagctaacaaaatagctcctggtaagataaaatttttttaaaaattggtgtcttctaattaagtaacagaaaacatgtaggaagatattgtgtacttaaccgttgtctgtcccctgactcagacctatggtcttatcctaccatatctatgctcagggggtgctaagctgttgaatggccttggtacttttcctcctagattctagtcacccattcttcccactgctaattttcctttcagagataatgatatctgttatgcgtgtctgtgtgaagagaccaccaaacaggctttgtgtgaggaacaaggctgtttattcacttgggtgcaagtgggttgagtccgaaaagagagtcagtgaagggagataggagaggggcagctttatagggcttgagtaggcagtggaaagttacagttaaaggtggttatttattgt

SEQ ID NO: 136202 - DNA, 1048 bp, Homo sapiens
atgatcagtttgcagatgcttaccctcagcgtatcaagttcgaatctttagaaataaagctaaatgagtataagagagaaatagaagagcaacttcgggcagaaatgtgtcaaaaggtaagctttatcttgttactgtaaacaagagtgatgtttttgtttgtcttctaaagtcttaaccataggtatatgggaaaatatctagaacttttaataacgaatgggatactgtactgttgtgcaaatttttttttatttctggtgacatttgtttatgccttttgagtgaatcctacaaatagagtgaatgagataaaactaacatgaaataaatatatttggacagagcattaatgttaaacctagatgtagagagagaacttgttcctgtttttatagtataatagttggtatttttaattttttgtgatcaatttgcagttgaagttttttaaagataccgagatagcaaaaattaaaatggaagcaaaaaaaaagtatgaaaaggagttaaccatgttccagaatgattttgaaaaagcttgtcaagcaaaatctgaagctctcgttcttcgggaaaagagtacccttgaaagaattcacaagcaccaagaggtggtatttacaaatattttatgggtggctatttcctgcagctattagtaggttggctcgagatccagcaacaggatggtacagttgatggaacaaggccccagaagagcaatagggactggggccaagagtgcaaatagaaggatggtccttgaaaaggatacacaaatttgcttcctctgagactgatggaaaggcgagaactgtggaggtgaacaatcaagttgggattatgagaaacacaccctaaataagctccatctcctcaggcagattagagggttagatcttgggttttaggagcagattggaggtgcagagtagttcctgtgggtaagggaagaacagccctttaaagcagagaggactgatcacctgtattgagggctcagctgtggttgggggagcctggaattgagagaggtcaaaccagg

SEQ ID NO: 136203 - DNA, 1159 bp, Homo sapiens
tgagagggagtccatgttggcaagcaggattggatctactcctttaaatcatattcctttcccaagggcgtgtcttagaccaaactagatttacagcactatttccaacatacatccagaactactgctgtcagatgttgaaagtaggaatgcttccccctagtgtccactctcgcctggggcttctcaataagacctagttgtttaatgctaagggcaccccctctaaaattttgtatagcatttctgggaattgggtttgcttcagctataaaaatgaatgtcagaagcacatatctttgagatgattggattgtgtttagactaataacttcaaccttcaagataggtgactgactagatccctgtttatttatctgatcatctgaaggctttgaagaagattgtcatcctcataagaagcaccatgtctttattccctcacctggactgtccatccccttctctccctgataaaaaccatagtgtctttcaagacccagcttggatgtcacctgggtgatgccgtccctgactcccactgagcgacccatttaggcctcattcctgcatcagtctttatgtacttcagttacaaaatcatcacatcttagtgtgattgtttctcactccctgactaaattgtgaggtctttagagatgaggactatatctgtctacctttttatatccagttcccagtatgctgcttgacatgtcataggtagttagtaaattctttctctgtgaacacacaaatggaaggatggcccattcttttaggagttcatatgagcttgctaactctgagtcagaatgacccgtgaactgaaacattcagacgacaccaccactaaaaaccatggggattcaattcttttggagttttactgctgaatgtacattttgcttaatttttctttctggggaacttgccaaaatttaggtaagggcgccaggtgtggtggctcatgcttgtagtcccagcaccttgggaagccaaggcaggcatatcgcttgagtccagaagttcgacaccagcctgggcagcatggcaaaaccccatctctacaaaaatacaaaaaatcagccggacttggtggcgtgtgcctgtagtgcctgcagctactcggtaggctggggtgggaggaccccttgag

SEQ ID NO: 136204 - DNA, 3174 bp, Homo sapiens
tactttgctttttggaatgtaggaagcagtatattcattcaaatctgttttgctttcattagcttgcttgctaaaaattaatgcttttctatacagattgaaacaaaagaaatttatgctcaaaggcaacttttactaaaagatatggatttgctaagaggaagagaagcagagctgaagcaaagagttgaagcttttgaattgtaagtaatgcatgttcattttggatattcagaatgatgagattaaaaagaattactaaatatatatctaaatattctaatgttcattgccaagtagagttcttatttgtaaaggggatatcacctagaaggtacaaattaagaggaacaaacactagggttttgtttttgaaatattaaacattaagatgaaaagacgaatgagatgctatcatcaggctacagtaagaccagacagattatttggagaagctgttaatactggaacagatcgtatgttttgcagttacattcagtccctcagatctgatagttccgtgtgtgtatgtatagtaactgaattccatatatccaggcctgcagcttttaccagctgtgtgctcagaaaaggaagtatggtggtccaacttgacttgtacttggtgaaaccatttctttgttactcactgtttctaagtgctcacaaatgtttcatccttgagatcttacctgggattgatggcaagttcacctgtctatagtttgtgcaataagccttctcttcctttgggaatctgctattgacacccatagatactccaggaatcttagttcattaaagaatttggctccattaatgtttttttctcacttctataggcttgatttgtttgatttcaactctctgtctaccttactctctttttggcaataatgaaaaggtaaattgatcaagagagaggaaataggcacaaaattggggcagagagagttcatcattcctttacctccattttctctactcttgttccctccttctcagcatataaactaaataaatgtagtttacctctccatggctttccagattaccagcagagggagctaatacctagagcctttacctgttcttagactagtcagcattttgtagcacttctcaggatggctggatctcaccacccatgaacctacctccctggctaaggagttggtgctatggttgatttaaagtctcactatgaagaccattctattcttcagtatttggaagccctgattgatccatctatcttttgccctctcttttggtacttttttcaatattcaatcaatagggttttttgtttgttttgttttgtttttaagacacagtgtctctctgtattgcccaggctggtctcaaacacttgggctcaagcaatcctcctgcctcagccttctgaaaagctgggattataggtgcgggccaccacacttggctaaagctgattggttattaaatgacaaaaacacatattgtaccttgaatatgtatggactaattaattaaatcccacagttagaaacagcattatagaagatttaagcacataagtacacttatttgttactttgtaactaataatatcattatttcatcccaggattgattttggctatttatcacctataaccattgtttgagtgtttattttcagtgagaaaccacttccctcttgagactctcccactcccctcagcccaaagcacagtcaattctgctagtttcaatatgctgtaactaggtcagttcataaaatacactgaggacttctggctctttccttctacttcccagtagtgatatcatgtagcagttttagtctgtggaactagacacatgtgattttttcctaaatttgttagctcagctatggtagtttatttactttttatatttttgttaatttcaggaaccagaagctccaggaagaaaaacataaaagcataactgaggcacttaggagacaggagcagaatataaagagttttgaggagacctatgaccgaaagctcaagaatgaacttctaaagtaattgtttagcatttttaaataactaatatgtttaaattaaattggtagaaacataacaaaaactgacaaagtagtctgtaacttaggcaaactttagtgtttgaaaaaaaaaaaacatagttttatcgatacagtcaatcctttcctgcatttgagttaggatagtttttaaaagataagggccgggtgtggtggctcatgcctataatcccagcactctgggaggctgaggtgggcggatcacctgaggtcaggagtgcaagaccagcctagccaacatggtgaaaccccatctctactaaaaatacaaaaattagctgggtgtggtggtgggcacttgtaatcccagctactggggaggctgaggcaggagaatcacttgaacccgggaggcagacgttgcagtgaactgaagttgtgctactgcactctactagcctgcgtgacagtgacaatccatctcaaaaattaacaacaataaaaaaatacagagaagcacatcctctgcgcttcttatggcttctctaacgtttattgtgggctgtgatttgctttaattttcaggacaccttgtgacttgcttagcttgcatagttgataagctgtaaaattggaattataaccacttttagttatcttttcctctacctcactcatacagtcagaaggatggggttatctgacaatatataaattatactagtggtcatagtatttgtcagtgaacatgtgccttgtattccttcaagattcagcaaagccagaatcaaaagagctaaaattaactatgtgaggcaaaaagtgatatagggaaaggaaaatatggacaactatggtaactttggcttttctgtagtctgagttttgtgtatcagtgaataatatctcagtgctacgacattatgcccatgtggtaacatttctcttcagtgtgtgggaaagcatctggcacataaaaagtgctcagttaatatttgttgtaaatgtgtcacgaggaaatgattcaactcaggtgctctgggcatttcttatttggcctcttttattgcctttctcataatttgtcatcgatattccattacataatattgcaaaggtttcttgaggtaatcctttaaacaaatcctattttt

SEQ ID NO: 136205 - DNA, 1059 bp, Homo sapiens
agttggctctcaggactgtgcttagtccctgagcacaaaagttcttaccttggttgggggtgggcagatggtacaggtggattggaagtgaccgtctgattatcatttgggattgagtctgttgtgtgctgtgtaaatttaatttacccctttgctctttgtgtcagttgagaccaactgaaaagtgattgctttcagtaagtaaccttatgataacacgacgcttcattttgtgtgattgagttttgggacccagtttataggatcaaggaagggttttactgggcattttatgttcaggggttatatccctggctttagtattgaggactttgaagtttacaagttgtcatgtttagcaccctcaggtgctcctgtgccatagataagctcctgcactgataacagtctttccagaaaaatgcctgaggagctcatatttagtcattctgattctcaggtatcaacttgaactgaaggatgactacatcattagaactaatcgactgattgaagatgaaaggaagaataaaggtgatgtttggggggaaaataagctgtatttttcagttctgctgtaggttattagcttcccaagttgggtcttttctatattctaaaaaatacagcttacacttcattgttcatacaaaattacacattttttgtaattttaattttataaattaaaaatcatggtcttcactgccttttgaggaaccttcatgtttaatagtttgtatattcacaaaggccagtgatttatcatggatattttatccaactttatttcatatattttgataaatctgcaattgtcaggaacgtagcagcaacttattgctgtcaagtacgtattactcctaaccatgagagactttatttttcacttacggaaaacttttaacttctctgtcctctgtgacctagtttcttatttcttttgcttctaatatatttttatgctttataatatttttacttgatgtataaccttctgaactcttgtgtacattggcctgagactatggaagttgaataatttttcaatcttcagat

SEQ ID NO: 136206 - DNA, 1006 bp, Homo sapiens
ttaggtctgacatactggccataaatattaaatggcttttgtattcactaggaaaacattatggtgtttaattggtgggctcttttttcagaaaaagctgttcatttgcaagaggagctcatagctattaattcaaaaaaggaggaactcaatcaatctgtaaatcgtgtgaaagaacttgaggtaattgttaagcatgttggtttttgaaatagattttaagcaatatatgaaattttagtcatacataatttatcctaagtcatcctgttgagatgtttggactgccatttatatggctaagaaggtgttagctgaagttaattcaatagttcttaatttcagtcagtgtcacataggaaagtgtagatagagctttgggtcctggagtcctgcccacatcctgtctgtgtctctaactgcttgtgtgtcgctaggtaagttctgtgactgcaggttcctgagctgtaaactaggatgttttccacattatagggttgttgagggaattcagtaagctaacttatgtgcctagttcatagcaggtggccattactattagtttctacatcagcctgttatctccttccatcagcagcaggtaaacaaaattcctgtcattacattgttatcttacagattaaaacaaaatgaggtacatttttcacatatcattgcttctttacttttctgttcattcgtgtgcttgctgtctgaaggatgaagctggaactttaggtacttacaacatattttgtatatgaaatttattttagcaactgtgacttatgtgagaactttgtaggctttttactcaaatatgagatatactaagaaaagggaagcacttcacaacattttacagaatcttttttcctttctttcccttttttttttttttttttttttgagacagagtcttgttctttcgcccaggctggagtgcagtggtgtgatcttggctcactgcaaccaacctccacctcccgggttcaagtgattctca

SEQ ID NO: 136207 - DNA, 2694 bp, Homo sapiens
catgctcagccatttttatcttacctttcatatttaaaaaatatatattgctatgatgtgtgattattgttgggttcttggttgcctctggaaaatgggatgataatcttagaaggacttgcttcatgggatgcggcctataaaagttctgccccaactgtagggcggaagataattttcgttattgtagttagagtcttattgtagagaatcagacttctgtctagtgaccttaattaaattgtgacaccatgcttaaaggagcctgccagcttttacttttgcagtactgtaaagtcattattcaaatgtaaattttcctttttgaattttagcttgaattagagtctgtcaaagcccagtctttggcaataacaaaacaaaaccatatgctgaatgaaaaggttaaagagatgagtgattattcactactaaaagaagagaaactggagcttctggcacaaaataaattacttaaacaacaactggaagagagtagaaatgaaaacctgcgtctcctaaaccgtatgtatttttcttttcttctgacttgcgtgttttagtaattcgcattaggtcagtattataaaactatgctttgtacttgtataaggtagggggcttacattgggaagatttataaaattaagattcttggattaaactctgcaaacctgcctataggtggtatcaaagcttcccttgccctctgactgctgattgggtttggccagtggggacaccagcctctacatacagtggccctaggctggccactgtgcctcatggccaagtgaggccatagtgcctgcgattacctcttccaagtgctctgcaccaccaccctgtctctagtgctgagaatttctccctcctctgattccccaggcccaaggagcgctaacagtatggccctgttactagcccacccagggaactccaccatcctttgtgcataccctgaataagtcaacctttattaaagggttcttagatgaccttgaccgtgagagccatctgccttctgcctggatcccaactgctgctgtcagatgcccagatcatattggatcccagggctgtcatcaacaggtagaccagatagagagctccttctgtgcacagtagaggagagaaacaggctttcaggttaatttgagaatttgaaagagttcttttacttggagtaggactccaagggtaataaagtttgcattaacatgcactaaattcttttgttgtgaaatttgagagtcaggattgctctgagctcatttaatagaattattatcatatttattgagtcagtacaaagcaaagaacactttaaaacccctttaactgtttttgttaagttaaataagaaaacttaaggttggtaatgactaggattttttttttttttttaccttcttaggcctagctcagccggctcctgaacttgcagtctttcagaaagaactacggaaagccgaaaaggctatagtggttgagcatgaggagttcgaaagctgcaggcaagctctgcacaaacaactgcaagacgaagtgagtattgctcttcttcagttctagtgtgataccagtacacttcatagttacgtaaacttggcacaagtcacactagtgtaaatcagatttattttaacatcaaacattactcccccaaatatgctaaaggtatcctttctcatctgagaaaattctgcagtgataacgtgactttatattcgtaatagtaataaaatggagaagaaagcaaactcacctaaacataaaattttctgagtgcctgatggtgcccactgttatctctcgattctcaccctgataagtattacaaacattcactgtcttctgatttctgcctgcatgccctagagttctttgatatgactgaaaaagatggtgaagaacttgtttgtgtgttctgcttgtgtttttttttaatagggaccctgttgtttactgtcataaagcttcttggaattggcagaacaaaaagagtacaaacatgataagagaacttttccttttgaagcaagctgtgatttgttttacattgatttcttttcctattctgaatcttttcagattgagcattctgcacagctgaaggcccagattctaggttacaaagcttctgtaaagagtttaactactcaggttgccgatttaaaattgcaactgaagcaaactcagacaggttagagacgttttaacccataaatatttttgtatgtataaagcttctggtgtctgtgaaaatgtaatgatcataatttattgaatattaattattgttttaggggaaaagccatagaaatatgtgtcatcttagaagtaaaactccctatccattttggtaataccatctggatcatcagcaaaagtattttgcttcataggtgcctcatggcttgggagagtctcatgccccaataggaaaggcgtggtggtaacatagaagtccccatattcattataggatttccttttttatttgttaccccaatgttaacaccaattcagtagttttacggattccttgatagatatataaatatacaggacaagcagggtggtttagcaaaaagaatattgccttcagaatcagaactgttcttcttttggacccgttttgaagttgtttgaccttgggcatgttactttaacttccttgggcctcagtct

SEQ ID NO: 136208 - DNA, 1024 bp, Homo sapiens
tatccaactgcatgggtggagggtagttcccctgattctgaccttgagtttgtagccaatactaaggcaagggtcaaagagcttcagcaagaggccgaacgcttggaaaaggctttcagaagttaccatcggagagtcattaaaaactctgccaaaagcccactagcagcaaagagcccaccatctctgcacttgctggaagccttcaaaaacattacttccagttccccggaaagacatatttttggagaggacagagttgtctctgagcagcctcaagtgggcacacttgaagaaaggaatgacgtcgtggaagcactgacaggcagtgcagcctcgaggctccgcgggggcacttcctccagacgcctctcttccacaccccttccaaaagcaaaaagaagcctcgaaagtgaaatgtatctggaaggtaagccacccgcacaaagggttgcggggtgctctggagttgggtagccaccctgcccacgacacagggttgccgtgagggtcagcgggccagagtggcaaggtctagtgtttggcacacagagctgtttagagagtgatagttgccttgcctttgctgcctgttggtttcctgcattttattattgccactgcaatttaatttaggtgcttgaatcattagttttctggatcttatgcatcataattggctatttgtgaggataacagtttattttcaaactagtagagctctttagaaaccacgttggtatcttctccgtgcaattggtaatattcttgccttggttctttctgcaccttaggtctgggcagatcacacattgcttcccccagtccttgtcctgacagaatgcccctaccatcacccactgagtctaggcacagcctctccatccctcctgtctccagccctccggagcagaaagtggggtaagtataacgttctgattgattagcttcagctgaataatgttacttgctctgtcagccttcacttgttttactgggattttttttttttgagataattatt

SEQ ID NO: 136209 - DNA, 1271 bp, Homo sapiens
tgcctgggacgaagctagtgctgtggggtttccacatgcggatggcaaggaactatcagaaatgtggacgcgaggctagggagagagaccaggagtagaggaaaagatagggaaaggatccatatacaagtgatggctaaaaccccaggaagggctgccgtcagtttggaggaagtggggaatgaacagtgagatggctggaatggcggggggagggcagtggtgtgatttctgttctgttttgttggggtaggacagacttgagcatctttatgggagtaagacttctaaaactactgtgtacagaaatagggattaatggctcagtctgggtcctaaagataggggagggattataatcaaaggcagaggcagaaatgcagggtttgccttggaaaggagggaggagatctgtgaagaggatgagaacatgtgacatggaaggaggacagttggagttggttatggtgagggtgacgtatttgtctcagtcaagtgaagtagggtacagttcaaggagtggggtcgggagcttgaagtcggtgaaaatgaaatagtgacttgaagcaggtcacagagtcaactaaaagccaagcagagtctccgtgggtcttggcaagggctcctgcagactggtcctgcattcatttgaataatctgatactggaagctactctttattttctgtcctattaggtgtagatcagaaacaaattgaagaacaaaaggaagaagaaaaaatacgggaacagcaagtgaaagaacgaaggcagagagaagaaagaaggcagagtaacctacaagaagttttagaaagggaacgaagagaactagaaaaactgtatcaggaaagggtaataagtatgacttgattctctgaactggttgctccattgtacacctttcgtaagtacattgagctcagggaggggagtcaattggtgtacaaagtcagaggtgcggcagatgccttaaaaggcatccctgtcctctccttgtcttaaaagcagtgggaaaggctgcacagaatgtgaagcttaggagttttgtagtaaaggatagtttttgaaggtaatttttgtacattctcatctgatccttaaaacaagcctgtaaaaaaggtagactgtgctttgctgcagaactttgctttgaaaacagggtttaaagaagagactgtcagtgccagctagctgggactagaacccaagggaggagtggctgccagttcacagttgcttccaggggcacacactccctccctccttcct

SEQ ID NO: 136210 - DNA, 1767 bp, Homo sapiens
ctgtgggtgggggacatccagggcttccgtggcttaacttcttgggacgggaatccgtcttctccattgaagacaaaaaggtgaaaagtatagaaaatccaaagttcaaatggaaccttgagtcttttaaatatactattcttttgacaaaaattcatagcttttttgcttaaggtaaaagatttaagagattttaatttgtaaaagttggggtggctcattaagaaagaaaagatctatcaaatgcattaatactgacattaatattttatgtaagtctgaagtattatgggtgttaaatgcataccctatagtttattttgatgtgcttgctaaatttcatgtttaaaagtcacctcttttttagacttttaaattacatatatatttcaaaaatggttcttaaagtatttcatgaaattaatgcatatctaatttcaaaattttccaccctctccatgtaatcagagctcaaaaaagatggtccaagaaggctccctagtggacacgctgcaatctagtgacaaagtcgaaaggtacctgttttccctacacactttcatacacaaactgttaattgcttattttgtcagccaagagaaacagatgtttgagattgcctgtaagaagttattgaatcagtcaaaattagtgactataaaaacaattgagttttttgacttgtgaaattgatcctgatataaattgtaaactagggcagaaaccccccagggaaggaattgagaacattatgaagatagcaaataaacttgacacaaatttttacattttaatttttatctttccctaatttagtttaacaggcttttctcatgaagaactagacgactcttggtaaccatgtttgctgcccagcttctaacttacataccgtgagaagttacgtaacatttactcctttgtaaatgtttccctatcatcagacaaaactcaataaaaatgtgtgtaatccaatgtgggtttttttttccataattaattttgataccatagtgtgtgaaccaagaataatctagtcacgtgaaacctcttctccagtcatagtatttctcattcattataataaaagtaactggcttttaacctccttatttttgtcttaaatttataaatgagtataacctatcttactgctcaactgcaggcctacattttggaagtataagctgtgttctttcctctccaaagttgggctgccacctgtaaaacaggaggtcatttttcctagcacactcctgttttgtccctgaacataaaaacagatttttctaggcattagaaatagtaagaaagatactgcctctggtctttacttctgatgtctgtggtttgtatgtatgtgtccctccaaaattcatatgttggaatttaaacccccccgtgtgatagaattaagaggtggcaccttttgcaggtgactaagagtgggattagtgaccttataaaagggctcaatggaactagctaggcccttttgcccttgcaccatttgaagacactgcattgatcccctctggagaacacagcaacaaggcaccatcttggaagccgagaccgggccttcaccagacatcgaacctgccagtgccttccttgatcttcgacttcccagcctctaaaactgtaagaaatacatttctggtctttgtaagttacccagtctaaggtattttgctatagcagcaggaacagactgagatagcatctttattatggaacctttggtcctcatacttaatgaatggg

SEQ ID NO: 136211 - DNA, 1021 bp, Homo sapiens
ttaagaaaaagcaaaaatgaaatacgagagggtgcttttttttttttttttaataccattttgagagtaattttaaagactaatgcgaaagttcgggagcacattgtatatttgaaataagtgtagtgtgtgcaaagaccattttctacctgtggataaaaatcaattcccccaaaggcctaaaagcatgaacaatgtttattttgagtaaataattaaactacatatttaacatggaaaaaattaaatgaatgtcaaaaccaaaattaagaactataagcaaagcatgcagtctctgttaacaaaacttagttgtgaaactacatttttcattttgtaaatgccattatttcatttcataaaatgtaaaaatcctcagtatcattctttacacttgatgcggcaaacacttctttcctattttcctcgtatttcctgcaaaataaatctacatctcaagttccttatagttcatactttcttctcaacatatttgagaccttcaggtccaggcctattttctcttcccgttaaaatcttacatgcagcttgagaactagctatgaggaaacagttagttattacttaccaaaacacacaatttaaggttaccaattttgtgggctctaacagaatgattgtgttgtaccaaaaaaaaaactacccacatataaatccttttttttttttttttttttttttttccagagaactgggtgacctttttcttcaaattttcatctggcttatttgagggtcatttggtagtgaaccatgtgatcataaaaaaattgttttcaatttagaacatatttgcaaagtattttccaggtgtgacaaaacaaaatccagattaaaacggttctcttccatttcatcttcagcacttgttttcattttcatcattgaaactggttatcaggcaatcaaaaataacagaaaatgtaagtattccaaagtgttaataattcatttaaagatactgctctctaatgtttaagtatgagaacattattttaaa

SEQ ID NO: 136212 - DNA, 1113 bp, Homo sapiens
agttaagagtgacccgaaaggccctgacattgcttcgggcactccaattctagatcctctagctctggggaatgtggctggctcttacttcccctgctcccgtgctggcttttccttcttgctaccaatgccggggcgagggtccccacaatgtgttccacaggtcagtattgggcctgaaaatgcacaatccttccacttaggggacacacatctacctgtttcagtgatgattgtccttcctcttgttttggcctagttcgttttcctcacctatgtgcttggagtggcctggctgggtgtgtttggtttctcagcggtgcccgtgtttatgttctacaacatatggtcaacttgtgaagtcatcaagtcaccgcagaccaacgggaccacgggtgtggagcagatctgtgtggatatccgacaatacggtacttccttctaattcacccctcccccagttatttcattatcctctcgtgcatatgtctggacctaattattacatgcgcatccttttaattgtcatgatctgtttcatcccttctattagagtaattttatacttttcccttcaatatgctattttctgggtggaaacttcagggaggcttttagcttgctaggtatcaaaatttcgttatattttcatgttaagtgtgtagtgaaagaagcttttcttaatatgaaactactttataatgcagttcaatcaaaaaagacttctggatctccgctacaaaaagattgtattttttctttattttcagttttataacatccaactttccattcaaaataatattgcacacattgtataattcaattaatttgcacatccaactcctcaaatctggtctttttaaaatgaccaactgcttaaacttcatctgtattgaaaaatacaacattagatccagccatattttaaagtcatcagaacatactctataaatcattatcagctgttagaaaccagttcaaacattttctaatgagtgagatccttacaatggggatctaaggttggttcattgtgacaaaccccagaagagaccactggctcctcctgtcagttaatttgggacttgacttcgctgctgagtaagagag

SEQ ID NO: 136213 - DNA, 1049 bp, Homo sapiens
ggaactgccatccagggaggcttgcatttataactgagagacagcggggtgagttagaatgctaagaagggggaaatgggctgggcgtggtcacacctgtaatgccagctatttgggaggctgagacaggcagatggcttgagcccaggagtttgaggctgcagtgatccatgatcgcaccactgcaccccagcctgggtgataaagtgagacctggactctaaaagaaaaaaaaaaaaaaaaaaaaaaaggaagtcggtagttcaccaaggaggctttctaaaggagatggactttagcccgtgcctttcaggaggggacttggagctggggagatggggagacagtgcgattgggattttggcagatgatataaggcaaatcctcagcagagcaccccgggttccaccagctttgtggttgagttgcagactctttgagtgagagaataacccagccccggtggtttctgctgaaccgagaaggaactgctccagaaacatgacagggattccaataacggcggttaaacagctaacaaagaggagtctggaaggctggcccttgttcatgttggctggaacatgctgggtagatgagttaattgggggccctcacagggaatgctcattgtgccactcttaatgagagaatccaagtgccccatgggatgtaataattaggaagcatgttgtcagtagatcagctgtctgtctcctgatgtatgccttgtgtacacaggaagaaatagaagctttcctttaaaaaaaaaacaaaaaaacaaaaaacagggtctcactctgtcacccaggctggagtgcagtagtgtgatcatagctcactgcagcctccaactcctgggctcatgcgatcttctcacatcggccttctgagtaactggaactataggtgtgccccgctacacttggctatcttgtatgtatgtatgtatgtatgtgtgtatgtatgtatgtattttaatagaggcagggtctttctatgttgcccaggctggtcttgaactcctaggctcaagcaatcctctgcct

SEQ ID NO: 136214 - DNA, 1034 bp, Homo sapiens
gctctgacactctgaatgtcactggccttgtcttaggggccttagaaaccaatgagtgataattaaggaactggagcttgtatgaagaaggtgccactttaagtgtccctgatggttttgagttgccactaaagagctcagagccctttcaaagaattcagtctgagccagatgaatcttaatttctcaccctcaaattgagatgcagtcctttggagaattaatatttagtggcatggaacacaaatcatttcttttgctggactcttaaagatgtactagattgattttgtttttatgacctttcaaaaacatcgcagtctgttttgctagctccagcctgttgaagttttagaactcatctttagcaacatcaaaggtgacagggacagcctttgagaaaggtacgcatgaagtgattgctggcatcccatagtcaagtctcaggataaagcatccatattgcctttttttttttttcttttttttcctttttactagtggagataggaaacctataaataagcatggcagaggtgtcccctctgaagattgccccttactaagtatttacagtaactggatttctttattttgtcagtttctccaggaagaaaggtgatgtcatgctccatagcaagatgagagaaggagtttagggtttgtaatttttttttaatcaaagaatttaattgcaatttaatgacgagagagaggatgtttattacacggtggtccaataaatactttctaataagtttttaagccatttgagggaaggcttgctacaacaaaattgacaatcaggcaagccgctttgaaggaagcaaatccatgaattttcagacactgttgctaagcgcagctttgctttcccctctgcttccccccccccccccccccaccaacttgctttgaaaaagcaaagcttaaaagcctctattgtgtggagggggggaatatgctaatttgcagcacatttcccatcagactctttttttggcctgtcatagctgagatatgaatgatgataa

SEQ ID NO: 136215 - DNA, 1047 bp, Homo sapiens
ctattgaaataaaaaataaaatattaaaatgaatttttgtgttaatggtctcatattcaggtgggaaaaatcttcttacagttgccaaaaatggttacctggtagtatgaaaagggtaagagttgataatcctcgagaataaggataccttcctacagtgttttcagcatagcttattttgtgtgattctttgagagcaaaaaaaaaaaaaaaaaccccacgttttgggattgtagtgactgctttgccttgattgggctcctcatgggagccatttcttatactgaatctttcaccataccaaagagtgttataaccttcatgtacattttaaatgacagtcatattttacccttcccaacagggtttatgtaacatctttgtgcagtatgcttaaaatccacaaaactaaaatatctcaaaggagaaaagagaggttagtgatgaataaaaattgtagtgaagattgtcttgttttttccttctaaaattccttcctgtgtaaaagccgcctggccaactgatagtttttctttcaactcactgtgaaatatttttcttagcttgcatgttagcaccaagtgatgtatccattgtcactactgtgtgatatcagttgctgaggtgataaaacatggatttcttttttaacctggtactggaatggaggatggggaagaaaagagagtcaagaaaaggaatgatgcaactgacaggcatacattagtgaggtgccctattcatttatttcagtagctgtacatccttactttccagcactattgaatactctgtgggtggtaggatcgtgtgggggaaagagcatagttataatagctgacatttattgaacatttgctattctaagcacattatttatattaactcatctaatccctatgacaactatatggattagctgggttcaaatccggactcctccacttcctagctgtataaacttgtgcaacttcacttttttttttagatgaacaaaaactatccatctcttagggtagatgttagcattaattgagatggtagttc

SEQ ID NO: 136216 - DNA, 1035 bp, Homo sapiens
tcctacttctcttaatgtcccccatgtgagcagtcaaaccattcaacctccgttttaaatgaggctcatacacaaaatgaggctcagaggatgactgctactcagcctgtgatcactttggtgataattgccaccaaagatgttacagttacgaacaagtgtggtattgaggaaagcatcaactactttttctgaaatcgttattttaatttaacgctaggcgtttggatttgtacgtggaattatcacacggggaccttctccagaacagctttcacaatactttggactgatttaggggtagggtgggcttcatttttaaacaggtgtggagttgggtgcagttctcatgaagcaaaggcccgagccagagacctgttcttaaggaagtactttgtgttttggacaattgttggctccacatttcaattgccaatttatgttaatttgtgcatacttcactggttctggcagtatccttggttttggttttagtttttacattaaaaagaaagttcccttcatgtaaaaaaggaaacatactgatttcctttggtagactcttagtaaatacaccacagggccatgaactggttttatttttccagatgtatttaattaccgtgcatcctcttatgaatgttttaattgaaatgatttaacgttgggaaaattctgaccattggcccattaagtcgggactttggttcttaatacaattagttccttaaccaggatcagttaatttactggtaaaatagatgaggtttgtagaaataaaagtcccttcagactcaaattttaaggtatttgcaatctttaacctaaaaataaaataatgagtagtggtgatatgtgtaatttcacttttcattacatcttgaaagaaaacatgggtttttcattgttaagccagtttttttatagccttaagatgtaattcacatatcatacaattcacacgtttaagtatacaagtcagtggtcttcagtatattcagatttgtgcagccatcactactatctaatgttaga

SEQ ID NO: 136217 - DNA, 1012 bp, Homo sapiens
agtttatggcccagtatttagtgagctgtcttgctttagtcaatgaggttgaaggatgaaattgcagtgattgagcacaatcctgacatgcgtgtgtgtttcatctggtgcagatattcacaggtgcacaaaaccgatcagtgagatgatacgtgttaatggctgtagaaaagtggaaaggaacatgaaaatgcacttctgttgtaaaagtaaaaatggcggttgtccagtaacttcaggattacatttgtcatggggcaagggatgtgcgacgaagagagaagaccagtctgaaatggctccagttctgctggcatgtacctgtgttctgggtggttgctgacaagccagaaatgaggcattcatggcatacatcaagtttgtgctttccctcggttgtgctacaattattcattttggcaaaatagcagaaaatataatcagaaagatgtactagtcctaggaaagtgaggggaaaaaacattctttgccacttgctgcctccatgctttatcctctaacatgttctgcctttgggctctatgtgtggaataatcttggatgaaagttttcctgctatataagattctctgaagtcctggtaactttccatgattttttttttcctttatggactattacgtgatgtgacattggtcacatcatgtagacaaatagattgatgtgaaaaataccaggattatgtatcctgaacccagatggaatccagtaaagcttttccttaataatacatgcctattgttcttgttttaacctatatgcatattaacccttgtattagcctcccagggctgctgtaacaaattacacaacctgggtggattaaaaaaaaaaaaaaaacagatttattctctcacagttctcaaatcaagcggtcaacaggaccacacgccctctgaaggctgtagggcctcacctcttccaacttctggtgtttcctggtgttccttggcttgtggcagcatcattccatctctgcctccatcttcat

SEQ ID NO: 136218 - DNA, 1002 bp, Homo sapiens
caagccagatgagcttgccagcctcagcaaccagccagggatgggggcagggctgcccaagtaggtggggcaggaagcccagccctcaacaaaaccctattatattctttgtcttagtgaggaagttcttactgttgtgtgtattattggaagacatcttctgtgatagggttattattgcatgtacagagagattccttggaaccgcatatgactcaatctatctcactcagatttctcaccataccttcacttattttgctgcagtgtccagcagatctccttgaaacagtgtgtactgaagacctaactaaatcctccaaattacctggttggttcagagaaccaaatcactggagctttgtagggaaggtttgactttcagggctttagccagagtaacttatttaatgattggcttttaatgtgtttctgtgcaaagatcaaagcaggtgaattttcatgtatttttagaattctagtagaaaaggaagataggaaaatctagttcaagtatacattctagtttttaggggaatttgtgtttttattttacttttttggttgctacgatttgtcctatattctatatttataagaacataaatatgtaattaaaagaatatatttgatggcactacctgtcaacaaagccacttatttgtgaaattttttggtaacttgatggaaatagtcacattttatccattgaaaactacaaagctcttatctattgttctttgtgtatatttatgcattaaaaatagatcctgcaggatgagcagatgtactgaagtgtaaatccgttttttaagagaggctatatggaaaaatatatcattcaagactcagtctctgccttgcctataggcctcgtcagtgtttagtgaatgacctcaaccctgtttttttccttccttctttggtggttgaggacagacaatgaatggtctctgtactcgcctgggctcagctgggtggtggccattatgccattgtgct

SEQ ID NO: 136219 - DNA, 1052 bp, Homo sapiens
ccactcggggtagccgattagcaggcagcttccggcctccagcactgcaccgcctgcggtgcgaacgtgacgtccgcgacacagggggggacttccggcgcgccgcgccacgccacgtgttccgcaccggaagcgcgcttccagtcgccccggcaacagccgcctccctcgcgtcccccactccccctctgtctctccaaggaaaactaggcccctgcgcggccaacgcccaggatccgcaagctgcgcgcccacgaggtgacttcggggacggctgggtttcctttggggagtgagggaggagcttagacgccccgggccctggcttcttctgatgcgcagagagccgaggtcttggacgtcacgttgctctcataattatcttaatcccgcgacaaaaggtggggccggaggcccatgagattcctaaatcattgcaggttaattgtgagaggggaccagtcccagaggctctcagctctgcagtgcttccgaatcactggacgactctttaagaattctgatccccgggcccccatcccggaccaatgaaatcagaatctctaatagtggggccctggcatcggtagtttttaaagctgcccaggtgattctggggtgccgagaaccaccgtgttaaggtctgtaggtgaattcggattttgcccatccagtccagtatctgaatagaagatcgcccaggacagccacatacttgaaggatgtctaggatattgccctctctgctcaaaaattcgggtttctttcttttctcttgcactttaacctctgcaggaggtcagcttttggtgggagttatcttgagacatctggcgcctacagtttatgggccttgtgtctctgcccacttatcagtaatgagctgtaattgaaccagtggccaacgaagtgcattttagctctgaaatcttgatgttcccttagtacagatcagatggttctgaacaattttatttttttcaggaatgatgtttttaaactcgtttgacaggctaggctgtgtattcagctgttcttcatctcaaatcaga

SEQ ID NO: 136220 - DNA, 1070 bp, Homo sapiens
tctaccccaaggggcatttggctatgtctggagatatttttttttggttgtcagaagttgtggggtcaggaaggggtgaggcaggggtgctatgggcatctagtggatagaggagaccagagatgctgctaaacatcctactatgcacaagacagccccctacaacaaagaattatccagcccaaaatgtcagtaatgcagaggttgagaaatcccgtcttagagttacttaagtgaagaccgaaatggcataatagtattttggtctaaatcttttaaaaacttcatttttttcttgctttctgcttagtaaaacctagcatgtaaaaatcaacttcaaatagataaattaagcaaggttgtcaggatccacaagtttctgtaaatatcagtatttctcctacagaaatttaaatggcagattgtctgggcgagaccattaaaatgaaaggttttgaaacccttgtcaatttgaatgttgttacaaagctgccctgaaattatgtaagtctataagaatgtgaaaattgtaaggcatttttcagaaaagcatctctctttcaaaaggctaagtataccttacaggccactgtttaaagaaaaaaaatgaaaacgcttttaagctatctgaaattccaactctaggcaaaattaaaatttaaaattctaactaaagtaacataaagaatatggcactccttagggactgagaaatttaaaaataaatgaaaattcacttcagttaagaagtgatttataaggggtccagtgagatacatttcaaagggataaaaattcaagctagtcttttctttgaaaaataagaatgctggattaataagagaacgtcaggagaaagaaaaagacgcaaaaggatatgggccaaaataaatattcctgatcctttttgctctaaaatccttaagtgagatgcaggtttccatctcagttgagagaaataaagatgattatagaatgtggcatctcgtgcttgtggctgtgaagtgctaattctctcatgccttagaaatgcttatacctaatgatcttgtgatgcacatggtttttag

SEQ ID NO: 136221 - DNA, 1031 bp, Homo sapiens
tcctttgtaatctgtaggtatcctttttctgtcttttttttttttcatgcaaagtatattttatagaagccaggcagtttaccctgtgaagttctatagactggattttgctgattacttcctgtgatattgcttaacatgtttctctgtctcctgtatttcctctaaattgatggttagatctagagactgggtcagaataatgcctgaatttttgttaacagaatacttaatagtattgttttcttccactgggaggtatgtaaagtgtgatcagtttcattttgtgatattagcagctattgatgctcattacttagttccattgtttcattagattttataacatggtggtattctaattctattactgcttctttatttattagctggaatacttctataaagagaaacctcttctcatcaattatttagttagaccctcaagtatagtttgtaatttagaaatcagaatttgagtgcaagaggtgcttatttatcctcagtgggttgttgtttctgggcctttttagtaagcagaggtaggaaatatgtgttttgttagtttggtctgttgtggttttggtaagtccatgctgatacgtccaattcagattaaggacttcaggtttttacttatcaccatgatgtaaaaacttcaaggtttttacttaacatcatgatgtatcttctttctgtatcttctgtctccgctattgataatcccaattctctgttgcacctactacataattactctacagtatatatgtagtgttcataaaacagcattcccaacaaaacaatagttcaattagtgcaaattaagatttttgagttctttttaaatctttagtgtaactcattagacatatggtcaaattcctgtattaaaggagttttcagtattaaatttctacattcaagttctttctttggtcatgtcaccattcttacctgttttacttgataaactttgacaatgctggaatgtgctacagtaagcctgtatatatttgtaaattattata

SEQ ID NO: 136222 - DNA, 1033 bp, Homo sapiens
gtgtgggttaaatgaattgatacacaaatggcatttggaacagtgcctggcataaagtaaacactcaatagatgttgtatattattattatcgttactattattcttattactactctttcgaatgttatatatccacatgtgtgtggaaatgaatatggcttggactttaagaataaaattttagcaataagctataagtagtctaaagatagtttaatcagttttattcatacaaaagtttacagttataggcttagtgcaagtcactgataaaatacagactggattattttcagtataactggggtacatattatcagacttttttttttcaaaatggactccaggtttacctcccttttggctctttgttggataccccatcttgccataccccagtcatgccatgcctcttgatctgaatagatagggaattttatatattttatacatttcattttagtaaattgtgtataatctataatatgatatgttatttgtttttaaatgtttgggccataagccctagccaaaagcacacttaacttttttttttttttagttttgctacagacggtacgtattttataatcagttatttaaacttttttttttagaaggaatgtcttgttcctctttgtggtgaagaagaaaattctgtccatatcttagatgaaaagttatcagacaattttcaagattcagaacagctagtagagaagatatggtatcgtgtaatagatgatagcttggttgttggagtgaaaactacatcttctttgaagctgtaagtaaattccaacatgataacactgtcttgatgctccagaacagtactgtccaatagaaattaatgtaagccacgtgcaattttaaatgttctagaggccatatttaaaaatgtaaatagaagcaagggaaattattattactgttttttttgagacagagtctcactctgttgcccaggatggagtgcagtgggatgatctcggctcactgcaacctccacctcctgggatcaagcaatt

SEQ ID NO: 136223 - DNA, 1028 bp, Homo sapiens
cgatactagctgtattcccctccacacccacatcagggtttaaggttttaagctcatcttgactctattataggttattttccattaagagctcttaaggtgtctactagtactgtctggttacctgacagtactgcagctgtcaggtatgcaacagaatgcaactgaattccttgggtaatttgtctgatcataaatacatatacactaagacttaatgggaatgaaggtcatccttaaattagctgtgcgagagaaggaatcttcactagagtttgactcatgataaatgttagaatttccaaaggttagtcatgaaaagtgttagaacttataaatagattacaataaaattttgatatagaaatcaagaatgtgacagtccctggacaaacctgaataaaatattaaatctaagtaccttgctatttataaagtttttataactcttatatttcctcatcccctaatatctttattttattttagtttttactattttcattactcatttataagattgagttttacaaatgacaactacatgaaacaaaaggacttaatttatttatttcacattcgattttttcttgtctactcctcctataatgctccctttcttttaggttgctgctaaatgggaaaaacttagcttagtactgatagatgactttattggaagtggaactgaacaagtactcctactttttaaggactccttgaactcagactgcctgacttcatttaaaataacggatcttggaaaaataaactattcggtaagttctatttacttattatatggtattttaagaaccattttagaaaatttaagtgctcaaaagctttgacctatcatttaaatattggtggttttatacttaaaattttgaactttaaaaatatatagattgaatcttttaaatatatacattgaatctcctttcaacaaatgttatacaaattgaccatgcttttgatataaatttgaattgtagtacatttggtggtcacttaagtgacagcag

SEQ ID NO: 136224 - DNA, 1050 bp, Homo sapiens
attcttagcaaacttttttaaagcgtctacagaaataatatttagaattttttttataagtatgatattgtcaaaatagtataaaaagcttaaaatgtttacttaataaaatgtgtagttacctatgttgtagttctctaacagaaacgtgttttcttttcaacccttcctacttcatggcagtttttcctcatttcttttttaggtttagaaacatcaactggaatcaatttgcatttgaaaattagatcagcacaaagacttgatattgtggaatgactagcaaacaagcaatgtcatctaacgaacaagaaaggctcttgtgttataatggggaagtccttgttttccagttgtctaaaggaaattttgcagataaagagcctacaaaaacacccatattacatgtcagaagaatggtatttgacagaggaacaaaagtatttgttcagaagtccactggattttttaccataaaggaagaaaactctcatttaaaaatcatgtgttgcaactgtgtgtcagatttcagaactggaattaacctcccttacattgtgatagaaaaaaataaaaagaataatgtttttgaatattttttactaatccttcacagtactaataaatttgaaatgcgtttgagttttaaactaggctatgagatgaaggatggcctaagggtccttaatggccctttaattttatggaggcatgtcaaagcattcttctttatctcttctcaaactggcaaagttgttagtgtgtcaggtaacttttcctctattcagtgggcaggggagattgaaaatttaggtatggttttattgggactaaaggaatgttgtttatctgaggaagaatgtactcaagagccttcaaaatcagattatgcaatttggaataccaaattttgtgtatattctcttgaaagtcaagaagtattaagtgatatatacattattcctcctgcttacagcagtgtggtgacttatgtacatatttgtgcaactgagatcatcaaaaaccagttaagaatatctctcattgccc

SEQ ID NO: 136225 - DNA, 1064 bp, Homo sapiens
ttatttatgcccaagggaggaagcagaatacaggcagaaattaggcaataaacaagatcttaaaggtcatcttggggcaacctcctcatttttaaaatgaagaaagtgaggtctagagagattaagagatttgctcaaaatccctgatgttattggctaggccaggactagtgctcatgtcttctgattttcactacagtaatcttttggcaataccatgatgtcaagttagatcatgtcactctccagcttgaaacccttcagtgcctttccaactgcgtttagaataaaatcccaattctttatggtggcctgtaattcaaggccatgtgtgatctggctcttgccagcccccacccgccatcctcatctgttactactctgcttgcttagtgcagatttgaccaccgttcaaagtaagatacgtgttatatgttgcaacccaggacaaacgtgcacactcacataactgaagcaaaatttcattaaagaatacttctgaaaacatgtgactctcgatgtatttttttctatttgacttccttttaaaaaatgaaattacccacaaacttaacatcacaatttaaaatgtgacccccagttgaaaaaccacgactagccacactgccttgtgttcctcaaacagaatggggctgtttcaatttcggacttttccacttctctttgcctgggaagattttacccaggtattgcgcatggcttggtccttttttctcttcagtgtttaaatgtatccgagaggccttcactgattattaaatgtctccgtcttgtttattttctctgctttacagcccttatcgtaatctgtaattatcttgttcattggtttgtgtgtttttcatttcctccagtagagtgtacatgggttccgtagcagcctatagacattgagagtagaggccttgtgtgtcttactcacctttgtatgcccagcacagttctcaatatatacttactgaatgaatatagcaatacttaaatatatacataagaagattggtccaattttaaagatttgcatggaaaaagaaaatagaagc

SEQ ID NO: 136226 - DNA, 1802 bp, Homo sapiens
agtcaggaaaaagacaatgatttctgctattatttcaataactctacattatataggataacttagttatgaacgtggcaggaaaatatgaggtataaagtttgccaatcttgtcataggcttatgataacaacacaaaatcctctaaactgcctaatctagcaaagaaatgtaaggcttttatgggaagattaagggtaacttcagctttatctatgacattctagtccttttattaaaaaaaaaactgaagcgaataacttaatatttgttaattttgggttacagctacataaatatttgttaacattattttctattctataattttttaacttttcaaaagggaaggaaataaaacagtttattagtgaagttctgggtcctcaatgaactcaagatctactaggggatagacttgtacatggctaatcattcagtaacaaagatttagcatgtacttactgtgtattgggcagagttggagggagcagggtgtgacttttcaaagtccctgacttcatggagcttattagaggagacagcatcagtccgactcctctcatgccatcccctatttgaggagctcctctcaaaatgactgactcttactattatcctattagttttgatgaaattgggtttacattctcccatttgaccaaaatgagccaagggaatgattgtagatagtgtgcttatgcgaagaccttgaggcagagtctgtaatatacaggaatagaccaaggtccattatatctaattaacctggataactggctggtgactgatgaggacctggagaacagttttgaaagtttagctttgtttgttcaagtgtactaaggaatccagctcttgaaggataagaactgaagcagaaagcacctcccctttttagagtagaccagagatcagcaaagtcttgtttttgtatgacccttgagccgagccttttaaagggttgttacatacacacacatacacacacacacacacacatgcacgcacacacacgagagagagagagagagagagagagaaatcagcaacagagaatataataagaatataatatggccctcagagtcttagatatttgccatctgggcctatacagaataagtttgccagctcctgcagtagaacaacagttctcaaagtgtggtccctgaccagcagcatcagcagtatgtaggaactggttacaaataccaattgtcagatcccacccagaattagacagtctaggggtggggcccagtaatttcagttttaataagccttcctaatcattctgatatgtgctgaagttgaagaatcactgctataaaccaatggcttaatcccattataaaagattacctgtctctcagtctcaccagtttcacaagaaagtggagattcagaataggttgtggccaactagcagagaataatcttgaaggaatattttgttcttttgtcttgatcacacccattactgacatttatgcagtccagctaatagaaatagtccatccaatacgaatgctctcttaatgccccagaaggactttcagtggatctatgctcagagtcatggagaaataagagatcctaagatgttttaaactactataatgatctagagttatatgtttgctgctttggaatattaactgttctctagttttcgttattagaatactttatattttttcaacctttatctgaaatttaggcacatttgtaacaacaatgtacttccaagattttccttactggtaaactaataggtaaatttaaatttagtcttcttt

SEQ ID NO: 136227 - DNA, 1067 bp, Homo sapiens
tctacttttctcctgcctctctcccccaacccccatgtgcctagctgtcaaatctttgtcttctcttttctttcccctactctgatttcatttctatttgtctaggggtaaatggtcaacaactagcatgttatatgtaagaacattaataaaaatcattttaatataaatggggctttctaatttcaaagatcaacattgctgaaagctatcaaagagccgtgggctttaaatttcttagtaatggacattcatttgtttatggtattccctagtgatggtactagcagtggtggtaaaaatgacaacaacaacaatagtgttttattcttcttaatatggctaatatttactgagtttttaccacttgccatatattgttctaagtaattggtttttagaatatatctggggatcctaggagatgcccaagactttcagaaagctatgaggtcaaaactattttcataataatgctaagatatcatttgcctttttcactttctttacatttgcactgattacacagaagcaatgatgtgtaatcagtactggctgcttcgcccaaatcaaggcaggtagtcattgtagtcctcattgtcagcactcttagtttaaaaaaaaaaagacaattttattttagaaagtccctgatgaaacagtaaattgtattaagttttgacccttgagtacatgtcctttcaatgttctgtgtgacaaaatcgggaagtgtgcataaaacacttctgcatgctaagtatgtttgagttgccagctgaattagtcacctgtttcataggccaccctttttacttgaaaaaaattgtaaaaaatgtgttttgaatactgatgaattttcaaatagcagagctaaacaacaatctctaagattacctaccacagaaccactcattttatagattagaaaaatacaacccagctattaaaagccatatccaaagcagcactcttacaaatgcatgatttatggcctcttcttatattttatagtgctttaaatttccactaaatttagtgctttaaatatataaaattagtgctttaaa

SEQ ID NO: 136228 - DNA, 1050 bp, Homo sapiens
aggaaagcaggcatcacatggtgagagagaaaaggcaagagagaaaggaggaggtgccaggctcttttcaacaatcagttcgtgcgggaactaagagcaagaattcagtcgttgtcatgagaatgataccaaactactcttgaggagtcctccccatgacccaaacacctcccaccagaccccacctccaacactgggcatcagatttcaacaagagacttgggggaaccaagcaaaccatatccaaacaatagcaccatcaatcttttaaatggcgcttttatctgaactacatccctgagtctatcctcaaatagcttaactttgtcttggaagtctttcttctcctttgccattagtggttatttttcactgcagaattaatctgacttggatgtttattactgttttttccctagataagtcagataaatatgatgcacgtgatgttgaaaggctacaacaagatgataactgggttgaaagttacttatcttggagacataatattgtagatgaaacactgaagatgctcgatgagagttttcagtggaggaaagaaatttctgtcaatggtaagctgttcaatttaaccttgactgtaatatatactgtataaatggtattgttttacatttatctaatcatgtatttgcacatattcctagcagtcatcataaacaccagaatataattatttataaagacccagtaatattttcaaaggaacagcttataagtcttttaagtgggatcattcataaggaaatcagatcaccagagagcagaatcacactcagattcttcattcacagcagagtttcctaatctgtgtttaattcagtaccattaagcaatagcaagacagtatctttgctactaggcctagaaataaggagatactgtccatttttctcagttgttgcctatgcctttctctgtccccacagttccttgtgctaataggttaataggtacgccatatagaattgttaaatgaatgagagtcaccccaaaaatgcaagcttatccccaaggaagcctatcaca

SEQ ID NO: 136229 - DNA, 1050 bp, Homo sapiens
aacaaacttaatattagattggtgcaaaagtaattgcagcatttgccattatgtttaactgcaaataccacagttacttttgcatgaacctaatagaaaaataccattttactaaagaaaccaaagtgatttttttctactaattctgaggctgcaatgtggatatttactagaatgttctcttgaaactctgacagtgatatttgtttgcaagtcattatgtgaaacaatcaaaatgtggaaatgtatccacataaataatgacctgtcaagggaaatggagtttgtccattttggtcccctgtgtcattatttagtttgtttgcttggtaggaagcaccactttatattgccagagatttttttttgaatgtttgggtacattatatcatttttaaagctcagaactactacataacattatctttacattatgagttttatttttaaacccctaaattacaactactgatcaaagcttaccactttttagaccttaatgaatcctccattcccagatggttattggaaattggtgttatttatctccatggttatgacaaagaaggtaacaaattgtgtaagtatatttaatttatgttctggcttttcaagattttgagattgagatatctatgtcaactgaattaagaattggcagaactttctccatctgtagcactcctcaggtcttctgcaatgagggattggcaggaccatttttacagagtgttagatacttagtagctgtgcatactgtttgcattataataaagtaggcaataaaggcaaaaaataaatgctgcatcctacagcataaacaaagttatttaattcagagtcattatcttctttctaatctgactgtgatattaaaactcgtcttagtatttttatggagaatttttttgacagtcgctaaaggttgctaaataggccttttccttttcgagtctcccataatctcactctagctttttctgaaatgtgtattataatgaaaggaacagtaacaatcatctcttttgttccaatgactcccctgttata

SEQ ID NO: 136230 - DNA, 1566 bp, Homo sapiens
ggcagctttagctacctcccccggcacagtattgaccccacaccatccccaggccacatgcacatacctagctacccactgactgccccctcctgactgtcagcagcctttagcacaacacactactgaacatccatgcctgtccacttgctcactttctgtattgcccacctcaggcccactcattggctcttcctctaatatagcttcaatttggccttttatccatcctcaccagctacttcctcaattcagtttctaactactacacctttgccccagtcccttcccaggtcataacctggtgggtttccttctctgcctcctccagtctgccctctgtgctattgcccgaaaggtgttctaaaataggaaaatgaaagtgccctagagtttcattcacagtccttcaagtccagttctttcttatttagcttctcctctcaccactcatcacatttcatcttagctaccaccacctgaacagtttaccgtgctccacacacacgcacggcactggctcatgcctccatcgccctgtgtcagtatctttcctctggacggaacattttttccagtgctcgacaaaagcaatgactttcttttttgttaagcacaatgcagagcacatttagattattatcaaatagtgtttgttcacctgtattttcttttccctcttacaagtgaaatttgtttatttcctaagggaaacagtctatctctctgctactcttcaatttaaggcacccaagtgcaacagtttctcattgaaaataagaaagagatgtttttgatctaagaaataaaatgaattgtaaatgaaaaatgtcaagggaaaggcaatatatatgtataataatattataatgccataagtcttgttcttatttttatcttctgcttaaagtctggatcagggtgaagtatcatgtaaaagaccagaaaaccatattggacaaaaagaagctcatagcattctggttggaacgttatgctaagagggaaaatgggaaacctgtaacagtgatgtttgacctgtcagaaactggaataaatagcattgtaagcattttttcattcattccaaatcagtgtttatcatggcttcctccctttctcctgtccttgctgccaaccacatattgctgtaaaattgaggtaactaacttatattagggatttattttttcaccttgcagtgtgagtgtagtcaaacatggaatagggtttgcagagaattaaatttgtttctgtatttggcgttgaaactgtcgatttcctagaaatgttccttgtctgagacacaggatggagaggtagcatgtcgaggctggcaaggtatgaatcgatgtgataactgtgaactttgatatcaaagctaatatcctatagcacctgccccggtgtgtgccacatagtaatatattcaggaaatatcaagtaaggtaatataccatctcgaatttgttatattcataccatgttttacagttgcaagatgttcacatgagttttgcacatataacactttgtgattttattgagtgtttttgtttgcttgtt

SEQ ID NO: 136231 - DNA, 1027 bp, Homo sapiens
tttaaaaaaggttgataaaatatattttattgacactattatgtggtgtaaaaattaggattaaaaagcaaatatatgagaatttacatacatgtgtattattatcccaagtagtctgattataaactgtatacttgtttcaataattctttagttattcaacagatttttagaatttctctatggagattgcttttagatccattttatgccctgttgccttagtagcctgaagtgtgtaactagtttgaggtaatgtgaataattttaaaacatcactaagcatctggtttcttcaagtcagttttagggctgattattataaatagcttaatgacctaaaaccttaatccttgagaatatagatatttacatatgagcttactttttaaagaatttaataattgtctcacttgtatttaataatttatcacctttagaaatgtgcaattttaagttctctaatgtggacagtcttaaagatttaatctttattttaggacatggactttgtacgctttatcatcaactgctttaaggtttattaccctaaatacctctgtaagtaacttactcctttataaaaaatataacatattgaaactgtagacaatgtctgagaattgtggagccttatgttattatagactttcatacctgaaactttgttttctgatgaagaattttaaatgtgttcatagacattattgtaacacatacagaggaaagtttttcataagtattcattgtccttcacagttaattttaagagtttaagttctaaactatatatatggcatcctataacacacacacccactcacacacataggtacataaaagcatacatttatttcaaaattatctcatttttactaatatttcaatttagaaattcatttcaaatagtatttattatatgaaacttcttgcatacaagaacagataagcagtattgatagagtacactgtataataagcaatattgatatataaagtacactgttaccaactgctacttaaaaat

SEQ ID NO: 136232 - DNA, 1018 bp, Homo sapiens
caaattcttccaagaaatagaagaagagggaatactttccaacttattttatgaggcaagtataaccataataccaaacatcacaggaaaagaaaactacagactggtattccttatgaaaatagatgcaacagccctcaacgaagtactagcaaattgaatccagcagcatataaaaaggattatacaccatgaccaagtgggctcaacatatgaaaatcaactaatgtaatctaccatattaatataatgaaggggaaaattatgtgatcatctcaagagacacagaaaaagcatttgacaaaatctagtaccctctcatgataaaagtactcaacaaactagcaacgtaaggtgcaaagagttgaaacaactaccaagttagaccacagtagtccacacaagaccacccccatttctgacacaaactgcaagttcaggaggtgctcaaaattgcccttaggtttgataagtctagtgaaggactctgagaactcactgaaaactattatactcacaattatggtttattacagggaaagaatttagattaaggtcaaccacagaaagtaaggtgtagggcagagtccaaggaagtaccaaatgttgagcatattacttcactggcatcaatgtgtggcaatgtgcatggagttagtcaacctgggaagctcacccaagcctcagtgttcagagtttttattggaactccattatgtaagcatgattgattgcccatgtggttgatcttagtcttcagtctcccccaaggtctactgatactgtgtaacccaaacgcctaccctgaatcacactgttggtctttcttctatggccagttcctaccctaagtcatattgtcccattgtcacttaaggcccccagacaaacaaagacaatcctatcaggcatgaagattacctctcagaagctgagggcaaagtgcagatctctctttgggtaaggctaatccttcacagaaaagaacttcctccacctgtttataaagggcatatat

SEQ ID NO: 136233 - DNA, 1029 bp, Homo sapiens
atttgtctaaaagtaattaatttaaaactttgatttagttcctttctctaatttttaaaagagcacttagtagttgtcactttttacaagtaatcaggaacttgatagatggataaatacaatgttataatttagaaaaatttaaagactcttaagggaaggaccatattgtattttctagagtaacctatgttatgtataatagtaggcactaaaatagatgttaatggtcatgttaatatatgctaaatagttatcctttttttttgtctttagattaacccaaccgaatctacttccaaagcagaagaaaatgaaaaagttgattcaaaagtgaaagctttcaagaaaccattgagtgtatttaaaggccccttactacacatcaggtaatcgtcaaagattttattagctataattttataacatatcttgatcaccttgagggagccacaaaattaagaaaacttctatttggtttttgaaactgtagaaatataaaaccaagagttatctgaagacttaccttggtttccagacgtagtgcatatgtttagctaccttgctttcttctattatgttgagtgtctttaaagggttctcatcacacatcagataataaaactaaatatttatatattaataaatctgaatggcatgtattttcctcacattactgatactattagacttgcccaagtttgggaatgccagaaatgacactaaagtaaggatttgttgattttactttccagaagccaaagatgaactggaaaaataggtttgtgactaaagccaaacttcaggacatctctatttttctgctaggttatttgattcaaaagattccaggttgtttctttcagcattgtataaagacctttttctcactgatgatgtttttggttggtaaatatattttgccttacgttacattgctacaccaactttatgatctcatgtagcattttctgtccctttacttgaaacctttctgtatagctatgttttatgtatatctcttatgaa

SEQ ID NO: 136234 - DNA, 1393 bp, Homo sapiens
acctatttaaagatgtatctcaaaatcaacggcttgctgaaaattcactttagttaaattattcacctttttatataaaacaaaaacactattcttcccattgttttgagccacctgatacaatttggctaatgtaactaaactacacaaactgcttgaatcttttaaatttttttttaggtcataggcattacaatggaaagtaatagtaaaatttaaatattgaagctcattgattttactatttgattagttcttcctacagctcccatcccaaacttacttttatgtttacttttctccttccctattacttagaaaagctgctatatagtaagaaattattctgttaaatacattcctaatcatctttctttttaagttatgctcttttctgttggtgtatagaaatatgcctcattctaattatttgtaattaggtaaagttgaagcagcaatatcttctttgctttattatctataaccttccaaatagtttaaataagcgcaccttaagatagtgctgattataggattaatcagagccttcataactctctcttctgttcttcctggtttgcttttgatcttggggaaaaccgtaggactttttaaatagtgtgcattgaatcagtaagattaaaatacaaaattgtattaggtaattgttttgtaagtcttttttggtgaaatgtctttatacaaatgagcataagatattaactaaatatttttcttcaagctaaatgattagattgtcatttattctgattattacaaatgtcttatgtttttgtcactccctagcccagcagaagaactgtactttggaagtacagaatccggagagaagaaaaccttaatagtgttgacaaatgtaactaaaaatatagtggcatttaaggtaaatatcttaaagatacaataaattatgtttgagaatttgacatgggaagtgattttagacatattctaattgaaagattgaaaattttgaacttgtacagtgtttttatttatgacaatttttaggcatgttgtactaccttctggttctaaccaagtcgcatagctttatcaaaaaattttccctgaggtctgtatctgaatcttttacgtgcagtaataggttaatgtctaagttaatacaagggtttaatgtttgttgtaaataacaacccaagaaaaattactctttactatgtgaataatttaatttataataacagtgaaacataaaactataaaattgatagtgcattttccccaagtgtggtatattctggagtgtagtttatatcggatattaacctgatactgagcattaagtgtaacaagactaagtccgtcactaccccgtattgtaggttttcctgccttaaatcttctattt

SEQ ID NO: 136235 - DNA, 1041 bp, Homo sapiens
aatagcagctgtgacccgggtgcatcagtggatatagttgtgtctccccatgggggtgagttgtcacttagtagccacagcaggtgttgggtgtggtgggggtaaggggacctggaccttggctctgagtcagcagagatgtcaggctagaatctagaaattagcagagtatcacgagtcacctcacctcgctgtagacatcttttttcccacatgtgaaatggggtggtcaaagaggtctctaaagccctttccagcattaaaatgtattgtttctaacaagtaaaattgtttaaactgacaccaattgaaattgaatttcaaaagagaaatttcctcacttttagaactttttcctttttaaagacatttccattttcttctttttccttaatgttgagttccagaataatgctttaaaccacatgcatatccaaccgctttgaaggttcctgtttatatgctgaattacccttttggaatgcaggtttaacagtctctgcccaagaccgttttctgataatggctgcagaaatggaacagtcatctggcacaggcccagcagaattaactcagttttggaaagaagttcccagaaacaaagtgatggaacataggtaagcttttccctcacattcttctcaaatgtagtgggaagaatcagaaagagaaaagtgcctccatggaccaggtggcctccctttcttcttgcatctgctgggtgccctgcaaggctctggggatgcccagatgaaagagacctggtgttgctcaaggaggtcactgatagcagaaactcatttgcaggccagtgcaagagtctggatctgtccagatcacaaacacagattgtctcagcagttctccctgtaggagtgcttaccttacatactagaatgttttttgcagcattgtttgtaatagtgaaaaactggaaagaaagaatctaaatcgtaaccagtaaagcaatagtgagatacatttgagtatatccacactaaagtgtgctgcaaccactcataaaggtacagcaagtctatt

SEQ ID NO: 136236 - DNA, 2907 bp, Homo sapiens
gaaattcagacctctcaaaatgagaataagcatagacatatctgtccaccaaacaaatctaatgccctgttgcacttccacctccttccaccagccttacagagtagtgggccccatcctttcagtgtttggatttctagtattcctgtttgtcatgcccatgattaatggctgttttattgatataaatctttcatcccctcttccctcttcagctcagtcgtttactagaaagcaataggaagcttgaagaccaagttcagcgttgtatctggttccagcagctgctgctttccttaacaatgctcttgcttgcttttgtcacctctttcttctatttattgtacagttaaagaagtggtgccgggtaggaaccacggttccttcgtccattagttggaaaaagtaacagacctaaaactctaccaagctactaaaaacattgcacatctgtgcttcctaaaaggaaatatgcagcacgtggaggggaacacatacatgtcttgaaaataaactgctagaataaagaaatgctggagaaattgattataagagactatagctatttagtaaagtaagtaaaggcatatccattgtgtaaattaatagtttaaatataatttattttttccttttgatctgaatacttttaaagcttaagttttatcgtgtaaatacattagctaaactgaaaagtataagtaacatgctttgttgcagccaaaaaatgtaatctgcttttttatgacagaattattatagctgagctgacttactagcttttctatactatgtatatagaagaacatgtatattgagaaagaaaacatacttatatagaggaatttatgtaaccatgactttgtaattttgagaattcctcccagtgatggtcagtattcttttggaatgtaaaccgatttaatgccaaaccaccttaacctttgtttctcagtgttccttaacagcctgccttttattaatctcaggcttttttatgaacactctcatttcagtagaatttggaaaactaagcgtggttggaatttctttgaattctgttagtaatgcccaaaagaaaagtctcaagcagtccccctatccagtcatttttatggagtttcatgttgtccactatagctggacactgaaccttttgcctaatttattataaaggcctgaccctctattgtcccatcttcacccccattccagagcagaggagtctctgtggaccatgaattgcactgtctccctcctcatttctaaatgaaaggtattagatataaatttttttgaaaggttagttgtttgagatgctaagcaggataataaatttagattttaaaatgttccctgtaaaagtcagcccatgacaaggaaatttacaaaatactagagtatctagaagggtgaaaacaaaaaaaaataaaaagaaacacagacgcccaggtgtcagctctccgtttaaagaatgaaaaatgtaactcatgatgatctgtgaaaccttcaaactaggaccaattgacttacttgatattctgcctttgatatggtagtacccacccggtattcctaaaatcctaaaaagatacaccttgcagtagcagaggcaatgacatgagtttgttttctcattaatatgaccagtttgggtctatgttggttcacatgtacatctactttatatgaaagaaaaaacagttgtctgcctgtaaaatgttgagtttcgattgagccatgtttggagattttattactattctgaagggtagtgttgttggttttcatcttcaagaagttgattccaaaactgagttatgaagaatgatataacagttccttcaaaattggcctaggaaataaaaccttaaaaggacactggtgtgctactttgtcttaatttgggcttttctgtttcagtttgccacctccagctgtgaaatggactgcagtccaccctaagtactgtgcacagtatctccctgtgtgtgtgcacagtggcttccccttacatggtagatttttggccttaatataatctaatcccaaagtagttgtgtatgttttctgttccttggcaaataaatgaagaaataattagccaagattgaaaatgtattgtcctaacggtgtccctttaatgtttcatatgaaaaattatgttgacccactaaaatatccttgctcaatgtctggtcagttgaatttaataacatatcttgttaatgtttgtgtgtctattaaatgtgactaagcaggattactgaaaattcactataaaatcaaaggcatctaaacgtttgtacttgtcttgattaatcatatatttacacttgatttttttctgtcttcatttgtttttatttaatcataattgcatgatttttttggtactctaatcagtaattttatttttaatcatgtcattacctattcatgaccaaattaccaaggaaccaacatttagatttagatatttgttttcacttaggaatggaaattaatagattttccatgaaagcattagtgaaatatcattaccttgatctgcaagtagcctaaaaatgcgattgctggtaaacctggcctcaaatttcatactaccataactgtttttatatattgccactaattttgactggatttaatagcactttattgtacaactacaaaaaaaaatatattcctagaattgttgccagtgtaatttctctaatgttctggtgcttttcatatattttcagtatttttattactatattggtattttctttgtataaattgattgattaaaagaacatgttttctattttaatatgttttagaaaaataattacatttatgaaataaatatcatcaggaaaaaaacctctggtctctaattgataaagcatcttaaagaaa

SEQ ID NO: 136237 - DNA, 1004 bp, Homo sapiens
agtttctgaatgcaagaaatttccaaaactcctaatattatgcctgaccctttcattgctgaatctgagactataacaaaccaagaagccaatcatttctgtttctcaatccagtacctatttatcttttttgcatcaagttttcactctaatactatcatacagattcgttcagtagaacttatgaaatttgccctgaactgtcttcgcccactaccgtgcaaatatggttgaacaacttgaatcaaataccaaataactgttttcagtcataaactaaatgtcaaaaatgtgttttgggtacttttccaatattctagattctgtgactccagctacttccttttagtgggggtgcagaggaaggaagctattattagaagcaataacaatagtataacacagtccagaagaatttaattttttaaaatgtggctgaactggtaagttactaaaaaggataagtgaaaggaaattgacgtaaaaagcaaagcttccttgcaaatcctgtatttactgctctgggatttcttaaaactgcttaagaacttagtcattaaaggtggaagtgcatcttacacaggagctatattctaaagtcagtgcttaggatagaattgagtatagttagaactgttctttaaaaatcattaggaagatgtcagctgggttcggtggctcatgcctgtaatgccagcactttgggaggccgaggtgggtggatcacctgaggtagggagttagagaccagcctgaccaacatggagaaaccccatctctactaaaaatacaaaattagctgggcatggtggcgcatgcctgtatttccagctactcgggaagctgaggaggagaatgcttgaacccaggaggcagaggttgcggtgagccaagatcgcgcctttgcactccagcctggacaacaagagtgaaactccgtctcaaaaaaaaaaaaaaaaatcattaggaaggtgccacaacagaaatggccataataactcata

SEQ ID NO: 136238 - DNA, 1389 bp, Homo sapiens
aaagtgtactcaaaactgaattaccctgtcctcatccaaagatgtccgataatgtgtggaccaaaggtggttggcactgattctgtatagggatgggacagaatgtggcgctgttctcaccttgttttgctttgttgttggaccctccaaaaggcctgacttgggtaaaggtagattttaagaataatgtaagtggaatgtatctatgtggatttcatcattttaagatgtaacacaaacacttcatttcaacttgagattcaacccctaaatcctctaagggagagaatattatatttttaacaaaatgccatgtaactacacaattaacataaggctttgaatagactactagttgtggatttgacctgcctatgaatattcacccacaaaagtgacagccatatcagttctctgtgataagtgcctcattgtcactccaagcaactggtcactgctgactgttagaggacaacatatgtaccaagctagggcaaccatattttctgtcctagaaattaaggatcagattccttccaccatcttgcagcctgtggagacctgttgggaacaggacttctaaaaggcaaagatgtctggaaggctatggtccaaggtcattttgccgtctgtaagtggggtctctagaaccaaagggagcatacatttcttcttaaaattgaaggtgtttatgcctgagatgaaactgaattctatttgggcaagaaatgtgcttatgtgtacaaagggaagaacaacacagtgactcctggtggtaaaccaaacaaagccataataatctggggaaaggtaattcaggcccatggaaacggtggcatggtttgttccaaattccaaagcaatcctcctgctaaggccattggacacaaaatccgtgtgatgctgtatccctcaaggatttaaactaatgaaaagtaaataaataaaagtgggtttgtgctcttgtaaaaaaaaaataagaatcaggattcagaaaaggatagaaatcctctgtgtctggcttaaactgagggaatggaaatccagggtctgtggaggggtgacactgagcacaaagaaacaaagatagttgaggaaagaaaaagagagtaaaatacatgagcagggagaagatgtcctgagagaccatatgctatcatatagtgggagagaaacagagacaaaagggaaactacctttgttcttcaggtcagggtttctgtttcctgctgctgggattccaagtactgtatgtgctttaaaactttgcttccgctcatttaaagtgagactcttttatttaccctaaaaggaacttgattgactgttccaggtttcagaaatatgaactctctagatgaatgttgcctgttaaagttttcagcttca

SEQ ID NO: 136239 - DNA, 1011 bp, Homo sapiens
gaaaaggactaaaagagttgtattcatgtattttcatacactggcattctaccaggtaatataagctcagtaaagtaaatcttatgttaatgtctgttccttgagagttaagacgactcaaggtctttatagtgctctgatacactgaaatcgatgagctgtatgttgtgactcaagattgtattcttacatgtcagctttttaatgtagtgaaacagttcttaaccaggcagtcattctaatttgcctgcatgctaggagaaattcccatatttttgcataaatcatttgttaagatttattaggccacttgtataactatattttggcttgtcttttcaattgatttttaaaatttacaaaatcgaacatagccaagaatgaaggcagagacctagagtgatgaggaaaactaaaaataaacccatttcacttgtgttggccagctgataagagaaaattgcccaactagagaaggttgattcatgaaatatttgggtacttcatccagaacctagggcatctcttttgtccatttcactatgactcttccatgatcaaggatagcccacatttttcagaaatgggcaccacctttaccaatgcttgaaatgcaagtgaatgatcaggagggaaccttgccatgggaccttgtcccagatggaactaccatggcgagtagtctgatgcttctagtgtgacacttacttggagaggcatccaagataggccttttattaaatacaggcttggccgggtgcagtggctcacacctgtaatcctagcactttgggaggccaaagtgggtggatcacctgaggtcaggggttcgagaccagcctggccaacatggcgaaacctcgtctctactaaaaatacgaaaattatccaggcgtggtgacgcatgcctgtaatcccagcttcttgggaggctgaggcaggagaatcgcttgaacccaggaggcagaggttgcagtgagccgcgatcgcaccattgcactccagcctggg

SEQ ID NO: 136240 - DNA, 1073 bp, Homo sapiens
tatatttgtgttttgtttgtactaaaatgcaaaagcaagagtgcaatttttaaaatctagaagttaggggttttgttggagaaaaatggactgatctttaaactattcagtcttactgggatttttatgcatagaaactcacatataaacatgaaataaacagtgccagtattcataggaaagtgagaaactgtaatatttggccattattctattcaacaggttttagaggcatgccaccattttttccttatatttttgcttaatttttttaaattgtcatttaattcttaaactgtcatttatttgagatggaaataagatctaaagttagttgcctttgcctgtaaaacatgtgatttgcaaattattatttttcttttttttaacaaatggaagtaaatttgtttcacgtaaatcttaattttcaacctttctggataccttaattgtaactgtcagtttgcactggtcggtatatggaaacacattgctctaccctgctacttagttgattttaaagtgaatttacagtgatgagaaatttgtgaaaaatatattgtatttcttttgatgtttcaaaaggttgcctatgaaaaactgatttgttaaaacatgctacatgtccaaaaataaagaccagaatgacattttgataattttctgagtttgtcttattttatgaacagactattatttactagtggaacaggctatccctgcccccgacacattctttttcagtgcaatttggatgtgttgcttggtctattagtaaaacaagaaataccctttgggcgatgaattactctgtcattttttgtttctagaatatcttctctctctcactcatggaatagcgagttcaattgtgcctttgtttccttacccaaataagcccttgtttttcattgccctagcattatcacgtgagacaaggaaaatatctacaaactatactgtgtatgtgagctacataattatgctttctactttgcccaacacaaatttgtaaactttcttaaaacattatgagacttgtgattttctttctttctttctttctttttttt

SEQ ID NO: 136241 - DNA, 1527 bp, Homo sapiens
gccactacgcccggctaattttttgtatttttagtagagacggggtttcaccatgttagccaggatggtctcaatttcctgaccttgtgatccgcctgccttggcctcccgaaatgctgggattactgggattacaggcgtgagccaccgcgccctgcctactcttacttttgaatatgtacgttttgtaattgttaatgaactagattcttaaatagtgttgacattgttgggactttggatagccactcactttttcagactaatagggcataatttactttattgttttctattacctgagattgtgtttatatattataagaaaatcattttggagaaaaaaggagccaagatgcatccttttgttctatggactgtagtgatctaacagttgatgccctgctgccttcatttaccctcattccaggaaagtgggctatagctggtttgaacttaaattttgcgataatgtagtgttcactgcaaaattctctgtaccagccacattttaaacaaagtggaggcagcagttagatttcgttgcttagccttttcctgtggcagtaagtgggatcacagactgatagaattttatagctgaaagagactttaggtacataggtatctttattttatagatcttgaaacttccccacgatcaatgggcttgctggttaaaaaagctgggaaaagacccagatctccaatcagctgcctgctctggagaaaacgaactcaaaccttagccaccttaaatataccttttttagaagtacgcaatgtataaacacaagtgaataacttaaagaatagtctgttgagatgaaacagaatagtccatattttgggtgtgtggaaggtaatgcatgtcaaggtctacgtcttcaagaattgtaactcttgggggaccactgccagtttgcaaacaattccactcctggaaaaggtttaagagagtttctctcctttatggagtgcatagctaatacttttcaaaataagtggattctcagtcgttctggtgaatttttttaagtttaaatattaatatctccaacattcaactttatattttcagggatcgatttgcttagtggtataatacctgaactctgtcagaaatatccagatttaaatttcataattggaggagagggaccaaagagaatcattttggaagaagttcgggaaagataccagctgcatgacaggtattgatgaatttcatgttgtcttgagggagaagatgtcaattatctctatttggttttaactgcatgcgtaccttaggtgtgttgcttctcctgcatgtaattgatatacatataattgatataaatctaatgcaaggactgttttcaaaatttttatataaataggaaacctagttaattcactattttttccattagcccaatattatttgactttggggggccattgttggaggcaccatgaaaggcacaaaaaacagctgctttaactggaagcgtttgcagatttccaggccatactgtgtagtga

SEQ ID NO: 136242 - DNA, 1073 bp, Homo sapiens
agtgagtagttgtattaatggtccattccttattaacaaattaatttcctcaggagtttattggaccagatatcaaagtcccactggaatgtcttaagtgagagagaggataaatcaaagttttccttatccaggctttttggatgtctttttcctgagcctcctcttccaagcctgttttgctctcagtcaggatttaccagcactctgcatgtgtaggcacgctcacctgcttccttctgtagtggtaatgacaacctacatttgtattctgcagttgataaagcctgttcgtggtacaatacctcatttgaccctcccaacaactgtagggtagatgttatctacatgaaattgagtctcagagagggtaagtaactcacccaggttacacagtaagtaacagagatgacacacgagttcagcttttctggagctaagttctcctcttcctccacccatgcccagccactcatatcctaggtgtagatcagaaggttcttaaaaatattgttagactgagctttaaaagcagtttggatcagagattttcattgtctgttttgtgttcacatggcagtcgaaagtctctaggttccattgcattatacccttcttagaggctccagaataaatttttttatagtggtggggaaaagcccttattcttagaataagaatatagatcattggtaatagtaatcagttccatttcttatgagatacttgtcaggattaaatgacataatgaatttaaagtatattgcctgtcatagcaagcactctgttactgttagctattatcatttatgactattgctctatgttgttttttgtttgtttgaagaatgggctcttaaccttgtacgagaaagaaaagggtgaggaagaaaatggattgaaggaattgtaggagactaaatgttaaaagtcattaaactaccttctggtttatctagaaatccaattgagtgatttgttagtagacatgaaacaaagatagctatgattttaatgagaagccttcatattcagaaaagctgcgtgggaatttttgatacatacaataacag

SEQ ID NO: 136243 - DNA, 1040 bp, Homo sapiens
tgcatggtatctgactttttctacccaaatatgggaggcgtggaaagccacatttaccagctctctcagtgcctgattgaaagagggcataaggttataattgtcacccatgcttatggaaatcgaaaaggcatccgttacctcaccagtggcctcaaagtctattacttgcctctgaaagtcatgtacaaccagtctacagccacgaccctctttcacagtctgccattgctcaggtacatatttgttcgggagagagtcacgataatccattcacatagttctttttctgctatggcccatgatgctctcttccacgccaagacaatggggcttcagacagtcttcacggaccattccctttttggatttgctgatgtcagctcggtgcttacaaacaagcttctaaccgtgtctctttgtgatacaaaccacatcatttgtgtgtcttatactagtaaggaaaatactgtactaagagcagcactgaatcctgaaatagtgtccgtcattcctaatgctgtagatcctactgacttcactccagacccatttagaaggcatgatagtataactattgttgttgtcagcagacttgtttacagaaaaggtaatgaaatgatagctataattgcattgtagacttttttccctatagaaagctgttgaatacttgtatataatgattgtttggcttttcattttgttttatggttttataatgctataaattatagcaaagaaagttctaatattggtttatatatccaagaagagcgatttttcaggatggtggtgaatgctgtcccccaacctttgatgttttaatggttactaaaaataagaataacctgatgctgttaaatttcagatctttttaaaaattaaaacagccctgcacatgtggtaaagaagtagagggcaggccgtgtacggtggctcacacctgtaatctcagcactttgggaggctgaggcaggcagatcacggggtcaggaggttgagaccatcctggctaacatggtgaaaccctgtctcaa

SEQ ID NO: 136244 - DNA, 1380 bp, Homo sapiens
tgatccacccgtctcggcctcccaaagtgctgggattacaggcatgagccaccgcgcccacccggggtttagagctcttaaacaacaatgaaattggtaaaatttaagcagttattaggatattgcttaataataatattttaggaaggggaggtttcagatcatcaacctgtttagttcaatctctcattgtttatgtctatatatgtttgtttttttctttaatggagggaatatcattggatttatatagcaagtaatttattcatgaatagaacacttggaggttactgattcacttcagtagattttgaatccatgtgggataaccatgcaggattttatactgacattttaaatacatgtctggaaaacttaatcaaatcagagcagagttattcttttgaatccagtcattgattctgaattctcatctttattttcttttgcaacagctgtgaggacagatgcccctttcataccagaccatgtgcaagtggcaaaacagcatgtgcaaagcattgccgctttccaaaggagaaaagggctgcccaggggccccacagccgaaagaatccttgattcagcgttccaagttccccatccctgtcatttttaacagcatgctgctttgccaagttgctgtcactgtttttttcccaggtgttaaaaaaaaaatccattttacacagcaccacagtgaatccagaccaaccttccattcacaccagctaaggagtccctggttcattgatggatgtcttctagctgcagatgcctctgcgcaccaaggaatggagaggaggggacccatgtaatccttttgtttagttttgtttttgttttttggtgaatgagaaaggtgtgctggtcatggaatggcaggtgtcatatgactgattactcagagcagatgaggaaaactgtagtctctgagtcctttgctaatcgcaactcttgtgaattattctgattcttttttatgcagaatttgattcgtatgatcagtactgactttctgattactgtccagcttatagtcttccagtttaatgaactaccatctgatgtttcatatttaagtgtatttaaagaaaataaacaccattattcaagccatataattttatgttatttaatatgcttccactctatatttatgctaaagaaaaagtgttttaaagaaagaaaggaatttcaaagtggaaggtgcaggaagagacacaaacactggacctcagttttgggaaaccaagggaatagctctcagaaaggttaagatcctaaatgaggctaagcaaatgtgacccaagaatccactgcgaatcactctgtgccttgagattaaattgaacttgacctgatccccatcccatggca

SEQ ID NO: 136245 - DNA, 1067 bp, Homo sapiens
tttttgtatttttagtagagacagggtctcaccatgtttccagtctgatcttgaactcttgggctcaggcaatcctcccacctcggcttcccaaagtgctgggattacaagtgtaagccaccatgcctggccttgtatttttggataatattgagtgaaatttgcctcaatacataaaaatcctttcaatatgcttcaactctaaaatctttaaaaagctgcttggtttcattattttcacgtggaagcagcattgtcacaaagttttattttgaagactgaattgtatatggagtactgtccaactagaagagaatgaataatcaggaaaagagagactattgacaaataagacttaatggagaagcattgaatttcaaagctgccagagacattagcaattgttcagtttcatctccagatttcttagatgaagaagctgtggcaagccaatttcacaaacccgatctatgatcctcatgctccccactcctctcactcccacaattttgccttgattcaaactttatcgaaaagtgagaaatcacaggtatgagctcactgagcttcccaggcagtcttgccatctacaaacccatgtcattctgtattttcctcttgtttctgacagtgatcctctcatctagtcacactacatccacttatctctggcacttatgtcaaaacaacccctctaggtcctgccttagctctcctgcatatgctttttctttcttcctgtctgttgcctctttcccccagcttataattctcccgcttttattaaaaacatgcacccacagacacacactcacatctggattcccaagtgcgataaccttgtagattcatattttcagatcgttcttagtccacagaatataaaattgattgaatgatggcaaacatctgcagatgacaatcatttacagaaatggcactaaagccatgaagctgaagctgcaggacttatggatctgggctagaagacaggggccatcaaaaatttagcttcagttggaaatcggctcttttagtgcactacatcagatccatgaaagaggaag

SEQ ID NO: 136246 - DNA, 1067 bp, Homo sapiens; identical to SEQ ID NO: 136245

SEQ ID NO: 136247 - DNA, 1067 bp, Homo sapiens; identical to SEQ ID NO: 136245

SEQ ID NO: 136248 - DNA, 1080 bp, Homo sapiens
caaatctgtttgaaaatctcaacttaagatttcaaatccactgtgtatactatttagctgttaagtttctcagtctaagaagaacacgttttcctctagaaataagcttaacccagtacctatgcatcgttcattaatataatcagattacggcctagatgtggaatttatttctgtttctattttctccagctttttaatacagctcagacagtcatatacagttgtacacgatgtgcactgcacaactctagggtgctccatgcatatagacatatctgtatgtgacagccctaagtacaatgtggtagacactctggacatttggtaaataagtatctacatcctcactcttctctcattcacattggccttctggccagcactatttctggtttatttaataaacaattcttgtcccccagaaattctgtgagtcttctgaagatgctggggaaagccagccttcataaatcttttcaatgtcactaatgaagacatgtcactattgcaacaaaggaataccaggccatagtaggctttcacaacttttttctgacagaatttgtttctttctgctttatcttccctgtgtactgtctttttttatccaccctctttcttaattacactggtagaagaatattggtgggtgatggagtcattcacattctgtgtaagactagaatcagtccaagatccacaggaatgtgggatacttctttcatgagaagccacatggctcacaagacttctttacatttgtgttacttgccttctcctgaaattgtctctacagtgaatcaaataacaaggactgaggtgtattttccatatttaattccaggaagcagtcccactccttctccctgcccgatttccagttccaaagtcatgtacagggaagtccattgactttgatgttggtcaaatggcccagcaagcttttgtccacttttctgtcagacacagtccttggcacaaaagacatctgaaatacttcccattaatttcttctttatttatgaccttgtagttaagtgtgttgaattatatgcttctatacacatctgttttaat

SEQ ID NO: 136249 - DNA, 1049 bp, Homo sapiens
aaaaatgatgctcttcgacttgaaatttttataatcttctgtttattgtcaataggtgctgctgattttcaaaaaatgacttagaatcctcaaataagtatacagccttatatgctgcttagacaccaaagctatgataagatttgtcagttctttgtatcagatgggttcaattcttgacatcagctaatgttataaaaataactacaaaattggttgtaatagaaccaaatctaagactctttttaataaaaaagatcaccattgctggtgagaaacctatactgaatgggtgagatgccattgcatttatctgaagtttcgtctttataatcaataatcatatacaatcctagtcaagaaactcatcttacagtccttggggattgaacactgtgaaaataaacttttactcttcggatgtgcttggattttgttttaaattaagaactacagaaatatatatcatttctagtggtagaggaaaatattgccacccagaactttctgaatgtctctttctgccctaggtccatttgtgatgaacaccaatgaagagatttctcaagctattcttgatttcagaaacgcaaaaaatgggtttgaaagggccaaaacctggaaatcaaagattgggaactagtggaaagcggaagagcaggtcttgatgtgtcctagaattttgccatttctgagattgagccattgaaggcattccatttctaaagcttatttagccggtgcttctaaagaattccacactaacgtgataacatggtttttgtaacaataaatgtaggatatttcctggcacatgcaaataaacctaatcattgtttctttaaaaatcagtgtttttcatttgagatacctaagttactaagcttctgtttaaaaagtcgttttgtgtatgtttgcctttttttgcatgtatggatggatgtttttattatttttgtgcatgtgcaggttttaaaaatcatatttgattgctttctgtgtgtcattggcagcagatgcatgagcatctgaggtcccttcttaagcaa

SEQ ID NO: 136250 - DNA, 1081 bp, Homo sapiens
agaagaacaggtgcagccaacatagaaaagagtcagctgaaaccatcaattcactggcaagcagcactcctggctccagtggcatcgttctgttatgtgcaattctgtaattgttgctgtgtataagcatagcctgagccatcaaaaccttagaaagatttctatgaaaaaattgatattaaaaaatcagcatttaaaggcagcatgtgtcacttatatccacacaatagtagaaagtcccctttagattacagcagaaaagaaattctgaaggtttgaatcttggctttactgcttgttagctgttgtgactttggacacgtttgtaaagccctctgagcttcagtttctttgtctgcaaaattaaaataatactgccaactgcaagtgattgttagaaagaatatttgagattacgtatattacaagtctactccagattgagcatgggggtcagtaaattatgtccaataggccaaatccaaacctttttcataaagttttattggaccacagccacacccattcgtttccatattgtctataggttcttttatccaataacagtggaattgagtagttgtgacaaataaagcctaaaactctctggccctttacagaaaaggtttggtttactacgttgtagatgctcaataatggtaactggaaagtttatgaatccaaatatctaatttgatagtcataccacatgcatgttacctaataaggatttatacagtagacctgaaggcttagggcacataacagtttctacaggtagaagaaggctccaagagaccctgactcactcacgctccaagccagtgttatcctcacttgaacctagcattagcctgaggatttgataaagaaggaagatgtgactgcccagtgccgcgccaatcccatttccactaaactgtggtcaagaatgagaagctgattttttgcctggctttttttctggctctgttcttcctgcacttttactactcttcctttctgtgttctccaccatcacacccatttgactactggttgaccagtagtatgggcagtatctcctatagtggccaatctc

SEQ ID NO: 136251 - DNA, 1081 bp, Homo sapiens; identical to SEQ ID NO: 136250

SEQ ID NO: 136252 - DNA, 1081 bp, Homo sapiens; identical to SEQ ID NO: 136250

SEQ ID NO: 136253 - DNA, 1050 bp, Homo sapiens
tgataatttttctaactatttttaattcttataaactttataatttacctaaggaaacatgagcacataatgccaaggactttgcttatcaattaaagtgtaaatggaaacacacgcaggattcatctccttgtcctttttcaaaattgaaaacaaactagtttcaggctttaataatagcaaatataattaaccaagagattcaagggaattactaagtccattatttctcaaattaaaataaatgttgtggtgctatatagttaaccaaataagtaaccatataacaaatgtactataatgggtattaaattagtgtgtcattggttttgtagggcccgatgatgcacaacaaaaaatagaacctcatcacacagcagtgcttggagaaggtgacagtgtccaggtggagaacaaggtaagtatgttattttcctttaactttcttaacatgtactttctactggtttccaagaaaatgcctaaatgttgtggataactgaaagtttttctctcttccttggagaagaaattataccagaagtttatcatgtcttttcattaatttctgctatttctatgggtttattttaaagttttatctttattgattctttatcttcagaaatcatataaagtccctattgtttacccctggaaatttgaatctggaagcaacacatctttgttgtctcttaattttctttctttatacaattgatttattttgtttttagcataagtgaaaatagatcagccctatagaagtagaaatataaatctacatgcatactcacatagagccctttgaaaagaatccccaccttggccgggcgtggtggctcacgcctgtaatcgcagcactttgggaggccgaggcgggcggatcacgatgtcaggaaatcgagaccatcctggctaacacggtgaaaccccgtgtccactaaaaatacaaaaaattagccggacatggtggcaggcgcctgtggtcccagctactcgggaggctgaggcagaagaatggcgtgaacccgggaggtggagcttgca

SEQ ID NO: 136254 - DNA, 1053 bp, Homo sapiens
aatcaggttagttctcccctttactcctgaaagccaactgttaaacattatccagcacactacttcctctgggacagaagttgttaatctttttactgccatggacctttctgacatctgtgaagcctcctgcctcctcaaataatgtttttaaagtcagtgcagttatgaaaatgttaaaagaacaggtttcggatatagctatatgtgtgcttctttaatgacatttgacataacatgatctagtagcaggcctgctctaaattttaagtaataattaacataaactatattttgagatatctacaaaaccataatgtgatatgaaaatatctatgatttctgctggagacaaagtcatcagcccagctaatactactgtggcttgttggctacattcatgattgaaggagaagatacgtttcaatttaggtgttagtgaaagtaaacatgtaatttatctcctatcaaagtccacccatgccctgaattgtatccatagaccccccttgggaggacattgactccacgttgagaactcctgctctgttagaatcctatttcatgtttgcaagcatcagaatgaaccctgctgcctcatattggttatttccaaagtggaggtgagaaggtcttctctagaaaatatagttgtttggactccaacaaatatgtccaaaattcacaaattatgtttctgtttacataataattgctcaagctattgttttcatttaaataagcatttccttattgattattcagctccaacttgtcacatgaatgcccttatttacatcccaaaagggcatgcaggtgtatctcccaagacattttatgggctgctcattcaatttgaaaccttctctctcctgcccattaacatatcagggtttttcccaactgcaagacctaatccaaatctcaccccctctctacagccttctgtggtgcactttggcctctccagtctgtagccttctcttgcagaaccactcttgcaatcttcaagtcactacattcttctgctcctagtgagaatcatgttagaat

SEQ ID NO: 136255 - DNA, 1053 bp, Homo sapiens; identical to SEQ ID NO: 136254

SEQ ID NO: 136256 - DNA, 1053 bp, Homo sapiens; identical to SEQ ID NO: 136254

SEQ ID NO: 136257 - DNA, 1191 bp, Homo sapiens
aaaaaaagtcttgtagtagtatcataagtttatatgtacacagcttaaactatattaaccatctggaagagatgatatatcatttgtttttatgatcttctgaaaatcctgagaaaaacatagtgctttataaaaatagaaaaaaacatttttatggaggtagtgctcccgacttatgatttcaagagcaacaaaataatctacacaaatggaaatgaagaaagcacatgaattttaaggtggtaaggataacagaaatgtttgtgcagaatgagaaaaagcagggagaagcaaactttctgtaaaaggacagatcacaaatattttcatctttgcaaggcatatagtctcagttgcaactacttagccctgcccgtgtctcacagaagcggccacagatgatacataaacaaattgggtggctattccaataaaacttcatttatggtcactgaaatgtgaatttcatgttttttcatgtgtcatgaaaggctttttttaagtttgtttcaaccatttataatagtgaaaatttttcttagcctgtgggctctaccaaaggtgacagttgattttggtttaaatgaattgcagggaatgaaggggaaagaaattaacgagtaattgccaaaacctgttttaagcagtagttagagccttgtttcctgacagacctttagcctgagaagttaacaagtgaaatgctctgcagttctcggggtaagaatgacccacacatccacttgtttttcttgagatgaggcaggattttcctgagtcatttctatttactgacctggtcccccctcgtgaccatgggccacagtgcaaaacatctggcaagggatgggtctgtagccttggagcaaagttgcatctgtctagaataaactggactgtgaagagaatccagctcacacaactggcctcttgggactgtgctttaaccagtgagtggctggctaaatgacctcatttgaattttatctccttcccttcctcctaccaacaccctaatgggggggcggttaatgagaaaaacaaaagggcaagaacaaatcatcagggaaaaagaaatgacgaaacagaaatagctcttgaatatgtactgacttataaaatcaatagagaaaatccagaaaatgttttctgacttcactgcctcaattttgtcttgcttataaaactagg

SEQ ID NO: 136258 - DNA, 1029 bp, Homo sapiens
aatctaggtgaatggtgtacaataattctctgtagtatttttgcaactttttgatatgtctgaaattattttaaaataaaaattaaaaagaatttggtggaaggaggagcgggagggaagaaccaggcaggtctgcctcttgtcctaggaggccagggttgaggtcctagatgaaggagttacctgccaaagctgatgtggggacttccggtggcgggggggaggttgcgggtatgggaggaggatcttagggaccagggttgctttgcggtctggcaattatgtgatccagagtttgtgaagggttgcaatctctccttagcccagttgcccttatctctgttaatggtgttggtgtgtcaccaggccgtgtttttctattttttctgcacatacaggtgtaaggaatacttgtaagttcattggaataatgaactccaagactgaggcagaaggaaaatgacccgggttaaggcaaggaatgtaggctgaggaaagctctcactagggacgtttgcaagaattaggagcctctctggaaatgagagcaactgccacagaaaatgatttacatattttttaaaagttttgggtttttaatgtttggctaaaggaggtctgacttaaaatgcgttgctgacttaactgtcctaggaggccagaacgaaaatgtgacctccctcccagctcattttattcatcactgcccaagggaagggaagagcttttcagctgcaaagagacagtagcttgcagaccatatttgtaggagaaaggaaaatgtagcagggtgtgaactctgacaaagcaataaaaattgggggatgacatcaattcttggtgcaggacataaaagtgggaggagaggtgagggaagaaagaaagatgagaaggacctgaaaatctgacaagagatctcttctgtggctgttgttaaacatatagtaagcattcatgaaatttggcatttgttttcttttgcagcaagctgaagaaacaaagcttagtggaaattaaacaaattaacag

SEQ ID NO: 136259 - DNA, 1029 bp, Homo sapiens; identical to SEQ ID NO: 136258

SEQ ID NO: 136260 - DNA, 1029 bp, Homo sapiens; identical to SEQ ID NO: 136258

SEQ ID NO: 136261 - DNA, 1061 bp, Homo sapiens
cctctccctgatactgggaaaatgcatatattccaagggaaatccagttaagggagactgaaaacgtttctcatgaatcagactaggttttatctgagttccttcccatgaatactatttgaatcgatttttaccatctctttatttccttcaggctaggcacgtttctcttgggttgtgctaatcttgcagaaaacagatgtttcatgcagtgatgatttggaaggcagttgatatcaggaattgagctggacggtgcatcacttacaaagaatctaatttgtcgagtttctgacagtaccagattcctttcacattggccacacgttttttatattagatcttggctaaaataagagtaagtagttttttaatggtgacttttaccatttcttgcaaggcgcaaggcaatctgactttccttttgctgtaaactgatttacagataacactgtttgttaccattaattatgaaggacataaatctatatttctaggaaaatatcagtcttttccaagaaacatgtgccttcttgtcctcatgtcccccttgtcttctgactgactgtatcacagtttggccctcaacagccactctgtttattttcctcatttccttttacagcacctttgcctctagatacttaaaggcaggatctggaatgttaaaaatggagagctgttatggaaaaaacttgattttatgaacctttttgcttttcctcaccttataacttttcctttacagtatatgtagatcaataaacaaaatttatttagaaaccatatagtctacccctctgtggtaggcaaaataatgtccccccaaagatgtccacgtcccagtttccagaatctgtgtatatgttatgttccatggcaaaaacgactttgcagatgtgactaagttaatgctgctgagatagggagattagcctggatgatgcaggtggaccctgtgtcataaatgagaatctaaataagagaaacagggagacagggagtcagagtgagagaaggacatgtgacaatagaagcagaggtcagagtgatgtgattac

SEQ ID NO: 136262 - DNA, 1061 bp, Homo sapiens; identical to SEQ ID NO: 136261

SEQ ID NO: 136263 - DNA, 1061 bp, Homo sapiens; identical to SEQ ID NO: 136261

SEQ ID NO: 136264 - DNA, 1046 bp, Homo sapiens
atggccaagcagcttcccaaagtgtttataccaagttatagtcccaccagcagtgtatgaaaattacagttactacacatccgtgccaagcttaaggttatgtgctttttcattttcatatgcattttaagtttataaagtagactggaaccactggagctttgtgataaacaatgagacatcataaagtttgtagcaacagttctaatcccttgaattttagtctatgccaatgattcaggatggtattatattaaattagaaactctgcttaactcttgatggaataaaagttactgtttataatggaaaatcctgcaaaagtttgcctttcttacatttggagttgtggctttttcaagcgagcagtgtcggaccatttttgttagccagagggccaagtaagaaaaaataaaaaatatgtgcaggccgcatttttaaattccaaaatggaaatggctttcttgagacatggggaagaaacatacatttggttgtgagataacctgccatatcaagtggaagactggaggtgggaaagttggagcaattattggccagtaaaatgttactattggactatatttgagaactggctgtagggagacagctgtcatcctgaaattagcttgtcaaccacattgtaaagctaggagggctaacttccagaccaagacctttaagaggggctgttttagcagcccacctcggctttaacacttccctaggaggaactatatatataatggatccaggtccaggcctattacagaagggccagctgaaggaaagaagaaccttattcttagaaaaaaacactgatggtttccttttccttttcagtccaaggtttacactcgcacaccaaccttatatttggacttcaaattggacccaggagccaaacattcccaacctatccctaaaggtatgatgggttctggggtttagtagtcacgtcaggaaaaaaaaaagaaaagaaaaaaccaacaagaggctgttttgcctggaatgtgcttgtttctgaaactcagcacaaagttcta

SEQ ID NO: 136265 - DNA, 1066 bp, Homo sapiens
agcaaatgtaactaataaatattagaagccttgtgaggaatattctagcattggttaatagatttgctgactcagtcttggaacacattacccatggattggagttaacaaataggaaggctctgtgttagcctatttgggggccatttgtggttttattatactgttgcctttatagggttgtagatggattatttatataagacatgggaatttgttctttttctggttttaattttccaagaaattagaacatctgtaacccaaattcaggcaaggatgctgactcaaagggtgaagaaatcaaagtccagtttcacaattaacatgtctctggttaaatttcagtactgtgagtccccgtcatcatctttattctcttcccctttagtccttctttcctcactactcttcccataaataaaaggtgagaaagagaaggacaagagtattactactgattaaagggctacttgaaaaagaatactatagactgaatttggctatgtttaaaattcttggtcagctagacagcttgatgttcaagactgtccacagtcttttatggttgatagaagttaaaaatgtttttttggccctctctaactcccaccctacaaagagtcattggcattttgcctaagagttccttgtcttctctttgtgtaacacttcatgtatatgtcaaaatatgattacagagttttaatccttcccacgatacctttggcactggggatggaaactaatctttcccattgcttatcagaattgtttaaaacaatcaagaattcagaattcaaagtgctttggattggatacagaagacatcattttgttgaagagcatcagcctattctaaaaatgagttagaagtttgctttaaacagtatggtaaatctacttttcacttcctcaaagccttaccatctccaggagaaatgagaaagtatggctccccatgcaggggcaatgggatctggcagtgagtctcctgagtgtgtatggtagtgcagagactaggtctgtgctgatgcatttttatccccagtgcaaagcccaacag

SEQ ID NO: 136266 - DNA, 1066 bp, Homo sapiens; identical to SEQ ID NO: 136265

SEQ ID NO: 136267 - DNA, 1066 bp, Homo sapiens; identical to SEQ ID NO: 136265

SEQ ID NO: 136268 - DNA, 1013 bp, Homo sapiens
aggatccagagcctccgtaggtcacttaggtcaagcccagactctggagcttctggaactcccaccactgagaggacaatcaagacgatgtcagaacttgacagtcggctaggacaggccaaggcatctggcgatgtcaacagttgcaacaatgatggcacctacaggtctccataagaggccaagggctgaggagctataatgaggctgagcgactctgaggaggcatgtaaaatgtgtgcaattgaattctcacaatgagatagggaactgaaacatagtgaggttagcaacttgcctagggttacacatatagtaagtgacagaactgggattctaactggatggtctggctccagggtctgtgctcttaatcacatgctcacataggtccttcaccagtttggcacagcccagtagaaatcagattttttgttgagagaaggttttgtcttggaaacttttaaagactgaaaaggcttaagaggagagatacatgttgaagcgttcaaaaggaaaaccttggcccatctgtcattttgccaaggatctgaccactccctatttgcacaggaattcatgaatgatccctgacctgaattggggatatatactgatcccttgcatagtgctccagcctttcagcagatctggtcaattcttcaatttttctgagctggtgctgaatagcagggaactacttctcctcttgtttgtggatacacaggaggccatattcaatacttttaggacctatttgaatactgtatttagatgggttgatgtggtaaatttggggattggggagttgatcaaggaagagacagtttcatgagaagcagtaacatacaaactttatttgggcagtgctcagacaaggttgcgtaagagggaaagttcttcatagctggagattttccagagacagtggcacaaggccacccctcagaaaggaaatagggcaagagacctgaaggagtaggggaaatcagagaggaggcttacatgtccag

SEQ ID NO: 136269 - DNA, 1013 bp, Homo sapiens; identical to SEQ ID NO: 136268

SEQ ID NO: 136270 - DNA, 1013 bp, Homo sapiens; identical to SEQ ID NO: 136268

SEQ ID NO: 136271 - DNA, 1016 bp, Homo sapiens
taacactgaatatagggtatgccccagaaacttcattcctagtatttattccatcaaaacttcaccaagcagacatatgacagtggtcatcccagcatcgtgagtaatagaaaggagtcagagttgatataggtgttcaccactgagagaatgaataagtgaaatatggtggttacatatgatggaatatggtgtagccgccagaagcagtgggctgtattcacttgtagttattagctctcaggaaaaaaatgaggaataaatcagaaaagaaagcagtttagcacacaatactactcatttttcaaggacacccatatatctaaataaatacactgtgggtagattggaaggatgtccattacatatgctcaactgagagccaatggggaatggtcttgagatgggggatgatggaggaaaataacacaaagcaagaggggtgcccatggatgtatgatgaccctgtgccatggaatatagtgtacagccaattcaattccatgaacccagggccagagagacagagagagagagagagagaaatttgtgtctaacaccagcttttaacttggttggtgtaggtgacctcctgtgtggctgatttaagggattctaaaaagcccaacatatgacagaaaatctcactgtcatgttattaaaactgtaccattagagtccatccttcaacagtatgagggactgaaaggagcataggctgtggagtcaagcacacctgggttcaaatctcagctctgaccttgggaaatttgttttgagcttttatttcctcatctgccaagtggggatgataatacacagtccttgaggtttttgtagggtatttaatgtgcctagcaacatagagggtacttaataaatatttctttccttttcccttatctatcttttcttttcccacattcccttttatcattagtctttactgacagcaaatctctagaaattcttgggatgggaaatgaaagtggccaacatcttttatgggcttatga

SEQ ID NO: 136272 - DNA, 1016 bp, Homo sapiens; identical to SEQ ID NO: 136271

SEQ ID NO: 136273 - DNA, 1016 bp, Homo sapiens; identical to SEQ ID NO: 136271

SEQ ID NO: 136274 - DNA, 1057 bp, Homo sapiens
aggaggctgctcttttcttctcaagctcaggagaacaatattttgaagtagcattaaaaaaaaactattaaatcatggaaacaggtaacatatacgcgcacactttttttgcctttgaaatattccagcaagttcatggatctagctaaaaaaaaagaaaaataacagatactctcctaatggcagagagtgtgagaggggcactgggtttctgacatagggagcttgagtaaacaggctccagctgtcccagagagcaagcaaaggaaaaacaacacttgcttgggaaggaattctcccttccaaagacctctcttttaatttattgtatttataaatcagagcgctctgtgatagatttaaaaactggatatttaacaaatgttccctttggggtgagggtagcagggataaggatggacctgaaacttccctcagtatgtcttttaatttttacttttgaaagatagaaatgcttacatatttaaaatatcaagttaaaccagaaaagaaaaaagaaacaagtcttaaaatcaaaaacaaatagaaacaagtgaagaatctaaaattggtataaagatattggcaacataaccacacagagaaaacatttatttgaagggcttttaaacatgatgtcctggctgtatattttagtgggatatattctaaagacaaaaagaacagcaaaaaatattttaaactttactccatagtctttgttgttagtgttggttttataatttcataacaagttaatgtgtattatgaaataaaacaaattagtaaatttgttaatgtttatagaaatcaagattttcagtataagaaaaatggatacaaatataaaagagctaagaaaaatactgtaatattcaatgttaaattcaacattaaatagacattttaaaacattggatggccattatttctttgaggcagtttctggaaacaatatgattttatcattttaggagtccaagatttttgatgatgcaatttatgtttctttctgataacaactccattctccactgattatttccattgatttttt

SEQ ID NO: 136275 - DNA, 1057 bp, Homo sapiens; identical to SEQ ID NO: 136274

SEQ ID NO: 136276 - DNA, 1057 bp, Homo sapiens; identical to SEQ ID NO: 136274

SEQ ID NO: 136277 - DNA, 1086 bp, Homo sapiens
atctattaaataggactttttgtgaagattaagtgactttttatacattaaactctcagaatagtgccagacacattgtaagcatcacataagtggcagttattattttgattaatttacggtaacttgaacaggagctgggctgagatttatgtctgccatctaagctaaagggatttgctgtgatttgggaagggttattaacctgcactcaagaaaggacaccagtaagagtcattttaaagatagggagcaactggtgatttcgttgtgggtctcataagaaacatagttttgcacatctgaagccttaatatctgattaacaaggaatgactgggtcttaaaaggtctagacctaccataaaaagaaactgaagattgtttcgcatcaggaagacaattttaggttaaattacaaggtgaggctgagaatatatatttcaagagattagtgtatttataaccaatacagagtcaacaacaacttccatctctgcaactaaaatacctagaaaatggaattagcaataattccagcacttcttcaactttaatattcatgtgaattacctgagggtcttgataaaatgcagactctgattcagcacatctgagatggggtctaagagtctacatttctaacaggctcccaggtgatgccaatactgtggtctggggaccactctttggaacatgcataatgggtatgggatccaagacacaggagtttacccatcttgagaaatcatttgattaagctcctatagaagatgtcaaatgatctagtactgtgaattttggcaaatcttatttagcttttctggacctcagtcccgacatccacaaaaaaggtgaggggggttttgaataagatactgtcgcttttatgagcaacaaaactgcctttttgatactaccaagggtagctgtatgcctgtttcccaggttgtatgtgtctgagcatttattcaacccttggaaagccaagacagaacaagattctgccaggacagcatggtctaaagtgaaggctgaacagggagaaaaggttaaaatgggatagtttgaatagttcctgtcactt

SEQ ID NO: 136278 - DNA, 1086 bp, Homo sapiens; identical to SEQ ID NO: 136277

SEQ ID NO: 136279 - DNA, 1086 bp, Homo sapiens; identical to SEQ ID NO: 136277

SEQ ID NO: 136280 - DNA, 1743 bp, Homo sapiens
gttgatttcaagtgaggaagcacaggaagcatttgcaaaactggaaagggccccagcaattgtcactgatgtttattattcccctcgatgcccaggggctctgatagcagcactggtaagatgtctcacttagtgatggtgttgtaattgttccacctatagacttattaggagcttggttacatttccctcttgttggttttgtgtttgcagtggatgactgcgggccggggcattctgcacgctgagatgccttgctcagaggagccagcccatggcctacaactgtgggttaatttgaggagctcagagaagatggtggagcctcagtaccaggaactgaaaagtgaagaaatccctaaacccagtaaggatggtgtgacagttgctgtcatttctggagaagccctgggaataaaggtaagccaggctattgtgtctatttaacctgaggcatgcagtgacataaggctggccccttctggattgttagctctcactaggtttaccaaaattcatgtcccatgggatggacttgattcatagttgtcagaataagtgcaacctaagaaaactcagaaatttttcctgcctacaaacccatagagttaggaaaattacaagaaagcaagctcatataaagtttggtcgaggagcaattttcaaagtatgtcttaatatgtgtgctgatttagcctaattcctttcacttatagtgcaattttatgctttaaattatagctccttagtacagcaggattgctacctttaagaaacaaacaaccaaaaagcaagactaaactccacttcacaaagatttatgtaaattacttatgtccaacttagtaatgtaaggaaagcacactactacattgcagaaagtttatttttaaattttaacttgacaatttgtccaacccatacacgacatgccctgtacattcttttcaactgggactttatattatttggatttatagtctcacctttttgattaaataagtcaatttaggctaaagattatggacatatttgtgggaggaaaggggtgcggcaaatgccatgttaattgcacaccagaactgctcctggggagcataagattcctcacaccaaccaatctgaggtagtgtgttttcttaggtggggtttcccagaagcagaccctgagatgaagattcccatccaagagatttttaagtaagcgttcctaggagaacagtaaaaggaatcaggacaaattaggggaggaagtgaagcaaggctgccatctcaggcagagtcctaaagagggtggctttaccttgatcctgcaagggactttgaaagatcaacgtgcctcagagatgtccgagcccatccctggcaagggagccgggctttcatgctcccttacccaatggtcattggttatggccattaactttgaagtggaggcacagaaatggttaaaagggatctgaggggatctgggagaagccttgacatcgggtactacacatggaacctggcattgagtgcatcaagatagtgggagttactctgccattctcccagtgcacaaccagcacttaaaactatctaaaactaacttctgtaaattttaattttttgatgtgtaccatcagggataatggcttggcagtggctactaaccaaccactcaatgggatgcatgggatggttaacagattggtcatggttattggttgggacttaccagtttttgtatttcctgaacta

SEQ ID NO: 136281 - DNA, 1053 bp, Homo sapiens
agctatcccttctaacagaaggatctgggagggcttcagggaaaatttgcccatttagtaaggccttaaccaataagtaagatttgactctctggatagtggaggtaaaggtgaaagtcgcggtatggggatatagtagaaacagtgagtcatctaatcgggcttacaaatgggatgtggaaggatgggaggtggaggagtattatagggtctaaaattttaggttgggccattattggggaaggcccaagcttcgaagcccaagcttgatctctagctatagatgaatgaacaatatttcacatcctgaaactgtcaacttaacacaatcacgttaaaataaaaccatctttagcctaaaagttctgctttttgtggagtgctgtctatgtcagtggttctcaactggaggtgatttgtccatctgggtcatatggcaatttctacatttgatcttagccaaaagcccaagaagtgactcatttgcaatttctgtagtcatttctgagtgtcacaactggggagtgctactgccatctagtgggtagaggccagggatgctgccaaacctcctacagtgcacaggccacttcccacagcaaagaattaaagcctcgtctgtgttaacaagcgtaggtcacatgagggagagtagaaatttaactgaaatattctttgaaagtagtccaaataaattcccaacaaatttccctatacatcctacccacaccacattgcaattacaaacaaaaaccattcatgtcttaaaggctacattccaagagtttttaagtagaaaaattgagtgttgggggggtggggggccggggtgcgctgggcgcggtggctcacgcctgtaatcccagcacttttggaggctaaggcaggtggatcacttgaggtcaggagttcaagaccagcctggccaacatggtgaaaccccgtctctactgaaaatacaaaaaattagctgggcgtggtggtgggcgcctgtaatcccagctactcgggaggctgaggcaggagattcgcttgaactcaggaggtggaggt

SEQ ID NO: 136282 - DNA, 1053 bp, Homo sapiens; identical to SEQ ID NO: 136281

SEQ ID NO: 136283 - DNA, 1053 bp, Homo sapiens; identical to SEQ ID NO: 136281

SEQ ID NO: 136284 - DNA, 1115 bp, Homo sapiens
aactcacagcctcaagggatccatctgcctcggcctcccaaagtgctgggattataggcatgagccaccacgcctggcctgattggccttaagagactaaaagaagtagattggaagctgccacttgaattcagcagctaaaggatttagaactatttgaatgaaaagaaattctcatgtggctcaaaaacgttaaaagattgtcaatttgatatgtagagagagaaagatgtgaatgagttggggacttagtgaaaacattttagaaaaatcagagttttgtaaattagatcttgtctaccgataacacatgtttattttacatgctattgaattcctgctaaatgtttagagaatgttaggaagtttgacgaggactaatacccagtactgcaaataacactttagtacaacagtctaatgcaagatattcttactttttggagggaaagtgtgtcttacacatatcaccaattttctggcaagataatcaattcatccttctgactcttacctcaatcagccccctagcttcttcagtctctttcttgtgctggctttcttcctatgtgtgttcatatttcatggattggtgaccagaaggatcaaatgggcaataaatatgacaaatagtactgatttggtctgaatctatgtgtcttccctactcctaattcctatcatgaaacctaacactcaatatgatggtattaggaggggaggcctctgggaggtattaggtcatgagggcagaaccctcaggaatgggattaatgcccttacaaatgagaccctggagagctagctggctccttccaccatgtgggacacagccagaaggcactgtgtctgaaccagaaagttggaccctcaccagacaccaaatttgttggtgccttaatcttggacttcttagtctccagaactgtgggaaatagatttcagttgtttataatccagccagtttatagtattatgttatagcaactcaaacagactaagacagaaaattggcactgaaattgggatcattcttccattgtcttgaacaataggtcctggtttctgttttgatggctgacaaggctccttattaaatggtgaaatggtcattt

SEQ ID NO: 136285 - DNA, 1115 bp, Homo sapiens; identical to SEQ ID NO: 136284

SEQ ID NO: 136286 - DNA, 1115 bp, Homo sapiens; identical to SEQ ID NO: 136284

SEQ ID NO: 136287 - DNA, 1043 bp, Homo sapiens
tccctggttcaagtgattctcctgcctcagcctcccaagtccctgggattacaggcatgcgccaccacgcctggctaattttgtatttttagtagagacggggtttctccatgttggtcaggctggtctcaaactcccaacctcaggtgatccgcccacctcggcctcccaaagtgctgggattacaggctgagccactgcacccgaccaagaggttatttttcaaactctgcaccaaagcttctgtctctaaagaaatatctcataaactttggacccagagctattttagcatagtgtctacaacagcactcaatattcacagccgcaagtgttttgactcctttgactgcaaatgtggagatagaagaggaatatacaatgctctcactgagcctttctgtgatttaataacaaggaagagatggagtggggctggcccacacccttcatcacagttatacatgggccagcctagccagactggaatttgaatggctgagtagcataggtgctagggagtggttcctctgtgctcccagcaggagggaaatccactactaatctgcacttgcttctatgcccactcctgctaccagacactcctcggtgtaatgtgattctccatgggtcactcttatttttattttgttaatgaagaatttcaatcatcatagaaaagtagagaaatagtatgacgaatctccatgttccttgcatccacaatgatcaactcatggcagtcttatttcatccatattatcatccatttctcccctcaaagtattttgaagagaattccagccattattttatttcacttataaatatttcaatttgtatctctaaaagataacttgaaaaaaaaaactacaatctcattatcatacttacaaaaattttaaaaatcccttaatatcatcaaatagccttgactaatcttgttcttcactgatttagcctctgtagatgatgcttttcattatcaaggtctctagatattgaatcaaggaagtgggccatatagtcacagctcaagtcca

SEQ ID NO: 136288 - DNA, 1043 bp, Homo sapiens; identical to SEQ ID NO: 136287

SEQ ID NO: 136289 - DNA, 1043 bp, Homo sapiens; identical to SEQ ID NO: 136287

SEQ ID NO: 136290 - DNA, 1447 bp, Homo sapiens
cctgggtcggggacagaatggggactgataggggcgtaacctggaatgacgaaatgacgtttgctgcgtagggacgtggctaaacgtgagggggcgtggccaagatggccgcgtgcgggatcctcgggtaccgggagcgaacgaggaggttctggctcaggtaagtcgttcgggtaagggcgggcggcagtaaggagcgtgggcagcagcagggcgtggtctgcttgagagggcaggaactgtgccacttgccgcaaacatgaccgcgtgccgctatcggccctggagccagagaagcttttggtgcggcgaggttggccggggccctggcggggcttctctgaggaatgggagtgggaggctggcggcggggaaatagccacttccccactctagccctctttctccgctatggggatcaccagacatccttttaggattctgtctattaaaaagtagaacagctttcccagagacattgcgggatgagaggagtgtccagaaaccaaggagcagcaagctgggactccctcgggtctgcattgttgatattcccacctgactatgctaggggctatggacagacacagccaccccagagtagatcaaaagcacagttgtgtcccttggacaaatctgagtttttctgttgtgccttgccccagagccggaggagaggaacctccaaaatgcagacattcttggtggctgggattctgtgtgatattcagcgttaaatgctgctgctctgaggctgctggaaacgcgttagtattaatatctgtgtacttctctcacatttacttttgctggaaaagcttgggaaatgacttaacgaagatgcgtaaaccttaatttgtttatatgctccttattagccactgaataccacattgctttctgcttccccttcttctttactgataatctgaccatttccactatgcactttgaaagtcttgctggagtatggagaatagtcagaaatctctggtaagatgctgccccgcgcatctctcagaggagtcactattcatagcctgcatcagagttcacaatgaaccaaagttcaccccacctcccctgtcttcagggacttagtgaaaagctgcactgttcttgaatattttggaaatgaaaaactttctgggctattttaaatcagtacctgggctggaattaaccgaaaggcgaaacagcaagggcaccattctctgtgcctatacgtagctgccctgtgcttggaaccaagcaaaaaggctgccactgctcacagttgcaatggaataaaggttgagtgccttgtgattgcatatgaatattaaggaaatctgatggaaagagggaaattcatcatgtcactggccacactggggcagttagttgcaacacacaaatcaggtataatatattttgaaacctttggcaacctcagattgggatcaca

SEQ ID NO: 136291 - DNA, 1034 bp, Homo sapiens
gcctttctcatctcgttcccctcctggaaatacaaggtactatctgcagctggatgttgcagggattctccactgtggcacgatggacattggggatggatcattctgtggcgtgggggctgccctttgctcactggatgttgagtggcatctctgatctcttgccagtagcactccccaaatgatcacattcagatacgtttcaagacattgctaaatgtcctctgggagggagggcaaaataaccctgggagagaaccgctgagatgataggagagatgtctgtgatggtggagagttgtgtttaatgaattggctaaatatatcttttgggtttttttaatatattttccactattcacaatgaatttacatagttttcaaatactggcttgtttcaggatttgaggtttctcagattgtgctcttcgggtttaccctttttgaacctccacgcacataagaaaaggaattccgttaataatgttgatttagctggatccattgccttgaaagtgcttcagaagaattttttattacaagtttattttgttttatcccaacattgactatgttctcattgaaatgagttggtcggggtcataacaaatttatgattgctgggtgtgcccatatcctacccagactggcttattccgaaccctgggactgcattctaaggcttaacgtggaaaaaatttagtcatatttatctagttactaacgttttgtgtgagtgtggggtttttgccttgatatttagtttgtctttatttgcagaaagttgaaagttaaatgcctaaagtccaatcagtctatgccattaggataacttgctgcttttagtgccaacagaaaccaaatagtggtcccccgaggagatggggttcacttgactaatagctatattatatgatgtgttcttgtttctaagttactagaaaaacacaggtggaagtcaacatttgattttgtttgtggtatgtttcactgttccaacctgttttccccaaggagaatattgtggtctttct

SEQ ID NO: 136292 - DNA, 1388 bp, Homo sapiens
gagtcccatggaattgcactaatggcttcagggttgtcttcagctacctgggactgacgattagccctggaactgaccgccaagaaatgtgggcttttagtctcctgtgctgataactgcatgtgtattctatggctaatggactcagcatccaagtgccttttagagccctgatgctctaacaaggcaatttgtgatcctgcgattatcctcagccaagtcatacagagggtccctgtgtatacacccatcactgcactaaggccaaggcctacacagatggtcttcagtaacatgaggaaacagcacatccctcgtaaaaagggtggtacatagcaagggaccagataaaaagcacatgagggtatagggcaacattgtcctatagacatataattgagccacatatgtaattctcagttttctaatagtcacattagaaaaggggaaaagaaaacaggtgaaattaattttagtaacattttatttaacccagtatatccaggatattatcactttaacatgtgatccatataacagttattaccgagtttacattgtttaccttgcaccaagtcttcaaagcctgttgggtgttttacatttacagcaccactcatttaggattgaccacgggggcagcatggaaacaccagcgtttggaaagaatgaggagaatggttagataagtgaggagggttctactagaaaaacacaggcacttggacacagaagtttccacttgatgtactgtctttagcacaggagcaccctgacaaagccggtaatttgggaaaactgagtggctgaactcagggggtaaagggaagtgagaaaagaggacaaatgaccaagaggctttgtgtgaagtccatggcgtagagttcagaactaggctagtggtctgggcaaggcgaggaagagctaaacctgaacgattgttaaagaaaaataatgtgatcagtgggggtaatgggaaataaagcaaaaagaagcaaacttcttcggtgatatacttcatctgattcatttgatccaccgtagttgttgaaagccagcttgcttgcagagcagtgggggaggccgataactaagtgcgtgtgcatataattataactatacccatgtaataatgttgtgaaggacaaaaccagaatgctgtgattaaaaattcaaggggatcatgttataggagggtagtcaaagaggagaggaggtgacaattaaggcaataacaggagccagtgccaagtggaatgaggggaatgattccagcagaggagaagaatcaggaaccgaggggcttgaggcagaaatgagctttctacatttgaagagcccagggacatacaaggaggctagagaaataggtggtgcaagcataaaat

SEQ ID NO: 136293 - DNA, 1048 bp, Homo sapiens
caaattaactagagagaagagttaaaacacagaagaacataagttttttacatttatatttgacaattacatatgtcttcttatgccttgtgtattttatatataaatattaaactctatacaaaatcaagacccttttaaagggaagagtgaaggctggaaatgaatgtgttcaaaactgtttaaaatccttaagggaattctgctatggaatctcaggataaatacagaattcaacaatgtttgtccagaaactttaatgtaagtccattttttgaatttgggatctatttttcccttagaaactaagtctaagtagtatttactatgcaaacactcaaaatcctgtataatgtataatataaactacaataatatttactcatacttgttttatgggatttttattgattataaagcattttcataagaaaaaaagcttccaaattctttttatgaagccagcataactgataccaacactcaccaaagattggacccccctctgaagaatataaaagaaaaaaaagctaaaaagaaaatattagaaacagaatccagcagtacatcagaagaaatatacactttgtccaagtagcttttactccagtaatacaagtatggttcatgttaagaatgatattaatgtaattcattctatcagtggatctaaatagaaaaatcatattatcatttccagggaagttaaaaagacatttgtaaaaatcaccattcagtttttgaaaatttttaataaaacagagctgaatagagacttccctatcttgataaaagagattgatctcagttcaaaagcaaatagtaggttttgaatggaaaggattgttaccgtattaagttttatattaaattacattctggaagtagccagtacagttagactggaaaataaaaaataaattagagaaacaataaaaaacgactacaaaaatcagagataatttggtaatcagtggaatacaatatcaatttctagaaatcaatacatttgacatatataaatcacaatcagctaaaagatatgata

SEQ ID NO: 136294 - DNA, 1082 bp, Homo sapiens
catttatttttaacaattaaccactgaattcattttcagaaataggcctgaattgcttgttaatttcattacaggaagtaactctaaaagccaattccacttccaaactataattaccatcatctgaatttaacagggaaagacatcttccaagacttcttttgggcggatgcttagttttagaatagccaactttaccctaacccatgtacaagacagttctccaggtggccttggactgacccagttctcccttcttccttgcttgtagttcttaagaataactgtagaatgcactgggaatgcaatatcctgatatggaggaactgcctgaaacaggttggccttgttgttgtccctcctagggaatgtaacatcttgatttagggaactgtttgagacagcgaggttgtgttcctctttcccctggaaggaggatgtactttaaagctttgcccaatgagttatgtggctcctatggtatataacccaaggcaggctgtggtgcaagtggggcacgtacaatcaagactccatcagccccgccctgggcagctttcttgagccctgggggactggctcacaatggagccagggcctcttttgtcccttgcttcctgtctgtaagtaataaatctgcttcatgtaatgtattgggtgtgagtgtgttctgtcacaatggaatcagacaggttggtaaccagtgtacactgaacctgcttggcaccatgtagccctgggaaaggagaaaggcggtcacagcttgccctatatggtgatgccagcacactgtgcactgtactgtgcaacagaaaaaggtgcactgaggaggatcggctgcttcttcccattgttgcttctttagtaaatcccctatgagtttttagtcgctttctaatctacaagttaaaggatatctcattaattttacagatatatacatatactgtaacaataggaaggaagtctttcaccaaccactaatactgtaaagaaagcattgtatcgatctagtattatttaatgaagacggacagcaattttaatacaatcttcttttccaagacctttgacagacctta

SEQ ID NO: 136295 - DNA, 2611 bp, Homo sapiens
gacgaagtctcgctctgtcacccaggctggagtgcagtggcatgatctcggctcattgcaaactccgcctcccagattcaagcgattctcctgcctcagcctcccaagtagctgggattataggcggctgccaccacgcctggctaatttttgtatttttagtagagatggggttcaccatgttggccagcctggtctcaaattcctgacctcaggtgatccgcccgcctcagcctcccaaagtgctggattacaggtgcgagccattgcgcccggccctcactaatttatttttataactccatttcttaaaacctgtagctttattttaaaaacatgattacaatgtacttttattttccttcttttggctgtttaggtgtttggaggcaaaccacaggagtctcttaactgtgtgtagtagtagtccaaaggtttatggcaaaggatactgggttttcagcgtgctgccatcatggaattgctacttttaagaataggggctgggtgcagtggctcacacatgtaatcccagcactttgggaggccgaggcaggtggatcacttgaggtcaggagttcgagaccagcctggccaacatgatgaaacgctgtctgtactaaaaatacaaaaattagccttgcgtggtggtgggcacctgtaatcccagctactcgggaggctgaggcaggagaatcacttgaacccgggaggcagaggttgcagtgagccaagatcatgccactgcactccagcctgggcaacagagtaatactctgtctcaaaataaataaataaataaaaataaatgcatagaataggaagggaaatgctttctgaatatgaaaaggtagatgctgctttgaaacttgctacccattttattgtcacctaaacatcactgtgatcagtctagagggaaagtcatagtgtccttttttctgtaaagtatgtcacagccatatatacctatgaaatgtaagagagattttaagttattacccattaggaagatagttgctgacacgtggtgcttttccaaaagctctgctcttctcgttctcttacacccacttgactgctttaatagaaaatagctttcgtgatatttgaatcagtcccaaaatgtgtcattttgctctcgtgtgtgtgtgtatttgtggattaatgcccatttcttttatctgattacatcattatactgataggcaaagattacatgaggagtggttgctaagagagcagaaggcacaagaagaattcagaataaagaaggaaaaggaagaggcggctaaaaaacggcaagaagaacaagaggtatggtaggaatcacgtaactagtgaacaaactgattacttcaccataataactctcatgaagagttgcctatcttgggaggttggagtgagctgagatcacgccattgcactccagcctgggcagcaagagcggaactccatctcaaaaagaaaaaaaaaaaagagttgcctatcttgaacttaaaaaaaaaaaacaaaaaactgatcttattcagtttgccagtgttttaagtttttcatctatgtgcgctgtatgtgaaatgtttttaaaaagtgactgaaacaaagttactttttcttcccctttaaagagaaagttaaaggaacaatgggaagaacagcagaggaaagagagagaagaggaggagcagaaacgacaggagaagaaagaaaaagaggtgattcctgtcatgggatgtgctgtgtgatgagtttgaagaataatcagtaggcatgtcagagtttgggttttttttttctctttttcttgtcatttcattgtttgtttggaaagaatcatatttcagtttagacataacaccagagttcccttctgatgctcttcttcgggtccgtgcagtggcagattccttaaagttttcttcagctttaccctatttaccctttatactgggcattggcaaatgttgtaaagggccagatggtaaatattttaggctttatggtttggtctctgtggcaaacatccaactctgccagtgtaccctgaaagcagccatcgataatatgtagatgaatgggtatggctgtgttccaggaaagctttatttacaaaacaggcagctagcccttgctttatagcaagttatgttcttctgaggttctgctgtatatgagttgacttctttagagaataatactttgttttgtttccacatttatttaggtcataagagaactgcttatgacatgtcagcaagaattagaggatttaaagaaatcaggaactcaaatattgaggaactaggaaacagtttttgttatttgtattaaatcttgacttcctcttccacttaggctatgaagataattgtagctaacacacagttgcttatttaaaaaaaaaaaaaaatctgtgaggcatatgtgtgtatgtatcttctctatcttccaggattcttttttaaggattgatttggtatgttttgctgctattccttgacagtatatttatttcagaggtatcacagctcatcttcccttgactgattcatcaggatttgtcttttttgtaatacagctaaatttaaatagcataaaattggataat

SEQ ID NO: 136296 - DNA, 1251 bp, Homo sapiens
ttttgagatggagtctcatgctgtcgcccaggctggagtgcagtggcgtgatctctgcttactgcaacctctgcctcctgggttcaagcaattcatatgcctcagccccccgagtagctgggattacaggtgcctgctaccacgcccagctaatttttgtatttttagtagagacagggtttcaccatgttggccaggctggtctcgagctcctgacctccagggatccacccgcctcggcctcccaaagtgctcgtgtgaaccactgcaccagacttttttaacagatcatttttactttactgaaacctctgcctcccgggttcaagcgattcttctgcctcagcctcctgagtagctgggactacaggcgcccatcaccacacccggctaattttttgtgtttttagtacagacagggtttcaccatgttgaccagaggacaaggagagagagaggaattcaagtcatatttttaggtttttagtttgaatagacagatagactggcaacactattcactgagggagcattcaggtggatgtgggccagggagtgtagaggacaagagttctgttttgagcaccacaaataagcaactagacatacgagtcttatgtaatgctttaaggggctagggaagataagactgtctgttaaacataggtacaacttgttcaaatgccaattaggtagaaatttactggcatattgcagaacctcctttgccttattaaaaagttagaattttctcctaaatgctaattaccactggtcatgtcatattttagcttctgctaaatgtttatgatttcatctagcattgttttttgggttttttcgtttgtttgtttgttcgtttttttttagacagagtcttgctctgtcgcctaggctggagtgcagtggcgtcatctcggctcactgcaacctctgcctcctgggttcaagcgattctcctgtctcagcctcccaagtagctgggattacaggcacgtgccaccacacctggctaatttttgtatttttagtagtgacggggtttcaccgtcttggccaggctggtctagaactcctgacctcaagtgatccacccgcctcagcctcccaaagtgctaggattataggtgtgagccaccatgcccggcctagcattgtgttttatattcactaatacccccttttacgaactaggacatggtatatatactcaaatatactaagtattactattattgaaactattataag

SEQ ID NO: 136297 - DNA, 2089 bp, Homo sapiens
ccaccacgcccagctaattttatatttttagtagagatggggtttctccatgttggtcaggctggtcttgaactcctgatctcaggtgatccacccacctcggcctcccaaagtgctgggattacaggcgtgagccactgcacccggccttcttggaccctttttagaatggatggaaaccttggcgactgcccctggtggcagtagtgataccagataaaggaaagtgaccaggagccaagagagacatggagctcatgtctcagtaccgttgtttgtaaagtcttgattgcctgttccaacttaaatgtttgcattattaaatgaaacaatgtttatctttgaggaaaatattttaatatactttgaaacatttcgtctttcatgggtttttactccaccagtaaagtcatggttattttcaacagttggaaaatggtaccacatggcaaaacccagaaccacccgtggatttcagagtaatggagaaggatcgagctaattgtcccttctacagtaaaacaggagcttgcagatttggagataggtaactaattttgttttatcatgtcagaatgaagtgattcaaaatgctgacgtttttgagttccccttttgggagaggcgcatgtttccatttcaaatgtccgtcatcagacatctgctgccttcttgctgctgctctcgttttcccagctgatcatcctctgctttgaccatccctgttccctctatccttgttccctgggtgggcttagcctagttctctgagggtgcttcctttgcattctgcatctttaggaagccactttgcttgttggtttcttcctgagcttgcattagtccatggtggacaactgggttggggaaataatatatttgaagagcttagagcagcttggctttattttttgaagggcacacactgtccccaaaacaggcttttaaaacttggcatgtgccaggagttccaggctgcagtaagctatgaccacaccactgcactccagcctgggtgacaaaacaagaccctgtctcaaaaaagaaaaaaaaaaacaaaacttggcatgtgtaaagggatatctgtgaaagacaggatccaaatgaggagaggaaaagtgttttaatttctgttgtcagtgagtgtgcccagactcaggtacagaccgttgggttcaaaacgggcttcagtggctgccagtttgggaaagttgcttaagctctgtgtgccttcgttctctcatctatgaaatgggattaaacatagtctcatctttctgagggggctgtgaggccgaaatgagcacacacacccgtagaacagggccccaggagtgcttgctggcattttcattattgtgactcttgatgttattctgtgagacactcttcttgttccctgccccttttgggtcaatgtttttgaaagaagacgttcatgtggaaacctagtgttgatctcttcagtcatttagcaagtcttcgaacacctattatatgccaggtaatggtgatttttataatttggcctgtttattaatgaacaacttaaagtaggtaaataattcctaatggtgaatgagtccatctgaggcaaaatctgataattatcaccatatattctgcagaagagaagatctaatcataaccttaacatcctattaatcctgaaaagggatatgaatagtaaaattcagatgtatttaatcagaaaccatatgtcatctgtcagctttactttattcataaaagtatccatgctgtgaggtttttttccttcttcttcttctttgaaaatatatccttctctatggttctctcctttttctttttgaatttaagcgttcacaccatttttcattttttaagaacagtggttcccaaccctggatgcacattagagtcatctagaaagctttaaaaaattatgtcctacctcaagttgagtaaatcagaatatcagggccaggcgcggtggctcacacctataatcccagcactttgggaggccaaggcaggcagatcacttgagctcaggagtttgagaccagcctgggcaacatggtaaaacctggtatctataaaaaaa

SEQ ID NO: 136298 - DNA, 1012 bp, Homo sapiens
agaattttaacctcattaaattagttccttgtttaattctctgcatgcttcatacttataacattttgattcactgttagtgttgccagtcaggttgagtctttgctctttgttctatcagtagttgggaagagggatctaattacaaggtctctaattgaataatccaggaggtcatttggaaaatagaaaatttcacgttaatgaacgttgatgaagcatttctgagctgagcatggtgtatgctgggcattctgtaagcattatctcagtaggtgcttagatagacattacagacatggaaagtgagtattattaaacatttagtcatttcagggccattgttgttttttcccaacacgtcctattcttcaactttctttcttcctaaattctgtggactcccctcgccaaaaaaaaaaaaaaaaaagtttttgtcttaccaatttttaactagcaacctaaccaggaaaattttgtttatttggaaccttgaactacatttttcctccacattgtatgttaggagaaggaaggaagtaagaaagtaaactcatatgaaggatttttgaaatattactcaggtacagcctggtcagcttagccttggtccagtttaaactatgaaaataaaattgttcttcataatggttggccaccttcattaaataagaattaaatgatgcaggtatggtagctcacacctgtaatcccagagctttgggaggctgaggcaggaggatcacttgaagccaggagtgcgagaccagcctgggcaacatagcgagaccccgtccctacaaaaataaaattatccgggtgtggtggcatacgcctatggcatgcgccagctactcaagatgctgaggcagaaggatcacttgagcccggggaattcaaggttgcagtgaagtatgatcataccattgcactccagcctatgtaacagaacaagaccctgtctcaaaaacaaattgtatttattacaccccatcgtgaacaggcaccagat

SEQ ID NO: 136299 - DNA, 1032 bp, Homo sapiens
tctatctcaaaatttaaagcaagtgtttttttgtttgttttttgtttgagacggagtttcgctcttgttgcccaagctggagtgcaatggcacaatctcagctcactgtaacctccgccacccgggttcaagtgattctcctacctcagcctcctgagtagctgggattataggcactacaggcgcacgccaacacgcccggctaattttttgtatttttagtagaattggggtttcaccatgttagccaggctggtctcgaactctggacctcaggtgattcacccgcctcggcctcccaaagtgttgggattacaggcgtgagccaccatgcctggtctaaagcagttgttttgtgagtaattttcaactattggcctagtgaatttaagcttttctttcatacgcagatgttcacgtaaacataatttcccaacatccagtcctacccttcttattaagagcatgtttacgacgtttggaatggagcagtgcaggagggatgactatgaccctgacgcaagcctggagtacagcgaggaagaaacctaccaacagttcctagacttctatgaggatgtgttgcccgagttcaagaacgtggggaaagtgattcagttcaaggtgggcatgcgtgtggaggaggggactggtttgcttcaccctgcagtacttaatggcacaagagagctgggacacaggctcagctggggtcaggcacgctagcactctataaatgtgacttccctctttctctctttccaccccctaccttgttgccaatgtcacgtcaataccacatgaaatcataaacatatattagcatggtatttcctgaatgctaggggtctagattggaaaggatctttcatttatttagtagctttgtgctccagttcttttccagcacatgaattctctgtatcaggtcccctgcatatagccatccagtccttcacttagaagctgcatgtgacaaacggtgcattcccttccttcctctgtaggtggcttccgtgtgcagtgtgacac

SEQ ID NO: 136300 - DNA, 1030 bp, Homo sapiens
agtggtgaggcatagctttttgcctcacacagtagatgagcagagaactttatataaagaacaccacagtttagatctgtaaccgacctcaatgagtcacttgatagatgaagtgactgaggtcacaacgtattggtgacagaggtggggctagaattccagtcttccaatcttcagtcctgggctctgtgtctgacaaatcaggaagcctgaggagtttacgtctgtggaagccccatttcccttgttgcagtttcagaggtattttatattcattggctcacttcacttgagctgtttgtttgtttctttctttccatctttatccctaatgaatcttctgtcatgaccacctacgttaccttgcccatagcatttcctgccttacttggaataatacatccttctgtgcactagagactaattgtaggcttgggatcagttaaacatgaatgcagtcagactgacatcggacagtggcaacccaatcaggaaatgatccagtcttgtgcagaatagccagcagttttgaaggcctagttatgttctgatttctctcagtggactgttccctaggtgaaaagagatgagctctaaatgcctctggggagcacttatcttaccgtttacttgtgtttctttgctgtatacatgcctgcctaacgcaaagtcagaatctttggcaagcttgtcttccttggattctgtcattctgaaaccatttatgaagggaaaagaaagattttaggattcctggctaagggaaaccagaagaaccattacactttaaaggctcgggggatggaagaggtggaattgttcgctccataaaggcagttacttttgtcagttcctgggaatccagtgtgagttcagtgaggagcttctgagtgtgaccttgactcctccaaagcaggggactatttcattaaaaaaaaaaaaacactttattttccttattgactaaagacactgagcatcttttcattattggccatttgtatgtcttctttggagagatgtctgtttg

SEQ ID NO: 136301 - DNA, 1125 bp, Homo sapiens
ttgaagaaattggactgacataactctcctcccttgttgatgacttcttgtggcatttcacacactgtagatggtcactcccttcatgtccatgttagctcatggtgtaagatgatgtcttgtcagtattactgttttgctaagccgcttcattcatgcctacacaatttttttttaaaagggaactttagttaattaagtgataagggacttaaatatgaattagaatggtgcagaaagagataccttttctggatattttaaagtttaaaggtcagtttctcttaatctgattatgtgcacatatgaaaatggcacatcatatacatgtaaaatcaggcagtatacatttattaattactgtatttgacaaaggaaactcttaaattataatgtgaaacctggttttatgaaaccaaagactagtgcagcatttcagcatatgtaaaaaaaaaaaaaaagggaattgacatgtcacatatcaaatgaatggaaactttgttgaaactttaaaaagcaaatttactccaaagacttgtattggaaattacataccttttttttttttttttaaaggactacagattatttttaatgactaaattggagtgatacttcttacactaaaaattatttcttaggcattctgaatctgggatgagaaacaggattgtttcacaatagtaagcacataatttttaaggccaaggcacatttgactcctgagatgaattttttgtggtcataatcaaatacttagttgtttttgatgccccaaaataaagtgagaatggtaatttgccaggaattcttcataacagtatcttacaaaaaacgtgttgctctcttcacagtattatgtgtaaagtcattgtttaaagcacgaatgttccctctggggtacttgttaaagctaaatttattttgcttccctccacttagaagtgctgcacactttacagcagcttcctttctttccatggcactgcctagttaacagaagtcttataaaaatttaaaaagacacatttcttacaaaaaagagttgaatgaggtaaaatggcattagatggctctatattttttaaagctatgtaattgttcagcgtcacttttctaagtact

SEQ ID NO: 136302 - DNA, 1649 bp, Homo sapiens
ctgtaatgcacgacatttgaagcacctggatgtgctatcaatcaggtgggaaatttagcattatatattggaagcattgagaaacattggtctttcatttctatttttttttcccctcctttcctcctcctgccccacaatatattattcatctggttttaatgctacataaatatgcattgtctcatgcctgtttgtgttggatgccttgtgctaagctgtaacaaaatgttgcttcttttgctgtctgtatacagctgcttgctttaaattagtagattctgaaatagctttccttgcatgtctaaaataaaagtattgcatgtacttcgtctcatgtgaatgactttttcttttccatccctcataaaataacgttttatattttcatttttctaggcaaattttttaaattgtggttaaaaacacataacacagaattcaccatcttacgcagttttaagtgtacagttcagttgtgttagttaagtttattcacattgttgtgcagcagatctgcaggactttttcatctggcagaactgaaactctatacccattaatcaacaattccccatttctccctgtcccccagcccctggcaaccaccattcgactttctgtttctataaattttactactttagatagataatagtttttctgggtagttttgagctacaatttcagtgtgaacatgtgtaagttccattttatattatcaccacaatttattttaaaactctacctgtgcaagtctcacaagaataaaatgtgtaaataattctttgaaactaggccttttagaaaggacacatattttcaataatgcatatttgataagcagtatgattctctacaggaaatgctatataagattgcaggcagtgagcacatggggaaaagtctgaccagctccacggagtagctgtggggcatttttacatggagaagctgagaatgtaaactgtagaattcaatggaggcattatttaattgatacattcaaggctacatgaacctttaaactacttaacattacatggaaataattattttaaatttttcttgaatatttatgagatttagatgtcattctcagtgtatttaatgcttaaggctaaatataaatgaaagggattggcttacatcactcttgggtgttacatcatttccagtggactttcttaaaaaactttatcatgaaaacttcaagactcacgagtataggaaatagtataaagaaccctcgtgtacacatcactgagcttcaagaaccatcaacttaatactgtttccccaaccactccccgcatttttgcctcagtatcttagagcaagccctagacatcttgtcagtttgtctttaatacttcagtatgtgtccctaacagataaagtaccatgccccacaaaattaacaggaattaataattactatcttatgcctggctcaatttttcctaattgtctgaaaaatgcctttttatatttggtttgttagaatcagattccaaccaagactctcacattgtatctgattgatgtgcgttttaagtctcttttaatctttaacaaatcgtctgctttttcccgccttgccattttttttttttaaaacgaggtcatttatgctgcaggatgtccta

SEQ ID NO: 136303 - DNA, 4432 bp, Homo sapiens
ggggaaagtggaagtgcatgttttctaagaaggacaaataggaatagaataaaagaaaaagtatattggggctgggcatagtggttcactatgtaatcccagcactttgggaggctgaggcgggtggatcatgaggtcaggagttcgagaccagcctggccaagatggtgaaaccccatctctactaaaaaaaaaaaaaaaatacaaaaattagccgggcacagtggtgggtgcctgtaatcccagctactcaggaagctgaggcaggagaatcgcttgaacccgtgaggtggagattgcagtgagctgagatcaagccactgccttctagcctgggcgacagagcaagactctgtctcaaaaaaaaaaaattatatatatatatatatatatatatatatatatatatatattttggaagggagaatgggagtggaatcaaaaacattggtctcggatgagaagagtctttctcattggttatgtggtgataatggggtaaagctgtagactttttttttctttaattcatgagtaagatgagcaaaattgaggaagtgtcattttcttggccttgagaaatgacatcatctaaaggagaatcgttgggactggggagaaggggaggggtgtatagcttgaggacagtgtgaggagttggcagtagacttggtggggagcaaattagtgaggagcaaaaaagatttcctgggattgaaagcccgtttcaggttgaaataatacattgtcatccttattcaaagaataggtctccagagaacctgtactaaggacaatacatggtttatagttgtacaatacaactggattaaaaaattttttctcactgttttcattctgacctttattcccacttaattgaaatcactggggttttagtgttttaagaaacggatagtttgctgagtattatatgtgactatttcctacgggtgcccaggggaagaacaagatagtaggcctaggcctgcacagggtcccttgtgtgctatgacagactttactctcaccctccctaattcctaattgatataatttttatgtgactcacaagaggtactggtggtaagaggtataaactggaatttataattgaatctactttctttgtatctgaaagaaaaatattttggttaattatgggcatataatttagctaaaaaattaccttaaatgttaagtggtccttaaggcatttataacagaactttttcagaccctagaagtctaaactgggaaattatttaaaacgttattaaagcaatttaaaatggtaaaaataatacatttatttttgtgcattttagagtttcttttcttcttgaaggatgtttttccagtgaagaggggtttctccctatgaagagtattctcacatttaatagatggtaatttcttacttaagtacagtaatatggatcaatggctataaagaatagtttggcttatcatcaacccttttctttcctaaaagcagtaaaaggtgtgtcagggtataagtggtggaaatgcctgggtggtcacattgagaattgttcctgtagaattgctggtgtagttcatagtaagtctcctggggaggaatggttgcatactccgccctgtttgggaaaccacctcttctcttttaatgagcgtaagctctcgatggttggtttttacatggtatgatagaaaattaagagagaaaagaaaaagatgataaactataatataaaggctcaaagaactggtattatttaggcaaaaggttatttgacagattggtattatttaggcaaaaggttatttgacagacttaaacttttcttgttctctctccagaaaacagagactatgtatcacagcaagagtttcattgggtttaagaaagcgtactagaatacgtgctggagtactgacatgcatcaaaatgtagtaggatatataaattcagtttgtaatgacaattttgtcaagtttgttatttatattttagcattacctgaaaagtctaattacattaaatcccaagggatagtcccaattacttcattaaactggtattttcatagggaattttgcttggataatgatccattattggggcttataatttattttttacacagaatatggaaatagcttcagaggttcattgacaataaagcattcattaaatactgtgaatcactaatgccattgatacagaagaatttccctatgaaaatgagagcttctgtgagaaaatgaagtagttgggagtttaatttcttattaatatgattttaacttgctgcttcattccactatattctgagttgggggaaaagggcagctatctctttaaaatatttaggaattctttgaggattaaaatgtaactggcttttgtcctcagatacgtttgtaattaatggttgtgtaagtttagggatttgttagatatttttcttggaacagtttacatgattttgtagttcaacatttcaaagtttcaacttgaataaatattaaaatgaggatactttaaagacactcaaataagcaattttaaacttgctttctggtggggatataatccctttgagagtctgaaggatgatgggctgtcaccccaggaaaatttgcacatcattttgtttctaatttcagggaactctcagagcccctagaagtccttctgtagacactcaaatctggagagttcgttaaaatctgtcttgaggatttttaaaaaagtaatatcctcagtctcagtcaaattctttggattttttgcttttgtaggtataagtaaacggttaaaaaccttcattgctacttaaaataccagatgagtgactacttttccagtttttattgggaaagatttttctctaggttctttagtttatgtaatacaaatgaactaatgaatttaaatactggtggaaggggaatattctaattgaatttttggtcaactcagtattgaccagatgacttacactgaaaatcttttcataatattagtagtaaatatagtgttttaggattttgtaaaatttctggaggatgtctgtcatcattttgaacactgtatgtagtaaagttagaaaaaaatgaatctaaagtcttgggcattgtttagaagttaaatattcagccttaaaccaaagaatgaaagcaaacagaaacttaagttttagttatctttactgtgagctaaatgttctagaaatctgattgtgtctgtgtcagtttgtatactgtgtgtaagaatatatgcatttcttttgtagccacgtcatgaatattttaatgtccctgtgtactaaatgactactcatcgagtatgcagaatttcacagaggaaatagaatgctgatatacatatgaaagaaaatatcctcagcatggtgatttattgtcttgtataataatagtagaacattttagaactagtacttttatgattgtatttttttcctgttcacattccaaacttttctgttttattttcattctatatgtgatcttgatacagctcattcctttctgcaactgatttaatctcatcttgacaaaatatgacctagaagtgttttgagtaatattaaatcttaaacacatacatattattaatgaaccatctgtgatttatcttataagaggaaaacatgacaatcattaaaatgtttaccaaagaaaatatagctgaagtgctaggtcaaaataagcagtgccataatatatagtgtagtttggtcttcaaatatggaggttaaaaaaagaaactattttgtgtgattatcttacaatctgtatgagctaatgtgttctaatgtatcacataaaagtatatgtgaaaatattacaagaaactaaaattaatttgtaccattatataatatttaaggttaaaacattcagtattaagaaattttgtagtgccacatttattgaatcacatttgtgctatataataatatcaaacaatccctttaagaacttattagagagctatgtctgaagtctgttctgcaatatctgttgctgaataataactctttcaaagcattaatgctgagtttatatagttcaaaaattctaatattcattcagttttaatacctaaatacttatattttactagtgatggcattctaatatattaagtcctcatttaaatacttgatactttgttaactgtggcattatatttctgaattttaaaacctttaatattggtaactattgcatattcttttaataaaacatgcagcatatttttttataaaaggaaaagaattcattgtttatatctagagagcataaagcctaagttaagtaagttattaaacaataacttcacaagatgttcaaatcgatttatcactgaaagaagatctatgaaaatgtgttttgaccaaacttagtattaggcagg

SEQ ID NO: 136304 - DNA, 3102 bp, Homo sapiens
gatcctgacctagtaatttgatttcatgagccctagggttggaacctgcacagggacctgcaaagggaatagtctgtggtgtcggtggtgattttttttttaattaaaaaatactttctgaaaaatgtcacgtttgagtccttttttcacctactgacattttcttttgtttcctctgagggcctttttttaaaaataaaaattcccattctggaaaaattagcaaatacaggcaaacacactagaatataatcttacccaccaactagagccaattagattaactcagtggttcccatggagtgggagtggtgcagttgtgcccctctaggggacattgggtaatgtttggacacatttttggttgtcacaattgggggtgcagtgctaccggcatccagtaggtgaagaccaaggatgctgctgagaattctgcagtgcacaggacagcccccttagaacgcggaattatctggcctcaaatgtcagttgtgcccaggttaagaagccttggtttaatttaacactatggagtaaagattccatttacatttatagactgctatatcttttcaatattatatgtagaccacagtataaataagtggctaaaaattaatcaaaaatgcaaaaaatcaagaaaggataaatgtgcttaagaacatacaaatagctataaaaatcattcctaggccaggcgcggtggctcacgcctgtaatcccagcactttgggaggccgaggtgggtggatcacaaggtcaggagatcgagaccaacctggacaacatggtgaaaccctgtctctactaaaaatacaaaaattagctgggcgtggtggtgcgtgcctgtaatcccagctacttgggaggctgaggcaggagaatcgcttgaaccagggagtcggaggttgcagtgaagcgagataacgccactgcactctagcctggcgacagagtaagactccgtctcaaaaaaaaaaaaaaaaaaaagtcatctctatgattcaccaaaattacctctacataatgaccagttactggggagataatctatggttgactttagaatccaccctacagcaaggcttgtaggatgtcactctataatttaatttcctcaacaacagccaaatctgttaacttctattaaggtaattgagtttttatgtggaaactgaattgagtataccctgcagacagaacacctttgaattttctgccaatctccccagccactttagggatttgttaatttcttaaaggaggaatagttcaaatgaccagaatttacatatatagacttttgttgcatatatagactttttgttgttgttgttctctggcatcctgttagccttaaaggttttacttagtgaagatatttagtagcatttgagtatttgaaattctgtgattccaagaaatcttttacctttgaaaaaccctaatttagggtattccaaggcaaatacaatacagcatgtcctaaaacatgcttaaaatatttctttgcagtctaaaattatatttgctagctgggcacagtggcacacttccataatcccggctacttggaaggctgaagtggaaggatcccttgagctcagaagtttgagaccagcctgggcaacatagtgagacccctcactcttaaacaaattatatttgctaagttaattattctgcttttttttgtttgtatatttgttttgagacagggtctcactctgtcaccaaggctggaatgcagtggcaccaccatggctcacttgcagccttgaactcctgggctcaagtgatcctcccacctcagcctcccgagtagctgggattacaggtgcacaccaccatgcccagctaattttttaaaaattttcagtagaaatggggtctcgccatgttgtcagggctggtcttgaactccgaggctcatgcagtcctcccaccttggcctcccaaagtgctgggattacaggcgtgagccactgcacctggcctctgcttttttattttaaaagcacaactaactggtagataaagtgatttgtctttagtatttgataactaatgggttttagagtgttatttataagatgtagtaaattatcctcatcattatttttaagacaaatttataagacaagtgtaatagaaatagatcaacagcacaatagaaaaagatggcagaaaacatgaatatgtaattcacagatgaaagcaaaacaaatggtccttttattaagggaatgcaaagttaaaaatcaactagacccttttttgtttgtttcttcttggattggcaaagaggagcacttaaaagctgtattttgttttggaggattagtttggttatgtctactaatgactaaatgtgtacatacattttgacccattagttacacttcaaagaattttatccaacaaaaatgtactgagacacattgcttagtataataagccattgaagcttacccaaatattcatcaatgagaaataggttaagaaaattatagtacaaccatacatgaaactgatgtagctgtaaaagaaatgagatcgatttttttttgtaatgatatggaaggatactcaaagtatatcaagtgagaaaagatctaggaacaggatattattattattattattttattttttgtagggacagggtctcaccatgttgcccaggcttaggagcaggatattagctaactcgtgttacttctgaaaatctttgaagctccccctgctcttttttccagaagtgtaaaaacaagcatgtatttagtattacacatttttaaaaaatgaaaaaatgctgctgtgtgaatgaaagagtatacatcgtgttgctccagatggtaaaactagagtagaatttactaaaataaagtttcagcacgtaaagtaaagcacttctctgctcttggccattttagacactaaccatctggagcaaccatgtaactcttgccactcatagctaacttaatgtaaaaaaaaaaaatcgcttgactttcttagcacttcacaaatgcttgtaagactgacaccaggagccctgtcatctaaaaggcactttatagagtgctttcaattcttctg

SEQ ID NO: 136305 - DNA, 2257 bp, Homo sapiens
cactccacaaactgctggaaaactttttgttttggataccatgacaacaaaaataattatgatggtaactaacgcttgagtgcttgtatgtgaggccctgggctcagcagtttgctttaagcatcctgtgctaatcctcaagacaccctgtgaaaggttagaggtagcctaatgagaaagtggaatctcagtgaggttccatgactggtctgaggccacctggttagcaactggcaaaaccaggattctaaacccagatctactaggcttcacagctgtgtaaaatcttaaccactgtgcacttcccctaaccccagttatgtattgtcttggtatatatattttaaacgttctgttttagatatgaacttctttgtttctcagtcatatagtgagaaattcataattctcccagaggtttttctgtgtggaaaagagtagatttcctaagacagtgccatctttgacttcttagactgcaaatttttattgtccagattatcagcagttggaattttttattggatatgtagatataaataatatttttcaacctatttcttgttggattgatcaaaatgcctggatttataataacttttttggtcttatagtttggggtatagcattcacttaatcaatttcatgaaatgattttgcttccaaaattgtaaatatagctgtgaagatctaaattcagacttacatttgtagtagaagtcctaattggtcaattttaatctactttttcatgtgtcattatttttctgtttagtgtcaggtcttttacttgaattgattatttctaagcaccaaagatgactttgaacttatcatgtacttatctgttggcttaaaggtgtatacacatctcaatgattttgatttttttttaatttgtgaaatatacatttctatccttaagaatgcttattttcttcagaaaaattaaaaaaaaatttctcttacccaatttgtataaacacatagtttaaggtagtccttcattttatagccaaatagggaagagggtcagtggatacagattttctgttagcatattacagttagtaataaaaatgtaacattaaatgtacattcaaataatagttgctaaaatattagcagatattgtgattagataataaagatatcttttttattttacttcattacttggtaaataaaggattagttttgacatttctagaccaaacttcatgtttattccttttggtgtttggttgtatgaatacataattagatttgggggtaaagcccagaaattggcccgttatccattttttaatgtttggctgtcttaacatgccactggtactaaagatgattcttaaattattaaagtacaacatgctgaaattgctaaattgatattctttgcaatacttggaatacttttccccaccacctattttaagctagatttttggagggatatggtggggggtggtgatgtagttggatttatttaaacacacacatatataatgacaaaggaaataatagtatggctttttttctgtaaagtcaagcacttaccagtttttctctgctccttaattttatagagccagaatgaagaatggggaggtttgtctgaggatatcttatgataaagagcagtctaaggctttagtccctttgatccccaacttatttattggtaactactaaatttaccatttttgtggcatggataaaatggagtgctatgcaaatactgttgcacgtgagatgatttctaagtccttgcttgatccgtgaagatcaaatagttaaatactgggcatttgggctttaacccttagcggttgatgcatgatggtgttgattagtgctttgagatgtgtcaacctttcttttttatactaacagcatcattttgaaatttgtggtgttgtttttcttttgagctttgtttgctgttggtattttttctcactaaagtaatctgtgaaatgcaaaataagtgaggtaccaaaagcaagcataatactcatgaatttgcttttactttgagatgatccactttatgaatagatttactggatttgcagttgtttatctgcctcatctagaaagtggtactctacggaggattagcgctgctaaaattgatttgttttagtgctgggggctgcatgatatatcttagtactatgctatatttttgtgaaagtaataatctgtgggactgcatacaaatggaaaggtaagaatcttaggagaaaagtga

SEQ ID NO: 136306 - DNA, 1786 bp, Homo sapiens
aggaggtaagctacttattctcttcactaggcactagcatgttttgctcttgctggggaagtctcattcatcattcttacagtttcagaaagtactctgaagcatgcttgtcatgtagtgtccatccatgtgcagtttattgactggaatatgtgtcagtcacgtcaactcagttatctatggatggatggttcagtttggagatggtctatcggtcaggcctcttcccaatggccctttttggaccctaaaacactggagtctaaacctttagaggacagactatttgaagaagggaaaagattggctgaaagtagcagtaagttgagaactctccatctattgcttcaaattgtttaagataaccccctttttcattagtgtagataatcaggagttgactatgagattatgacattttaattccaaattggctcatatttttacctcatgtccattaaatgcaaaagtagccaagcaaatgatagtgttttctaattatactttttgtagaaacttccaggttttttttgttagcaaaactaaacagtatttgcatttctctttgctcttcttaaataacaaaccatgttctgtcaaactgcattcttgtcttacctccatatccccagatgtgtaactcccttttctttctaattaccatagtcatcttgggttaattgtgcagttgatgctgatgtaccttctatttctgaagcttaacatttcatagataaggctacctttttccaaaaacttaatgataccttaattcagataccaaattgaattatgctttagagctaattgtgatttttatcatatggaaagcttacagcatgagaagtgattagtaaatattgaaaaatgaaatgtgttttcactaaagtagttgttaagtgtgtgtttgcatgtatgtaaaagtcttgaatatttttggctcactggttcattttccagaagcattgaaaatatgattttgtatttccagtttattttagtcccttctttgttacatacatgtttatcagtttgttcttgtctttttttagtcaccaaaggtgactttcagtcccattttttagccttggaggcattcagttttaagggagtgaaataaggggagaagagtaacttactttctccattttaacttcttaactcttggactctgtgaggaagggaaagctgtttgagaatctcactgcatcagtcactgactgggacagttgtggggattgcttgaagttgagatgacatcatctggatagacatctactaaatgtgagacaatgcattgtacacttaatgatcttgtagttatcagaagagtggttaaggtgcctgcaaaagtgaagtattagattggcagccctggtgccatctactcttcagtagtgaaatgaacacagaccttttgccttgtgtgtacagtttgccacagtggtttaccaattgattggaaatgttattctggaggtttgtttttaatatcaggtgcgctgactataagcatatactctactgttgtaaaattggtttttaaagttagtatctccttattttgctgttcactaatcagacttttttaaaaattaggtcaaaaccaggattagaaattgggaatttttcatataggtcttcccttgatcactttcatattttgtcacagatctgtattctgctctgtcagaacctggcatttcttccaagtttttctatcattttctgattaattacattggctttaaaatgtatttaaagttattgaagttcaacttttaat

SEQ ID NO: 136307 - DNA, 1095 bp, Homo sapiens
ttattgagcttgtaggacttaaggtcttctctgtgtatatattatacatattccaataaaatatcccaaaatattgacctcaccttggcattatcctcaacaagtcctccttcagttggaaggtttgttttcttctctgtacttacagtttgaattaatctgctatatattttgttttaattaagtaaacttaggaaaaacctgggtctgctatgttttaaaatgcttatagaaaagaacctgaaaggaagaagggcaaaatcacttattctaagtggtatgattattttgattttttctttatacttgcctatgcttttcaaaatttctgttatgcgtttattacttttgtagtctatgagaaaaatctgtactgtcgtgaaagaagaaataaactgtataaacttggggcttttcataataggatatgaaaatatatttagaaaacatcattataggataacagtttttttcacatttgtactttgttacagatatgctagtctgtatttttgctgtgctattgaggatcaggacaatgaactaattaccctggaaataattcatcgttatgtggaattacttgacaagtatttcggcagtgtgagtagtattttattttaggaaattgaatgccatagtatattttggaaccttttctctaacaagtttattttttggttgtcttggggattctaaccgcgggagagggtgggaatgactatttattagtagaaattattaagttgtccatattgggaacatgcagagcccagtcttatttagcttgtaggaatatgttttcaagtacttgagatttggaaattaagcttacttaaaccagtgatacttagtcatttttagaaagagttaagattgattcactctagttcgattttattcactacctgatagtgaataagcatcttctgcttctgcaagttttaacaattttttcttttcttttttcttttttttttccttttcaggtctgtgaactagatatcatctttaattttgagaaggcttattttattttggatgagtttcttttgggaggggaagttcaggaaacatccaagaaaaatgtcctta

SEQ ID NO: 136308 - DNA, 1390 bp, Homo sapiens
aaaggagatgaagaagggaccttcagagtggaatgagaaatttcaccaatgccagatgttgcataaagttcaatgaaagtgaggaaggaatctggtagattttacagtgagcatttcatataatgccctttgccagaacattttcagtggaatagtggagatagaactctcgatgtaatggggcgaagtgtgaagaggtggagaaatttaaatagcatgtgtagactattttggggaactttgctgtgaaggacaggagacgaggtggtaaccactcatagacataggagtgggggacaaggtttttaaaaaagaaggtgtgagaggcttaagcttatttctagataggggaaggagtcccccgtgtggaggaggaaaataccagcaagggattcaatcccaggaatgggctgttatgggaagaaaggaaagcactgcttggtgttcatgcacatgtcactcagtctgtccgtgttgagccactactttttcttttgaaagctacaaagggtatctaatccaactctgatacttatatcaagcacctttaaataaaaggtggactttaaaaaaaacagctttattgagatatcagtcatatacaaaaggtggaatttatcagttctttctctatacgttcccccttccatttcatactgaaaacctcatctactctaccacttacggacatattttttgttggtataaacaggtggtttgttttccctactgctggaagcgaagagctttttaagcaggagaattactgcttagcgcctgagaaattctggactgggacttctgctgttcatatcagcaagtgatttttgttgtttttgttaaattatctcatctacattcttcatcctgagtatttggcatacaaattcccccttttgagaggggaatgatggataagaataatattagctgaaaagacagactgaaaatctggggacttaagttctgttccctttgtaacgttagctagttttatgactttaaacaagtcactttgtttccttatctctaaatgctcttgaagatcccttcaagacagaatactgtgcttttttgattcctgttttgtgtagcattttgtggaagagtcactggattaaggtcttttaaaattaatttaaaaacatatatatctccaaattactagcttgataatttgttaaagaatacttactgattttctttactaacaaaagaatttttaatgacataccagtgggtattgagaacacttcagctacattcacccacagtcagctgatatttagctgatatttagctgactgcggagaagtcatgtgttttgaatataagaataggcactttcagatgttctctgagtgccagtaattagagtaagccttaatcc

SEQ ID NO: 136309 - DNA, 1682 bp, Homo sapiens
cccctccccgtgttcaaattcaagatggtgtggtgaatcttgagaatcatgcttgaatcttatttgcagtaacgctgttaaaggaacttaacagtgattaaaagaaaaaaggatacctatgtgaattctgcctttaaattacctttgtagaaacaatacttctgtttgcagttgagatgaccaattggattacaaaaagcttggcgttaaaaatgaaacatgcagactaatcaacacatttgcagatcacaaataaatacatacaaattagtttaagtataaaacacactagaattcagcatccattccatctgtagatactattttttattttaaatgaagtatttcatgtaatgtttcaatgctgaatcttatttaataagtgtaaatcttattgtggccttttaaacgtttgttttctttttcataatacattaactcagttctagattttgtacatatttaagttggaatgctttaaaagtcagatgaaaacatacttttttattaatgaaaatttgtatttatgggatttttcagttaatattttggatcattctgttttgcttaaaatatgccatcataaactgaggagaacattccaagacataagctactgtctgcaagtaattcaccctggaactagaacggcctcaggatgaaaaatagcaggtcttctgtttctttcaaaagtacccaaaccagatgatgtctaccattctcttttgatgcatatagagagtgcgcaatgtatagcacaggtagaaaatagtttcttaaattgaaagagtgatctttatttttcttcaaaaatttcacttcagcttattacccatttttcttttttctcctgcacactccccttcaaacttaatgtggaacaaggtgggattggaaggtttgcatctagaggaagatctgtccaaaagaatttcttgctattttaattggcatagaaatattgatggctactaatcatttgtcatgtaaatgccccatcccccaaaacttctctgtgaaacacataatcttaactttattgattcaaagtattacatgtaatcttgattttatttatcttaacagatgcagtttatgttgctttttagtcgtcagggaaagcttcgactgcaaaaatggtatgtcccactatcagacaaagagaagaaaaagatcacaagagaacttgttcagaccgttttagcacggaaacctaaaatgtgcagcttccttgagtggcgagatctgaagattgtttacaaaaggtataatttttgtttgtcagaaaggtgaaatagaatcaaatgttaggtcatttaggaaattgcagacttcagtgatgacatttataaataacgattaataaagatttagatgaaataggtttaaggtaaagctttgtgtttttaaaataactagtgttttgattgataattactgaggctgaaatgataaaggcagggaaatcctttgaaaactagttatataattaaaggcataaatgattattcatgcttaatcatctttatagaagagtttaatgaattcatttcattgcaggggaaagtagggtcagtattttaaattgtgtgagtaattctctgaattgagacaagtacagatagagtctaattctttttccccgaaaatctataaagtaatgactaatatttgacatgcct

SEQ ID NO: 136310 - DNA, 1090 bp, Homo sapiens
ctggtgtgagccacctcaccctgccgaggcttcttaaaaaatatagattccccagaggcagggacccaccctgcgtttacgccatcaggagaaacctgacaatctgtgttttaaactagtgcctcaggtattaaaatttatgcaggaccaagcagaaggtgagcctggatcctgtggctgatgatccaaaaatattatatccagggctcacaataagcctaaaatatattatgacattttcctaactgcattttataatggagaagttgggttgcttgcccagtgtcacacaggcagcgggcaacagatggaggattccatcgtagatctgtctgactccaaagtctttgttctgtctattcttataccactttccataaagccactagggctgaagtgctatcttactcagggcacattctggttgcctcatctcccttctgtgggggtgatggtttctgcagaagttccctaatctgacctcaaattatgacatcagtatctaggcttgagtagaattgtgcaaggagaccagactggtgaattaacaaggatggtcccctccttcttccccttctgttgtggttaataactagtaactcagaccctatgatactgatccccatagggatgagaaacagggctctcttgggtaattgaaaatttctggttgcctgggtattgaggcagtttccaaaagtgatggaagcaagcacatattgctcctgccctctgagaccttattttgttccaataaatccctagaaagaaaatacagcaatttagtacagcaatgttaaatagtgatagtagagggaacagggcaccatctgggacatttgaataattgtcaaggttggcttttctttaaatgctgcttattgctcagtccacccatattaaatcactagagctacaagtcatctggtggtgattttttggcattacaagattgcgcttgcatattaaattcctcaacttaggctcagtttgggaattcaaaatgcagcatttgatcctcatctgtatttaatcttctgttgttggttacagctccttttacaggtttatttaaaaaacttttgattct

SEQ ID NO: 136311 - DNA, 1016 bp, Homo sapiens
gaaggctagacctccctgaaagccctcacctggaggtagtaaaggggaagcctgatggataaatcaattcttcagactgttctcagagaattaaaaattatgttagttaccaacatttacagatccagaaaattaccacgaacaccaggattccatttatctccttcactggaagatctagaggcgcatgcttacttcttcatgcggcaataatcagcaattgctgatcctggctcccctttcagtggagctcccacagcccccacctagcctgctttgcacaagtgctttactgcttacccttagtttgtcatgctgcattgaaaccccaatgtcaatccagagcctgcagtgctagaggactttgtctctgcaggactgccagcccatgccactgagcctttgctacccacatttagggaaagtataaacagcccacagggcctatgtcttctacttcttggggtgttctttgtttcccttctgactggggttagtctcctgggtcctattgcaaagacactctgtgccttcatttctacttaaagtcattaggagactgatttgagactggctggaaaacaagtttattctgccatctcagcccaagtgacctgcacaggacagcttgatcaatccttccaaagctgtctgggtctcgtaaacacattttgttatattgcaaagcaaagcataaacatttctagcaaacattagcgcccaccagctatgtaaccctacatggcattcgatgggtcaaatttctttaacttctctgggttctagagtcttgacctcctgatcatttctaatgcgcattctgttggtggcagttcccctgctccccaggcaggtagaagatgaagctatgtgtgtcagttcacctggagtccacctccctctccgggagattactgtggctgagagcccccaatggcacagcttgagcaaatgcagggctcttcccactgtattctcaattccaggccggacttccacaggatcttttccatctc

SEQ ID NO: 136312 - DNA, 1015 bp, Homo sapiens
tgccttctagagatgtaatggaagatttgtgaaataatgtaaaacaaagcaaaataagaaataatgtaaaatactgcacaactacacatatttgggctaattatattggcgagtctgaaaatttgactatttcaagatatgcatctattacttctttaaaatataaataataattagaattaggctccagggctgtctgtcacatataattttcttttattgtaatgcatagataataatgatagttggcttatttatagtgagaattgtttctaaattagtatagcagtgttaaagcaatttataggtctctgcaatcctatttatttcttgacaaagccattcctcttgcattttaaatgacaaatttgcccagagtctgttgaaaatattagtaattttgatttaatgcagtgcaagtatgtgagctattgttggactcattaaggttgctgcggtaatcatctagatggtaggaaggactagagatgatcaatgatatgactggggtataagaacttactcatgtcagaactagggtcaaaacagagatggttggacacacatcctgtgttcattttctctagattccaaagttctagtttttaatcttcaagaaatgtccctgtaggaaaaaaaaatgattttttcttcttacctcataggatcttagttagaatggacttctgtaaaaaaaagcagattaacaagagaaaaacaaagagtagttaacatgtatattttacttacatttaatatgtatatttcacacatacgtgggagacacccagagaatgagtagttctcaaagaggtggtttgaattccaccttatatagcatcttcagcaaagaacagtacatttttaggtaagtgacaagacaaaggaaaaggactttgagtttctagggacagtaacagtaacttgtgggaaggcaaataactggccagttagtaaagcttgttgatgtagattcctctggtgtaatctcccaaccaatatgggtctgccattt

SEQ ID NO: 136313 - DNA, 1074 bp, Homo sapiens
gcagtggataagtcatgcattgaagttcattcaagagatggacgtagagtctagttcaacctcttgtcttcttggggtgagctctgattacaggactttaaggaatggttctttttcaataggttttccggaggtattttatgtatcttacaattaggaactgtcaaaacacttcagtttcagaaatacaaacagctgagaagctgttaattttcagaggcaggaggaaaacttgtattttcagtggtaagttattgttttaataaaacattgtcttgcatcaacctgttgtactaattctccttttcaggggcttttcactaagctgtgcctatgcagatagataaggttgccccacttttaattctttactttttgtaatgctgatggagtttgtgaacaatggctcaagtgagcatggcttaagtttagagaaacataaaaacatagaaattattttaaaagacctataatctctcctgctaatctacctgtgaattgctccaaggaactgggaatagcaattattttaacagctttattgagatataattcacatacatacattttacctatttaaagtgtacaattcaatagtttttaacatattcccagagatgcaactacccccacaatctaattctagagcattttcatttgcctctaaagaaatcctgtatccattaacagtcattcttcatttgctgctcccccttgccctaggcaaccactaacctactttctgtgtctctggattagcctattctggacatctcatataaactgaatcatataatgtgtggtcctttgtgtctggcttctttcatttacatgatgttttcaaggctaattcatgttgtagtgtgtatcaggacttcatttctttttattgtcaaataatagctcatcatgtggatatatgaattatgtaatttataattatgaataatgttgctatgaacattgtgcggatgtgttttacttttccttgcatatatatctatgagtggaattgctggatcatgtgataactctgtgtttaacatcttgaggaactgccagactgttttccac

SEQ ID NO: 136314 - DNA, 1057 bp, Homo sapiens
ttaagagccagactctgagagggaaccattttttgtctggttgagatgtaaataatttctgtcccgtaaaataaatagccccaaaagatatttttgttgctctgtagggtattagctacttttgtatctaagtaagtaagtttttttctttttccctgtattaggaattcataatttagtaatcttattcctgcattccctctttcagtgcctgtgtatacttggtctctcaaattctgctttgaaccagctttactatcctgttattatctgattaatgagataaataaatcaatatgtgctcactttgtattcatatgagagtcatgttttcaatgtttagagtatcatgctttgataaacgccggtctgaaagttagaatttttacagagaagtattaatgcctctgagaaagaattttaaaaataaaactcagtgtgaaagtttttcttcttctagcaaatttggaacagtcagatgagaggtaaacagccagaacatttagttgctaatgatagacagtgagtccagacagcactgttctgaatgttgcaaatgtgatcatcagaaaaaagtattaggagtgaggtagtgcataacaaagagctgagctggataatttgccaggtgagtgtttgacttttttgaaaaaaaaaaaaaagaaaaaaaaagaaagaaaattggattcatttaactttaaaatctgtgtcagttttgaatgtaagataaactattacttgacagttcttcctacctaacagaaacccataaaaatgaattgagatgaaaatgctctagctcttttattcttttggttgaacatgtaattttcaacaatcctctcaattcttttcattgtttgccatgtatccatgggtatgtgtcaaggttaaaaaacttacttggagatactactatcttttgttctgagatatttgacaggtttcaggtgtgtttttcctcataaacttctggaagagacattggtgctcccataatggagatgtgtgggggtttggagactggaggcagtgtgatgtggtggtaaaaagttca

SEQ ID NO: 136315 - DNA, 1080 bp, Homo sapiens
tcaataattggtcctattttgaatactttctgtgactcaaggtaatcagggcattccatatatttctaattttgaaatttgcataattgtgaaaattatttctccaactcttggacctatgagaatgttggaagggaaaactttcacgctgctgacctaaaatcataatgaaaacatgatctgaaggagataacatttcaaggcaagtgtagagagtgcgttaacattttttatgtcactgcagggtgttttctgggtcttgagccaatatgcacgtcttagtcctcatgaccaccaagttcaagctcctgtgcaatttgctgatcgtagatgactagttcctccgtaatgaggaggtgctgtgattctcaagcacggaggccagcacagatctggatctagggaggtgctgtggtccttaaaacacagagccaaaagccaaactgcagctgaaaagaattacagcatttcgctaatgtaatcagggatacacagctgtgttcactgttctctagtcctttcatgttgctagaggggagaaaagatagtttttcctctacccatcataggttcatggccaaggccctgataacaaaaaaacagattaacaagcaaaaagcatacagttgggcacagcagcaggtgcctataatccctgttatagcaggtgcctataattccagttacttggaaggctgaggtgggaggatcccttgaggccagtagttggagactagcctgggcaacagtgaggcaccacctccccacactcacacacacacacactccagccccatttcttaaaaaaaaaaaagagacagagaaaagcatacaaatttatttaatgtaagtattatgggaaccttcataaggaaatgaagattcaaagaaacaggtaaactctggtctttctaaaacagacctgatgaagagtagagagtcatggagagttataatagagcaaaaagagtgtgatctcatggtaatatagtaggggaacttagcaaggcctgtttattcagattcttccctgggatcctgtgtcttcagagataaggatactcgtttcctctgggtatg

SEQ ID NO: 136316 - DNA, 1047 bp, Homo sapiens
ggggttattaccacaataaccagatatatgttgttcagaagattaccactgccaaccctcattctggcaaacaaccctcgcagtgttgctgttgagggctggcaggatctgtgtgtggtgtgcacgtgtgtgcttgttacacaaccctacttatttgtgtcattacctgctaggagaagctcacagctctctagcatttcctttcaccatgtgttcatatgggaacagcttcacataatttgcactttgggcatcttactgtattgatgttcacccctttcagtgcactgactttcaaactgtgctctcggagctggagtctgggctgctgcgggagcaggccatgggggctctgggctccttcctgcttcagctgagcagctccactttatctggctcatgtgccatggttctgcaagagagatttcatctgaagaagagcttcctgtgttctgagactgcacagcttatgccactgattggacatcctaatgtggtcccatgtcagatgtgggctgtgaccctttgcagccgttttacaattcccgttattttagattctcacactgaaaggaaggtgatagtgggacaagttagatggctgggagaaataactcacttataactatctggctgtttgcaaataccaactaatatacaaatcctgtctggctcgtgtggactgcccacctgtgtgttgtatggcctgccaattcccgcatggcgggtggtggtctctgggtagagcttccagcggggtgtggtggctcacgcctgtaatcccagcattttgggaggccgaggtgggcagatcacctgaggtcaggagttcgagaccagcctggcgaacatggtgaaaccccgtatctactaaatgtacaaaaattagccagacgtggtggcacacgctgctgctagggaggctgaggcaggaggagcgtttgaacccgggaggcagaggttgcagtgagctgagattgcaccactgcactccagcttgggcgacagagggagaccctgtctcaaaaaaaaaaaaggcttcctagt

SEQ ID NO: 136317 - DNA, 1068 bp, Homo sapiens
gcctcccaaggtgctgggattatgggcgtgagctactgcacccagccgagcctaacttttatattcaagaacaattcctctttttttcttaataacctgttaattccttaagggttatgaaaactatgaattcactttttctgaagtggagattataggtttgaattgatttggacaaaagtactggtaatgattatttgccctacttataagcagtgtgttcctagaagttcccttcctgtgttctatgtgttgtcttcatctgcaaaggccttttcctataaaagggctaatgacagtgtgtgtagaattatcaaagctgattcaagggtccttagaaatgagacattttgaggaagagggagagatttgttaaaggattcaaaataattaccctgatttgatcactatacattatatgtattgaaatatcactatgtgccccataaatatgtataattattgtcaattaaaaaaagaaagaagattttttctaaactgtattatctataatcctgtatctgagtattaactgcatatccatggtcttttccagacttcatcaagattagtttttatgtagtcttttctggtggcatcactttttcctgtatctggtcttcctgtctatgatctgtgcatatagtatttaatcgcgttaaggaggcatattctgctgattcatttcctactgataaaacacttcacatggtttctggcattttgttagaaaaatgctgaatcgaacatcctgacacagtgttttcgttcttttgaatatttccttagtatagatttccaggagttggattattaggtcaaagggtatgaacacttttatgactgataattctgccagactgttggaaagaagggctgagcaaggtcataatgacattcactgtacttgtgtccctgctttccctagtctttttggtaggattatttttcttcttgctgtattaatggaaacaaaaagagccctatttctgttcattgctaaaaagtgaaaacgttttctacttcgaatgttgatttacttgtgtatatagtgcccaggtctgaagt

SEQ ID NO: 136318 - DNA, 1040 bp, Homo sapiens
acatttttgagacaaggtcttgctctgtcatccaggctggagtgcagtggtgtgatcatagctcactgcaacctccgcctcctaggctctagcaatctttccacctcagcctcctgaatagctgggactgcagcctgtgccaccacacccagctaatttttgtattttttgtagagaccatattgtccaggctggtctcgaacttctggctccagtgatctgtctgccttggtctcccaaagggttgggattgcaggcgtgagccactgcacctggcctcctgttcttagttggctaattttactctaatctcaatgcttcataccagaatatttcttgaataccaaccttgccagtaactgaacaaactacatgtaaagactcttcttgggtattgggtattgggacccaacacagtgaggaagactgaagagtcgtagtgcacttctatcaagaaattaggggaggttatccctgtagtctgcctagatggttcaggttgtctgaaacttaaatggaagttgaggctctgaatacacgtaggacttctgaatctgtggcaggtggtgcagtcttacctgatttagagaatacatagagaggccaggcatctatgtgcaactcagcttcatcggccagaagtgaatgccctatctcacctcactccagtaatacttaacctagccataattagctaaccaaagataggaacaagatgccaaggccaagagcacttgagaattgagcagtccatctaacaagggaggtcatcgagtttcttctccaccctttccctgaagtaactcttggagcaagcttgggacactgtgttcagatggctcggaaagttctggggcactgataagatcagacattttgttgggaattttttacctcagaaaattccagttgtcaaagattcctgtagagcaatatgtggcaattacggtatgggaaaaaaacaacaacaacaaatgaaaggttttatgagagggaagctcaagcaattccattagaacaggtcgactcacccaactgta

SEQ ID NO: 136319 - DNA, 1028 bp, Homo sapiens
ctttaaccaccccagtaacaataaaatagatatgttttgaaactgtgatgttctcctgtctctcaggcttttagtggaaggaatgcaaggaacaaagacatttttgttaatttttgctgctgaatcaggttgcttataacccaagaggcagccagccatcatcatcttgtaggatccagcttgtaggatcatctgataactctgcaaggcagctggtgtgtcaggcttgggcaccatagtctctgccttgccctgaccttccgcttcctgagtgttggggttccaccagctggtgcctggcagcgttctttgcctgagtatgtgatggtgattcccagatgagatctcctaagctaggcccacacagaaccttcctgttccctccctccatcagcgacttgcctgtcaattctctccctgcttttctcctttcactgatgttcagggcaacatttggtactggagacctattttcacctgcttcccacctcttctctagcattttttgccttctccactggttcctacgctagcatgttttaatcagaggatcacagtggcatttataccttggattttctttctgtgctatcatttcaggagaaggtagcgtttattacttctgaaaacagcagggataatgtgaactaataccctagtgtaaggcctaaatactacattttactcttgatgacttaaacttgtattttcattagtaaaatacgatgtgcaaagtttaaaaagccaacagttctgaaaagcctataatgacaaagtcattaatcctcactccctctgtaccactctttagcttcttctagctctttctctgtgtttgtctccatgttgctaaataatctcatagtattctttgaggactttttagacttctcccgctttgttgaaggagtttttaatgctcttaggcagcccctatgcccactgcattttccttctctccccacctcccacccctacacttgacttttggaaatattttctggtcttcaagtgtttgtcaagttcat

SEQ ID NO: 136320 - DNA, 2406 bp, Homo sapiens
catgatttaaaattgccaaggagattgatttctactggaaagagttccatgaaataagtaggacatttccaagggacattgatctaatgctgattgtaactcacaggaaggggttccaggtggattttaagagcactttacagctttgaaacacttgtacacttccacacttatagaattttccctgactctgccttatatcacctacaaactgaggactggactattgggactgtatttctccctgatgtttctcagctctaaaattctagggccttatttacattggagaacaaatgggaaatctaatagaattccttaaaagcttcccgccagtcttgagcatttatcattccatgtgtctttgctgtcttgtatatattcttcttgtttttattatggattctttgactttgctatgcaccaatatagaatatgtattaactcactggttggagtaaagacaggcattttatttttagttataagattttacacaaaaatattctgattttggcaatgcattttaatcaagattttagaaaattgccagtgtttttacacatatgttctgttttcctgggaggaagtaggcgtttgtgcttaatcataacaagaactatctttttttaaacatcttttaaaaaatatttcagatctacagaaaagtggcaagaatagtgcaatgaacaccagtctgcctttcgactagattcactaattgcgaacatctccacatttgctttctctttctctggacagatactttcctccacccctgagtcatttgagaatcaattacaaacatccagatgcttcccccctgagcacctcagcatctgtctcctaaggacaaagacattctcctatgtaaccacaatgccattatcatagcccacgtcaaatctctccaattgttgaatagcatcttaaatcatcttttctctcaaattaccactagtgagctaaaatcaaatggggtgtttattatgttttgcatctggtttttttgtttatttttttgaagccacttcactgtgtcactcaggttggagtgcagtggcgtgaacacagctcactgcagcctcaacctccatgggctcaggtgatcctcctacctcagcctcccgagtagctgggactacaggcatgtgccaccatgcccggatacatatatatatattttgtgtatttcttgtagaaaaatacaacatgggttttgccatgttgcccaggatggtctccaactcctgggctcaaatgatctgcccgcctcagtctcccaaactgctgggattacaggcgtgagccactgcacctggcctattttttgcatctgaagaaatgattttaataactatatgtcatcttagtaacgatataggatgaaagataacatgttctatataatacacccatatattacatatgacgtgtgtatgtatatataaaaattatctctaagaaaaacttttggagcagtattggttaatagtcttctaggctacaaatctcttctttcaagggacaacttctgattagaatcagcccaatgcggccgggcacggtggttcacgcctataatcccagcactttgggaggccgaggtgggcggatcacctgaggtcaggagttcgagaccagcctgaccaacatggagaaacctcatctctactaaaaatacaaaaattagccaggcgtggtggtgcatgtttgtaattccagctactcgggaaactgaggcaggagaattgcttgaacccgggaggtggaagttgcgttgagctgagatcctgccattacactccagcctgggcaataagagcgaaactttgtctcaaaaaaaaaaaaaaaaaaaaaaaaaaaaagaatgggcccaatgctgcctattgtcagaatttatacttgtagcgaatgctagcaaaacttgaacttgaaaaacagcctgtgcggcttcttaagtttttacttgctcacttctaccagtcacatctcttgtctcttatttttctctttacccatagacttaaaagcatgagggtaaacttgcacttggaagcatgaaaaatccactaatagatactcttgtgaaacattaactaaaaatatatggagacaagtgataattacagggtgtgttcacaagagtgcgttttgaaaccagagaaggggggaaacgacaggcacaagggtggtaatgggaaaatggagaggcaaaggttatttatcacctcactgttcaattgtttgatctttggacaggcttaatttttcctaggaaagccaagagtaacatattttaagagctctgggcaccacaggcttctgtgggttattctgcttgaaggtgacagcatgcaatgtcttgaaaagcaccttcaggaagagggtacagtgttagtacct

SEQ ID NO: 136321 - DNA, 1053 bp, Homo sapiens
tctagcttctaagttacagggaatatctccagatggcataaactcaccttctctccagaccattatctttcacaccattctaaaaggaagcagagtattaatgcaaacagaaggagctctaggtagtaccaaaatcacactaacctggttgcccaatagtgaaacagctagaagaatcaaagaggagtttgaagagctgagcagaatcatgacacttttatagtctttacgggcacgccaccctgattatgaaaatttccttttgttggccatttaagggtaattattaatggtttttgaaactcaggcttaagactgcatgaaccccataattaagggcaagatccagtaaaggtccatctcgacagttgcttcatggttcagagtcgtaagcttggatttttttccccctgagattatattttccctccaatgtagaattatatttgctcacagttcacatttcataaagcttagatatagaggattcttttcaatttagttgcatatttaggctttaaaaaataactttcttcatatccagaaaaaataaatgctgccctgtgcggtagctcatgcctgtaatcccagcactttgggaggccgaggcaggaggattgcttgaggtgaggagtttgataccagcctggtcaacacagcaagacatttctactgaaaaatttaaaaaatcagccaggtgtgatggtacatgcctgtagtcccagctactgtagaggctgaggtgggaggattccttaagcctgggaggttgaggcaacagtgagccatgattgtgccactgcactccagcctgggtgacagagtgagatcctgtctgtaaaaaagaaaaaatgctgtcatagaaggacaatattacatagtttaaaaaattacggtatggccattgaagtccttctgatgtctttacatattagcagcttaaatatttgaatacatgaatgaatgaatggaagtattgcttcagaagcaggtttaagaagtggaaagaagatactcagtaatttgtggttttatttggcaaatcaatattga

SEQ ID NO: 136322 - DNA, 1032 bp, Homo sapiens
ggaatgtaatgagtcatgagaaatgtttaagagttttaataccatgagaatgctcttgtgttgaattagaatgatacaaattgtatttaaacagtccctcaactgtttataaaaatctcctctgtttcttggtgggttagaaatcacctttttttttttttgagatagagtcttgctctgtcacctaggttggactggagtgcaatagcacaatcttggctcactgcaacctccgcctcccgggctcagataatcctcctgcctcagcctcccgagtaactgggattgtaggtgtgcgccactatgcctggctaatttttgtattttttgtagagacagggtttcaccatgctgcccaggctagtcttgaactattagactcaagcgatccacctgcctcagcctcccaaagtggtgggattacaggcgtgagccactgcgcccggccacctttctatttttctggttaactttctaaatgtttgaaatggcttccaatgaatttcattttattattgggggaaacttccacacttattttctttcttcccaaatctccacaagtatactctcctcccaaaatttagatagttgtatttttctgattattccaaataagagtgctgagaggctaatcacaaagagcagcagccagagatttacaaagtgttctcttactattgaacattttcacttattctttttgataggacacacatccatatggctcagaaatcaaaatgtccaagaatttgtcaagtgaatagtggctctcttattcctgcccccccatctgcccagtcctcttgaagcacgtaaccaatgataatagtttctactgtgcacttgcagagattttccaggaaatttcaagcaccttgccttccaagtcactatataccagctactcatctcgtgcccagttcactttggtcaccctgtccccaccatccctgtgcttacatcaaccggtacttctctctctctgagctcaaacaccccagagagaagcctggccctgcccagcctttt

SEQ ID NO: 136323 - DNA, 1052 bp, Homo sapiens
atacaattcatataccacaaaatttagccatttaaactgtataatccggccagatgcggtggctcacgcctgtaatcccaacactttgggaggcctaggcaggtcaatcacttgaggtcaggagttcgagactagactggccaacaagttgaaaccccatctctactaaaaatacaaaaaattagctgggcgtgctggtgcatgcttgtaatcccagctgctagggaggctgacacaggaaaattgcttgaacccaggaggcgttggttgcagtgagctgagatcgtgccattgcactccagcctgggcaacagagtgagactttgtctcaaaaaacaaacaaacaaaaaactgtataatccaatggtttttagcatattcacggatctgtgccactctcattacaagcaattttgggccattttcattactccaaaaagaaaccccacacgccttagctgacacccccaagcctcctatctccaccagccccaggcaaccattagtctaccttctgtcttcatagatttgcctgtttgaatcatttaatataaatggaatcatccaatatgtagccttttgtgactggttgcttttacttaggataatgttttcaaagtctgtctatgttgtaacacgtatcagtactttgtttctttttattgctgattaatatttcattatatggacatgaaacattttatttatccattgatgaacatctgcattgtttctactttttggcattgtgactaacgctgctgtgaacattcatgtgcaagtttttgtgtggacatatgttttcatttcaccaggagtggaatttctgagtcatatggtaattctgtgtttaaccctttgaggagctgtaggactgttttccaaagtggctgcaacattttaatttcctgccagcaatgtatgagggtcctaatttgtccatatccttgtgaacatttgttatttctgtctttttgatgatagccatcctagtggatgtgaagtggtgtctcatcgtggctttgatttgcagttgcctgatggctaaggat

SEQ ID NO: 136324 - DNA, 1047 bp, Homo sapiens
attttcatttgccactacttaattagcatttgaaatcttaggctgatttttccaatttaactctttctgatgatgtcagagatcttaacatttttataatagtgttttgaaagaaccttaacctattttcattcagtttcttttcccagtggcattcttaattgaattgggtttctcagttagtatgctctgatgccacaaagacttatcgtaaaatatatattgaggtcagttgtgagaaattgtcacaatttcttcataacattgggaagatttcagaaaaaaagttcagggtgtgaagtcatataattggttctgaaaatagagcttgagcatagtcactagtgattggaccaagcattgcacgaatggctgaatacactagtttaaaaaaaaaatggatagtcaagtttaccctcattttgtattgatttcagtggtattcttgtgcctggaggctttggaatcagaggaacattgggaaaactccaggcgatttcttgggcaaggacaaagaagattccttttctgggtaaaactcatgtttattgaccctaactatgagtttattagatttttgacacctaggaggggtaacactaaaggtttgttatcgtaaaggtgtgaactcggatttgaaagttcaggtgccaaatagtctgctatagggtcaacaaactatattctaaatttggcccacagcctgtttttatgaataaagctttattggaacacagccacaccaatttgtttacatattgtctatggctgcttttgtggtccaacgtcagagtttcagaccctacggcctagaagctttactatctgaaagaggctagaatctttactatgtgaccctttacagaaaacgtttctcatcctaggagaacttgctgctattccagctgggtagcagaggctgggagaaggctccatctgcaactgtgcttaccttctccaattcccacctcagtctccagagtagctgggactacaggtacacaccactgtgcctggctaatttttgtgtgtgtgtgtgtttttttt

SEQ ID NO: 136325 - DNA, 1221 bp, Homo sapiens
cgactcactgcaacctccgcctcctgggttccagcgattctcctgcgtcagcctcttgagttgctgggattataggcacatgtcaccatgcccagctaatttttgcatttttaatacaggtggggtttcaccatgttggtcaggctggtctcgaactcctgacatcaggtgatctgcccgcctcggcctcccatagtgctgggattagttttctaattaaatgaagctaaccttgtgcaaattctgatgctagctttggttgctgggtttttgtgtgtgcgtgtgtgtgtgttatatcagtgtaaataaactgccagtctctgctgaattttgtttcattcttgtggtggcatatttgaatagatccatctaagtatggtgatttctcatcgccacttaggtcatatgtatccatgatgtttcttccacataccgagttcctgtgcttttagaggaacaaagcattgtgaaatattttaaggagagattgcacctgcccatcggtgattctgcaagtaatttgctttttaagtggagaaatatggctgacaggtaagcgaaaggaattacttgtataatctttaataatttttgagtttgggggtagaactaagacctacttgaaagggtaagcgtgtgtatttggcattttgcgtgtgcacattttggtctggatatgtctaaagatggagcatactgttgcggtgctttgctgtattatttgaagatttctggagcctttgattttgttatacataaaccaaagtgaattaaaggaattcgaattctggaaggaatgtttttttagctctggaaggattctgatttatttgatttatttgctagttcattttttagtttctgaatatttaaaatttttttttgtttgttttcttttttcttttttgagagtcttgctctgtcacccaggcgggagtgcagtggcacgatctcggctcactgcaacctccacctcctgggctcaagtcatcctcccacttcagcctcctgagtagctgagactagaggcacacaccaccacacccggctaatatatatttttttttttttgtagagacgggatttttctatgttacccacactggtcttgaactcctgggctcaagtgatctgcccaccttggcctcccaaagtgctgggattataggcatgagccaccatgcctggccttaaacagttttaaacttcacaggttttttg

SEQ ID NO: 136326 - DNA, 1035 bp, Homo sapiens
gcttgcctgtttttgtaagtaaagttttattggcatgcagtcacacccattcatttacatattgtctgtagctgctttcacactgcacctcaattgaggatcaggacagtgactgtgtcacctgcaaacctaaaatatttcccatctggcccttttgagaaaaagtttgttaaccccgatctagctcttttcttgtagttaatgaagcaacacttgtgagcctggactctgttcaccagagacgtctcgatgtttcgagttcttactgatacacttatgctgaatttgattatacttatattagtgctcagaccaatttctaatagtccagtggaatgtccaaagtgaacaagtacatacttggccaagtttcttgtaaaaagaaatgaatgtggcatcctgctgaaagtgaatcctgtttgctgaagcataactggctttgacagattgtctgccgaagttcaacgcccattgagatggccgtgaaggagaagatttctatgttttgtcacgtgaaccctgaacaggttggtgctgctctttagattttattgtctggcaggcacttctgctgatgccagtgttttgtacctcttcaatgatcatattacttttcacggcatttatgcaagcactggggaaccctgatccaaccatgattccctagcccttaagtgagataggatgcatgtttctttgcatgatcactcaacttatgtcacaaaaccagggtgggctttcttttcttgagacagagtgtcactctgtcacccaggctggagtgcagtggcatgatctcagctcaccgcaacctctgcctcctgggttcaagcaattctcttattttagcctcctgagcagctgagattataggcatgcgccaccacgcctggctaatttttttgtatttttagtagagatggggttttgccatgttggccaggctggtctcgaactcctgacctcagatgatccgcccgcctcagcctcccatagtgctgggattacaggcgtgagccatcgtgcccagtacca

SEQ ID NO: 136327 - DNA, 1303 bp, Homo sapiens
cccgcctcggcctcccaaagtgctgggattacaagcatgagccactgcgcctggccttattgttagttttaatgaagcaatgggctactgaagagtatacacgtggagaaatcttttttgaagttttattttttatttttatattttttcagagaaagggtctcgctctgtcatctaggctggaatgcagtgggatgatcatgactcactgcagccttgacctcctgggctcaagtgatcctcctgccttggcctcccaaagcgctgggatcataggtgtgagccgccatacccagccacaatttagtgattttgaacgtatttataaacctctgtgtaaccatcaaactttagttctcatgctcggtttattaagaactctttttattagcttgtgtactgtgggagatgtgtggtcatttgtgtctttttttgtttgttttccattcccagctgggaggcaccattggagacatcgaaggaatgccgtttgtggaggcgtttagacaattccagtttaaggcgaaaagagagaatttctgtaatatccacgttagccttgtcccacaggtgggctttccagataagtatgtggacagcaactttgataagttttcctatgatattctatgtgtcctgcatttgaaagtggggcaccattaatcatccataggagctagtgtccagtgtgctgacgggaccccattttttttcagctcagtgctaccggagaacaaaaaaccaaacccacccaaaacagcgtccgcgcactgaggggtttaggcctgtctccagatctggtgagttgaggacagtgggtaagtctatcctgaaggtctctgggagcaggaccttcacttcttttttttttttttttttaatttgagacggagtcttgctctgtcacccaggctggagtgcagtggtgcagtcttggctcattgcaacctccgcctcctgggttcaagcgattctcctgtctcagcctccagagtatctggactacaggcacatgccaccacacctggataattttggtatttttagtagagacagagttttgtcatgttggctaggctggtcttgaattcctgacctcaggtgatccgcccgcctcagcctcccaaagtgcttgggattacagccaagagccaccatgcctggctgcccttcacttctttatctttatcatcatctaagtcctttctcattctcaaacggctcctgtgacaatgaggtttttctatctgggagccggaaaaggcttattcccttagcctcaagtgttgcttcaatctgttct

SEQ ID NO: 136328 - DNA, 1612 bp, Homo sapiens
aatttatttgaagaaacaaggttgtctgtcctgtggcttctcatagtctagattctgctgacagcatcccattgtgttgtttaacaccttattctgtcctcttattccctgttgggcttggcggctttgggttagttttgaattgggctcaggaggaggctaaagacatccaattctgcgggaacgcagccctgcgggacctgaaaaggcgagactaagtcaccagccaagctgcctagaggcaatcttaaaatgggactggctaggactgtgacaaagacaccgtccacatgcctactaggtcagtcacctacaaagctggcgaatgaggaaaagagggaaggcagggctacgctgggaaagctctttgtcccctatccacgcgcacaaaacagttgtcacaactgacgtcaccaggggcggagcctttggacggaagtgacgcttgcgcggccgcggcggagtcgtcatagaggcggggctgcggcggctgcggtgttcctccgacttccggacatctccctgggagtcgcgcagagtggagtcaaaggcaaccagtgctcgctgcggtctctggggatcgggaccgcggcggcggcccgcgagcgggatgttccggggcttgagcagttggttgggcttgcagcagccggtggcaggcggtgggcagcccaatggagatgctccacccgagcagccgtccgagacggtggctgagtctgcggaggaggagctgcagcaagcgggagaccaggagctcctccaccaggccaaagacttcggcagtgagtctaccctggctctgggaccgggaaggggggggcgcattcctcctctgggacggccctggggcgcgggcccgactggctgggggatgagggggccgaggtgggaggcaggggaggaagatgtgtctgtcggtcagtcctctccgggtcgggagagattggtgaggatctggacgaggccagagcttcatctagcagtcaggtcctgtccctgaagttcctggtgacaagtctacaaagtttgcagacattggaatcaggtatgcagtcaagcagtgtgacccgacgtcttcaggtttgacaaggaatcttttttgttcaactcgaaaaccttcatttacaccccccagatcggggatagttggcgagcttgaattggttgaaaaaataattttttgcccctaggtcagaacgtgttgtctgaagtaaactgacagttactgaatgtcaatgtctgccccggtcaaatgctttttaggtacagagacctttttccttaaggagggagagaaaatgccaactgtctgctatacgcaagttgcagtactagatgttttatgaaagatatcccatttcatctgttaaacacccccagtgagttgggggaacaagcccagagttattgggccaaagttatactgatagtgagtggtagaagtggaatttgagcttcgatctttctcattttaaagcccgtgctctttccaagtttacagtctacaggggttgggggacaggtgataatagacgtggagtaaacacatgctgtagtaattctcatttctggagagaccatggtgggcttcagtgatcacagaaagcat

SEQ ID NO: 136329 - DNA, 1037 bp, Homo sapiens
cctcagcctcccaagtagctgggactacaggcacgcacaacgtctggctaacttttgtatttttttgtagagagagggttttgtcatgtggcccaagctggtctgcaactcctgggctcaagcaatccacccacctcggcctcccaaagtgctgggattacaggtgtgagccaccatgcctggcctcaagtagagttttttttttttttaccaaatgcatatgtgcatataactcataataataagtctggttattacggttaatgttcatatttggaacttattggtaaattgctacttttagtggtcatgcagaaactttcatgctttgaaaccatagactgcagtgtaaccatcatgacctatttttttctcttttcttctttgccattaaaaactgtatagaagcagctgtgcccccatgggttgacactaacgatgaagaaacaattcaacaacaaattttggccttatcagctgtaagtatcttgtggtaccccagatagaacatactttcttctgtcatgatatatctctgttgatgtgactttagtagaatttatttttctatacagtttttaaaatattttgagatgttaggaatgtacacattaacacatgatgtgtacattaacaaaatgtacacataaaatttattttttattttttttttgagatggagtcttgctctgtcacccaggctggagtgtagtggtgcaattttggctcactgcaacctccaccacccgggttcaaatgattctcctgcctcagcctcctgaatagctgggactacaggcatgcgccaccatgcccagctaatttttgtgtggttttttttttttttttttttttttttgagacaaagtctcgctctgtcacccagcctggagcgcagtggcacgatctcggctcactgcaaccttctcctcccaggttcaagcgattctcttgcctcagcctcccaagtagctggtattacaggtgcccgccaccacgccctgctaatttttgtattttgagtagagacggggttt

SEQ ID NO: 136330 - DNA, 1052 bp, Homo sapiens
gcaagatgggaggcccaggggctctctgggcttccacccttgctgcagacaactcagtacagttttctctggtcaacgaagtagactactgtttgcctaggccgggtgcagttgctcatgcctgtaattccaggactttgggaggccaaggcaggcagattgtctgagaccagcctgggcaaatagtgaaaccctgtttctacttaaaaaaaaaaaatacaaaaaattagagcctggtgtggtggcacatgcctgtaatctcagctactcgggaggctgaggcaggagaattgcttgaacccggcagacagaggttgcagtgcaccaagatcgtaccatttgcactccaacctgggcgacagagtgagactctgtctccaaaaaaaaaaaaaaaagattactgtctgcccttgacatttccacttgacagctttccacttgactgcccttgacagcgtccactgtcctctcctctctcattctctttgtccttgtgtttttatgtatgtaattccttttctgttactttcctggcatcttcagagggagcacagatgaacacatgtttgttttgctatgcttacccagccacatagcggttttaacaaatatttgctagccttttggttcacacagcagcacaggttttctgtctgtgaaaacaccactctggaagtgttcttccagactcagaataacagttatatggaatctttttttctttgtagtgaaactcttccctccataattattaacatattagtggtaaatttctagagccctccccaaccctcccataagaaaagtatgttttatggcaaaaaaaaaaaaaaaaaaaaatctcattagaaatttcatctttagactttgtcttttttctttctttttttttttttgagatggaatctcactctgtcgcccaggctggagtgcaatggcgtgatctcggctcactgcaacctccgcctcctgggttcaagtgattctgctgcctcagcttcccgagtagctgggattacaagcgcccgccaccacacccagctaatttttgt

SEQ ID NO: 136331 - DNA, 1027 bp, Homo sapiens
gagactccgtctcaaaaaaaaaaaaaaaaaaaattagcaaggcatagtggcatgtgcctgtagtctcagccacccgggaggctgaggcagaagcatcacctgggctggtgagatcaaggctacagtgagccatgttcacaccactgcactccggcctggatgacagagtgagactttgtctcaaaaaaaaataataataattaccaatttggccaatgggagactattcaagctgacttgtgtctttctaactcatccccatcatttcttcacacgtttccttgctttctggcacaagatagtattcttcctctgctctaaccctggaatcagccatttccccagggagctctggatccttttagtggaaagtctaaatcttggtattttgcaagatctggatgctaggtgtgctcattgccattggggtgccactgctctgcatgctctcagtggacacagccagggaatgtgtgtgtgctcatttctgtgtggaatgaaaaccatgtgttcatggtgctacctcatgacggaggtcattttcattttttccctttccatgtttgtagctctcctctctgatggtgagaaacctggtttctactatctttaatatttttacttattccctgtgcatgtggctgatctgtcatttttgctgccactcactcctctgctcaaacacccttctctccctgcttggttctcactctccgttccaggccacccccctgtgtggacacttacctcacccacttgggcaccaacacatcacaccaggtgattctaataggtagccaggtttgagaaccaccaagagttttcaggttgaactgcacttcaatctttttatcaagcatttcccaccccattgctaactcttactggttactagttattagcaagctgccaaacattctctttcataaggaacaacagccacaatgcttgcttctcactgctggaaggcatttaatcctcttgagaaacagcaagtgattggtggagtcctggctctgcttctggt

SEQ ID NO: 136332 - DNA, 1039 bp, Homo sapiens
cctgagatactaaaaattacagcagctaggactttacgtaggtaattgagatggaccgaattgtgaacaccagcattatgaattcagagagaatctttttcttctcctttgtttcttttagaggattctgcagattgggaaaaagaactgcagcaggaacttcaagaatatgaagtggtgacagaatctgaaaaacgagatgaaaactgggataaggaaatagagaaaatgcttcaagaggaaaattagctgttcctgaaatagaagaataatccttaacagtctgcaaactgacattaaattctagatgttgacaattactgaatcagaaggcatgaaagagtataattttatgaaattcaaaattattcttttttcaagttgaaacttgcctcttctactttaaaaaagtatatagaacagttacttctaataatcagaaagagatgttttatagaacatttctttaatataaagttagagatgtcttcataggcagtatggctatctttgccacagaaacataagtaaaattttagagttctgttttccatgaggtcaaaaatataatttattcctcagtcatggttttctaaatatctgtactccacattccattttaattgatatgagggtgttaaagtacctacttaatgggttgattactatcaaaatgaccaaattataccaaagaacttaagaggaagcactttcagaactattcacttgccaggtattttctaaaattccacctgaaagccaaaagataaaataaataagttgattttaatgatataagcatcacacaattttacattaagaaatactgtgcaggccatgcgtggtggctcaggcctgtaatcccagcactttgggaggccgaggtgggcagatcaccggaggtcaggagttcgagaccagccttgccaacatagtgaaaccctgtctctactaaaaatacaaaaattagccgggcatggtggcaggcacctgtaatcccagctactagggaggcttttgaacccaggaggcagaggtt

SEQ ID NO: 136333 - DNA, 5507 bp, Homo sapiens
ccccttttcagaacgccgccttatgtcccaatcccgatccgagcctgcgagctgtggccgcacgccctgctgggacttgtagtccactcccgagtcccattcccgatccgcgcagactcacacggcctctatctgcccttcggtcttgctgaagcccagcccagtattcaatgctccccatccccatctcgctccgtcccctcgggggccaacctcctccggtcacgtgggaagtctcacatgcggcgattggtcgtgggggctcgggggcggggcgaaaggccctgcgagattctgtgccccttgtcgggccgcttgtttggctgctgccgtcacctcatggcgacgcgggtagaggaggcagcgcggggaagaggcggcggcgccgaagaggcgactgaggccggacggggcggacggcgacgcagcccgcggcagaaggtcagtcagggggacgccctcgttgttgtcgggcccgggggatgtttgggctccctttttcagggtccacctcttctctctccctggttacctatagccacgggacgaacatccggtcttcttccctcccgggggtgacgacagtgggagcaggtgggggggggtgggaccgcgatggatggggtgggaagggacgacggttggggtttggcggcgcgcggcggggaagccgggagggagggcagggggcgcacgcggttctaagggagaaggggtgcgaggcgggggtgcgccaggtgtgacagccacgtgcggccagcaccgcggggatccgggcgccaggcgttccttctcccagtcaccgccgtcaccgtgctcccggcgctgagcgccgccgtccgggggctcgctggggtcgtgggctcgccctcctggcgtcgggcaggtgcgcagggcgcgctgcggggtgcccccgggctgctcaggctaggctgttgcgcagtaagataaccgcgcgggagccggggtgtgcttggccccccttcccccgcccccctgcgctccccgccactgcgcgggcgggcaggcgagcgggtgagtgtcgcagggccggtgcgagcgggacgctcggcccccgggacctagaccccggggctccgagggcttggctgcacgtggggccggggatggatggggaggcgatgctggaggacctcggtcctgcagagttgggatatcgcatgatagctggtcctcccagtcctatttaccaccctcctcttttttcccctcttttttttctttcatttattatttttttaatttgatgagtggaaacttgaatgccttcccgaccctggccttgggtctttcttaatctgggaaacaggccggactgttccccttgccttacttgactcacgtcaaggagttttcagtccctccctagatacaggaaaattgagacctctttcagaacgggacaattccacttgttctggagctcagtgggtggagtttgaaaaagattgcacaacgaacggggtacagggttttcggggccctggaatggataattgcggggactgagactgggaaggtgggaaccccatctctttttttccttgcaggtgaacatactgaaacgttcgacttgttggatatcttgcttgatcaccgagggctatttaatattacttaattatgtatttgaacactcttaactcctgtatgaaattacgaaataatatttttctaatgcaattcataaacttcaaatgggagaacaaaggtccagtttacgtctgagcagagtgttaagaattagctttttggggcctgtttctaaggtcaggtattttcatgtttctgcatgacagtgttactacttctcaattacctctctttctttctctccctctctttgtattctaaaagaaagatccagtgcttgcaggactgaaaaagaagctgtggaccaatgtcctgtaagggattcaacaccatcactttggacacttcacttattccctaagggtggagtgccaatctcagtgtttgatttcgtaggttccccaggggaggaggactctgataaaaagccactgcaattgaggatataagttcccttttatgacactgggataaggacaaaaagtcgttgaattaggaactgaggtttaatcaactagcatttaaaataaccaagataggaggtaatgaccctttgaggtgcagagctctggttaacagctggataggaatagtcatgtgtgtgtctactcatttttgtttatgtacctcatactccattcttctttgcttatgctcttctgagcatctttttctttttgatttctaactgacagtgacggcattcaaatacatggtaaaatattaatctttgaattttcatttaacaaattgggtgaattatcttgtgtttgcaagaatcatttttaagccagctatggtggcatgcacctgtagtaccacctagtcaggagactgaagcaggaggctagcctgggccgcagagtgagaccctgtctcttaaaaaaacaaacaaacttgttgtgttttttttttttttttttgagtcagagtcttgctctgttacccaggctgcagtgcagtgatgcaatcttggctcactgcatcttccacctcgtgggttccagcgattctcgtgcctcagcctcctgagtagctgggattacagatgtgtgctaccacgcccagctaatttttatatttttagtagaaacagggtttcaccatgttggccaggctggtcttgaactcctggcctcaggtaagccacccaccttggccttccaaagtggcgggattacaggcatgagccactgcaactggccaaaaatttttttaaaaatcatttttacattacttcattgtgtcccttaattttaaaatttcttttgggtcactgacttgaaaaaatatttcttaattccagcttaacttctatcctttttttcaggaagcagaaatgtttaatgaattgagttttttgaaaatattgaaagaattaaaagaaaagtgagtgttttgtcattatctagttacattatgggacctgaagtgaggaacaattggagatgggcttttttggttcctggttgctttaaccatctgcctagtcactcgcgacctgctcagttaattgtggcattgtttcataactacaaccatttgaatggtctcttgaggtaaccttttgcttctaaaggtaatgttacagtacattactaggggtctcttcaggaattttctaaaactgtgctgatagtagccactagtgacatgtagctaaatttgttaactaaaattaaaattaaaaatttttttcttcagttatactaaccaagtttcaggtattcagtagccagtgtggctagtggctactgtattagagcagatctagaatattttcatcattgcataaaaattttatcagcattggtctaaaaagatgagtacacaatatctagtatgtcaggcattttttagaacatcaggctcattcgttttacttcctaaatccctatgtagaatttgctttataaggttgatttaaaaaaaaattaatagactttttttgggaatggtttttagttttacagaaaaattgagtagaaagtacagtttccatataccccctcacacacaccctttccccctattattattattatttttgagatggggtttcgctcttgttgcccaggctagagtgcaatggcatgatcttggctcaccacaacctccgcctcccgggttcaagcaattctcctgcctcagcctcccaagtagctgggattacaggcatgtgccaccacgcccggctaattttttttgtatttttagtagagacggggtttctccatgttggtcaggctagtctcaaactcctgacctcaggtgatctgcccgcctcggcctcccaaagtgctgaggttacaggtgtgagccactgcgcccgacccttatcccctattatttacatcttgcattagtgtgatacttgtgttaaaattcatgagccaatattgctatattattattgactaagtccatagtttacgttagggttcactctggtgctatatattctatgcattttgacaaatgtgtagtgacatggatccacgattatagtatcacacagaagagtttcacagtcctataaatcccttgtgctctacctattcatccctctctcccttcccctagactactgacagccactgattttattttttttaaattttagagttgggggtcctgctatgttgcccaggctggtcttgaactcctaggctcaggcgatcgttctgccttggcctcccaaagtgctggaattataagtatgagccaccacacctggcctgatctttttactgtctccatagttttgccttttccagcttgtctaaggttggtattttttttctttactagatttttgcttgggaatgttaaaaattatttaactactattaaactaatttttaggtccataaaccatgtggaaggataatacaaggtacctaggcccaaattaacaaaatcttgcatttacataatgccctgtagtttttatggcacatttgcacatacattaactctttcagcaccagtcagatgctgtggagaaggctgggcagctttcactgccctcatttgctgatgacaagctgctcaacgatgttaactcacttgcctaaggggtgaagctgagtctggaacccaatactctttcatctatactacagtaatgagtagtgtagtactgggtaaatctatggattttggagttgggactcctggctttctgccgcccatagctctgcaaccttgggcaagtttctcaatctttctaagcttcagttgcatcatctgtaaagaggggataatgctcatacctaccacaggggattactgtgaagaaggagttgatgggacacatttggcacagtgtgggatatgtagaattttacatggtttggaggggaggacatatggaagagattaatttctcttgcatttagggtgctaattttgtaaatccatcttccaacctttatattctctcctcttcccagaatctctccgtgatagacataatgaggagaaatcaggtcagggttgggcaagagtatgggggcaggaaaaagccatttcattaatcttgtttttctccccatttgccaacttgatgaacttccactcttctggtacagagattaagtaatgagaagtaaagtaaagtgatcttctgcttacaccattgttttctaattgtatcaccaagctttggtaaatttatttttttcttttactgggatcaaataggacaagcagtaatgagaacaaaccagatacagcatattctgctattcatgccacattttcatatcatattatgtcatatttattatgttattggaacgtgttttatttatttatttttaatttattttgtttttttgagatggagtcttgttctgtagcccaggcaggagtgcaatggcgcaatctca

SEQ ID NO: 136334 - DNA, 1416 bp, Homo sapiens
tctgcaacctccgcctcccgggttcaagccattctcctgcctcagcctcccgagtaactgggattacaggcacccgccaccacgcccagctaatttttgtatttttagtagagatggggtttcaccatgttggccaggctggcctcgaactcctgacctcagtttatctgcccgcctcagcctcccaaagttctaggattacaggtgtgagccaccgcaccaggccaagatattttcttccagtattttcttccagcacttctctgtgtgtgtatgtacatacacacagatggttcctggcttactgtggttcaacttgcattgttgactttaggatggatttatcactgtgtaaccccaatgtatgttgagcagcatctgtatacatatatatagtgcgtatacaaaatatacagtacattctgttttgtaattcatttttgtacatcgtattttgggagcatctcttcccattattaaataggcttctctaagatggctgggccaggagaaggatgtttgaacagtagtagacagaaggtagttatgaagcagtatatttttgtggttaagagcatggactcagaagctagactgctagagttcaaatctttgccctgcagtttactaactgtgaccttaggcaggatacttaactttacatgccatagtttgctcatctctaaaatggagaaaataatagtgcctacctagtggcattgttgtgaggattaagctaattaatataggaaagttcttacagtagtgcctggatgtactatttactgtataagtattagctactactactattatttatataagagattgatccaagaaaaggcatccagaatgggcatcagagagagaagacagagtaggaaattgtactgggcatatgatatagaattctctggttgaggagatgaggtctgagaaatcatttacaatttaataaagttattggcctaagaatttgcttaatattcaatagcccaggtacagagcctcaagtaggttgttaattgaatagtccttgtggtagaaaaattggggcctgctatttcaagagtatttgtagactgtggtttgaatcaagtcctgttggaactgggcttattaataaacaaaaagattttgtagagccaaagtatatctttcattagcaaatgtaaaaaataccccaataccacatcaaaattagttgtacaagagagaagggaaatgtaatactgtcttgcttctaatgataaaataaaaatagtggtattttcattttttgtttgtttgagacagagtcttgctctattgcccaggctggagtacagtggtgtgatctcagctcactgcaacctccacctcctgggttcaaacaattcttgtgcctcagcctcccgagtttccaggcacgtgcca

SEQ ID NO: 136335 - DNA, 2650 bp, Homo sapiens
ttcaaataacttaagagtttcagtatttgtaagttttttctatctgaattaggcttagagtgtggcatcaaaccataactctgaaatagataacccatttccccttaatgtgttaattttttttaagatgtcaaagtattacatgcacattattttaaaagtgtcatgaaaagcagcatatctttaatctctcttcttagaggaaaatatttgttttggttcctcttacttcttgaataatgtataaattgcaacttttaaaataaactttactgaaatacataaattgagaaaagtatacaaatcataaatgttaggcttaatgaattttcacaaagtgaatgtgtcacctcatctagaccaagaaatagaacactacaagcaccccaggaggccccacccccaatggtaaccgctatcctgatttctagcaccatttattagcttgccttgtttttgaactttatacataaatgatttcctatagtagatactcttctagcacctttttcacaacataggtctgtgaaactcatctatgtggttgcatccaacagtagttcattctcactgctttgatactatagtttatccattctgctactgatagaaatttgggttgattccattttggagctattaggaatagtgctcctttattcttggactttggatacacatatgtacacacttgggcaaaatcccaggagtagagttaactgggttagaaggtatccatatattgccaaagagtttttcaaagtgtccttgccaatttgttcttatgaaagcacagtactggatttatcaacattagactataaaatataagattttattttccttaacctctctatcccctcctactttgatattttgagttcttcagttgcacaaaatgattataacctaaaatctcaaatatctgctctcccataaattttgaaagtagcttttgtccatttgtgataagagaaggatactaaacacctcctcacctcaacagtattattcagaaaaggaagaggccctctttcatacagagagtaaatgcacagaatttaaatttgtgccacatcatgaccaggaagtgttcacaaggggaaaaaactcaaatagggttaacaatgtgatagaagacagttactgacataagaataacatactggaataaaggcatctttaccatgtgtattagggcagggatagctgcttaaaatatcagtctcaaaatttccatggcttagcatgagagaagtttatttcttgttcacctatagtccagtgtaggttttctttgtaagtagggtggctttcctgtatgtacataggatatggaggcctaggcttcattaatcctgtggctctgccatcccttagggtcttggagatgtctgcattttgccagagtcggggagagatggttgagaaagaacttgtgcttctaagaataaaagtcttggacagtcgtgtcctatgcccacattcagttggtgggaacttcacgtggaagtcgccccttggtgtaagggggctggggaatagtccctggctgggcacttgtctcatagtgccaactccacaggaacttgggggagcatggggttttgatggatagctagctagccatccctgctgtactgtctccttgaggataagattagaataattaatattcattaactggggacagtttcacttctgttaaggtgctaattatgttaagtggtgaatttttatgtggaaatcaatttagatttataactaaatgggtttcttgcctcctttggtactgaatagttgtgtgattcattttaactaatttccttatactttatagttaggtcacctctcagtgaaacctagaaagtaccatatttacatcaattttgcaaaccactaaggaagaaaaaactatcaggctatgatgttccattgcttgtaaacattgattacattagatttaaccccttctccatcttttttctccttctcctttcttctagtttgaaattggcacaatggaagaagctggaatttgtgggctaggggtgaaagcagatatgttgtgtaactctcaatcaaatgatattcttcaacatcaaggctcaaattgtggtggcacaagtaacaagcattcattggaagaggatgaaggcagtgactttataacagagaacaggaatttggtgagcccagcatactgcacgcaagaatcaagagaggaaatccctgggggagaagctcgaacagatccccctgatggtcagcaagattcagagtgcaacaggaacaaagaaaaaactttaggtaataatccgttcagtggttggacgtttcacatgctaatcattttacttgtgttttctgcagcccagataattttgaacacagccactttagaggtgcttagccaacacccctagtgtcttcggtgaggtcagtccatgtgtctgctgcagttatgtgcaggaggcgaaaacagcagagaggacgcttagttttttttttttccaaataatcaagaattggctaattaaaaaattttttttgtagagacaggttctcactgtgttgcccaggctggtctcaaactcctaagctcaagcagtcctctcctgcctcggcctcccaaagtgctgagatttca

SEQ ID NO: 136336 - DNA, 1176 bp, Homo sapiens
gcctctctctgccaaagtccttacagtattgctaaggtctttccccacaggaagagctatcttgtcatcctttggttagttaaccttagttaacacacagaatatacttagtaaatcataagaaaagcacacgtttttaaattgttcgtaggaaaagatatgttctcctgtgattatgtgtgtctttggcaaagtgtagtaccaactgaaactccctttgaacttgcttctatattcgaacttggttaggaggaagctttaaaaaaaattccatgccctttgtaacttgccctttgtcttaacttggacatcagtgattaggcaaggaaatttataagcttttaacaagagttcttataaatagctcgcagtgttagtgaatgagttaagaaatttggggtgggtatggggaggggagcgaggcctgctaatccagaatttaaaaattgcctttttcattgagctggtaaatctcttatttataatcataggtgtaaattagtttactctggatgtcagagcacgggaattgttagtagaatttacaggttagatttgatctcattcttctgggacttatttcttttcttgttaaccatcaggaaaagaagttttattactgatgcaagccctaaacaccctttcaaccccagaggagaagctggcagctctctgtaagaaatatgctgatcttgtgagtattaagccaaggatgtgagagccatataaaatataacaaaatgtgtgtgtgcttgataagtttcttaaagtacaaatttgatatggccttaaatgtaaaattatattttattctgaaattgaagaagagaatctgttttgttggggctttttattggttgtatagtttcattttatgaggtaatatatagggaacattgtaatactaagatgtggcatagattttctaaaactcagttttagagtctaagtcagcctttccattgctatgttgtgatgccttaggtgccactcagttggggtgtagtggttcctgtcttaaacttttcctaagggaattctagagattgaggactgttttgattgagattgtgagttacatgaaatcatctgctaaaacaatactttgtctcagaaatacttctttagcatctactatgtgtcaagcatccttttttccattttctagaaacagtg

SEQ ID NO: 136337 - DNA, 1123 bp, Homo sapiens
gctgcagtgagccgagattgtgcaacagaataatagtccatctaaaaaaatgataatgaaaataaaaaaatcaaaaccccaaagcacaataaattgattgttaaaatatttggatttcagcgggttttttgccaggtaggaaatgatctagacagacattcacccagcaaacagcaattcgggacatgcctggctttagcactgagtcactcctggccttcaacattggagtaggtttcagctagaactggagctggtttattttccaaagggttaaggctggaatacttgggcagtgttcccagtgggcccaggaaaattcaggggcaggaggtatccagttgaagggcatcatccttcaaaaagcacaagatcatagctggaagttgaggagcccatgttgcttgtgagttgttgggttgaaagcagggagaagatctgtgatcagtgtctgaagtcagaaagctggcaaaattcaggaccccaggggatagcaggccaatacggaagtcaagaaagccagagattcaggctgctgggttcaaatcccacctcaccccttactgattatctgtactaattaaagaatgttaggcaacttattaatgtctccaggcttatacatttcttctataaaacctggataataaagggttgtgaaaattaaatctgtctaaaggatttttttttaaaaaagaaaaagatggattattttctgctgccctaaatttgcttacttttttgtcacaactggaagaggagagaagagaagggtggcagtgtagcatggcatgaaacaatttaaataatatattaaaccatagtatttgactttttgaaaatgtgttccatagctctcattataattctagccataactgtaagatttttactgtacttcctaaatacaaagtgcttatgaattttagctggaggagagcaggagtgttcagaagcaaatgaagatcctgcagaagaagcaagcccagattgtgaaagagaaagttcacttgcagagtgaacatagcaaggctatcttggcaagaagcaagctagaatctctttgcagagaacttcagcgtcacaataagacgttaaaggttagttgcttcatttgtctgtt

SEQ ID NO: 136338 - DNA, 1485 bp, Homo sapiens
ggtcttttgacactcatatcctagcaagaattgaaagtaagctttgaattttttgttttttctttttaatcatcagaaagtagttacagaaaggaagctttttgagatgaggattccatttgtcctttgccctttagggagtaagtgtgacccagaaagtaagctgcaagggggcaggatctcttccgacccatctaagatgatggcctgtgtaaccggcgagtattgcagtagagtgaattgtagacagccataacatttattttgtagcaggacagtttgcatctctctggttatctgtctacttaggaaaaactgcttgcttttcagtgatagccttctggtcataaataagggggaggaattgtagttcagaagcaacacgtcagggcagcaacaaatgaacccacattgcagcagcttctcttgtgagcatcttctctataggtctgtattattaacaaaaattattttgggtaataaggaggaaaatatgcagcaggcacgagaggaagaagaacgacgtaaagaagcaactgcacatttccagattaccttaaatgaaattcaagcccagctggagcagcatgacatccacaacgccaaactccgacaggaaaacattgagctgggggagaagctaaagaagctcatcgaacagtacgcactgagggaagaggtaatggcatttggtttatttaaacggcttctcaagattagcaaaagtgtcaccattcatacctaaagtaaaactgctgtcacgggtgtttcagaactttgcatatgcatagtggcagtcggttatttattaggaaacgatcaggcaccacaaatgagatcatcacttgatgtcccaggagtcactgggtttgggacttatttgaggttatttctaggagacccgtttaagtactgcttgtcttccatgaaatactggaagattgcaattttcgcatgtagattgttttcccttatccagactaatagtgaataaatatttgggccccaaataccctgtatctcagacatctatgataatctctacagtatccactaccattgcattatacttgtacagttaatgtttcagattttttttttttaaatgagggctttatattatttgggaggaaaaacctacttctaaccccttctaacccctcacacataagcccattgagggtaaaaagtttactgggaagatccatggctaatgaacttggccattggccttcaatgaagacttttggaattattttataagctaatctggaagttcagaggtagtgtcctctgaacaaagcgaggaacttgaaaaaccaggttagtacctatttgctagaaggtactaacctggtttttcaagttcctcacttttagagggccgatggacagggttagaggctttaggtttttttaaatggtgcatctctgccttttaacatttagtaaaatgttgggcttgttatgttatgttccttacag

SEQ ID NO: 136339 - DNA, 1030 bp, Homo sapiens
tttggtcagaatataatgatcaaattacttgcaggcgctctcttgagagcagtctgtggtgctctcaatacatagttagaccaccttacttcaccaaccagcattttcccctctcatgtagggtattgtaactggaagagttccgtttctccagctgggaagggattgttctgttgactttattatacatcagtaaccacttaacagttttgtttggaaatactaatgaacttttaccaaatgtctaaagtgtgccaggcaccaagcaccttacctagtgccaccatcgcatttactgttacagctctgcaaggtaggtggaggtatccccctgtacagaggagggcactgcgctccagcgtggagaggaattagcccagggccacacactggccaggatttgacctgggccattcctaccatcataccatgctgcctccagctaaggaatttgggaaaatatggggagggaaaaaaggaactgtgtgcatgatgtatggtttagtactttgctcttcttatccttctttgtcttggtgcactctgagccttattttcagtgtggggcagaaataggaaataccaagctggtgagggggacagcccatgtctgacagggtgggggaacaggcaacagtcaaagggccacgcttctgcccatgtgggatggtttgcaaggtggtgtcaaattgccgcttctctcagcggagtatacagggacagagagagagctggtgttcttagctgcagtggtagtagcagaacagcagggtgagcagggtgctgtaactgctgtgatgtttcctccccactgtgttcctttctttggtgagtgatggaagaaactctccttttcccatagcacattgataaggtgttcaaacataaggaactgcaacagcagctcgtggatgccaaactgcagcaaacgacacaactgataaaagaagctgatgaaaaacatcagagagagagagagtttgtaagttctacttcttaaaaacaaagacattattgccaacattgtaac

SEQ ID NO: 136340 - DNA, 1057 bp, Homo sapiens
gaaagggtcactgaagacaggttgactaaccgtcccaggctgcctgagacggggcatttcctgggacacgagactttcagtaccaaaaccaggaaagtgctgggcaaactgggatgaggtagttaacctaaataaagtggaaaataccaagagggccatgagatttctgcctcagtcctggtcagctctggctgggaaaaagcaaaaagcaaaaccatcttagaggagattgaagatatgcagaatcaaaggaaccacagatttttcttacaaattgtactatcccctgctgtgaagttacctgctgttttagttgtacttcttgctgtttcatttgttcgtatttgtgcctcgattctgtcgcttcttttaataactagaaaacagaaacattctggcaaaatgctaatggtaattacaagcaggactaaatatcaaatgatcagagttaggcttcatccttctattttagcaagaaccacaggtctacagatgaaacagtctgttccacaaattgccatttacctgtatcttctatctgtcccactggttaacacttaggaatgcaggaacaatctttttattgctgaagcagaaaaagtaccctgggggcctaatatggtttctaaaactcagagttaaattgttgtgttttaggtgaaaataattacatgtacagtattagcagagaacacggctgataatcttgatattatctgggtgacttagaaaagccccgctattccctgaggcaagacgaggcagagtgaaagcgtatggggaaagcaacgcaatcaatcttgagacctggtttctgagcacttttttagaaagcggggagggggtggacattttcatttatatatagtacttgtgctttcaagaaaatcacaaagttgcatagtaggcagttgtgaaattcagtccctgaagtaaaatatcacacatagtccaaagaagcctagaaaagtcctactgaagcaaccagaaagtacacacatgtaatgaatatgagtgtgtgtgtgtgtgtgtgtataaaatttatattccaactttg

SEQ ID NO: 136341 - DNA, 1048 bp, Homo sapiens
gactgagttttctgtccattaaacgaattcctcagattcttgggaggacagcgatcttcagccccacaagacattaagaactgacactccaccacaacctccaagaacacatcagtttcagaactcaaggcagcatgattcaggtaagactccagtgaccaagaagataaaagtagttaatacctcagctttggtcatcctcacaattcgtgaggctgatttacttcagattttgctaaagataaagtgggtccccaaatcagggaagtgttaaacctatgctaccagaacacaattttcagaaattcaggatgcatttatccatgcctgtagctagctactttctcaatatgccttcatctactgttgactgcacaccagctctgatccaggtcggggcattgagccaggtggtgttaagggaaacaaggataagacagagccagtgccctgtgccttgggtaattacccacaaaactgtaacacaaggcaaaccgggacaaaggccatgggaagagctggtggaagacctaggttgactgctgacccatggtgatctctgcagccacggacagagaggaatgtgttccagtcccagaggaccagaaggatggcagatccaggaggcgggaactctctgttccacctcaacagtgagtctgtgctggcgtccagctatcacctgcactgtgcctaacagcgccccctcaattgcagcctcaactgaaaggactggcaggcagaacgaatctgctgctcatggaattctccagattaccaggtctaaaaatacctggaggtggtaatttgagcaccaatcagccacatggtaactgagtacatgttaatgtgccaagcactgtctgaaatactctatttcatgaagggcaggtttttgttaccaattttaacagtgaaggaacagaaaggtttaacaatttgtccatagtcacacgttctatgatgcaactgggacattaacccagggcgcacggtctccaccactatgtgagatctaataatagtcatgactaacatctactgaatg

SEQ ID NO: 136342 - DNA, 1062 bp, Homo sapiens
aggagcagggagagaaaggacaaggcaatgaacacatgcattccagtggagggagaacgaggctgatgtgcaacacagctgaggaaaatttatagattaaactattcaaaactgctaagcagcctcctgtaccacataagtccagtagttctaagaaaatacagatatggtagaaaaagtaagaaaattttcaccacaaaaccaatagttaactactaacagagaaagttatacacaaaatatatctctcaatacagtgatcacacctcatcttagtcaaccgactcgatggccggagcagagcctgtggacgggggcttttgcacagcgcttctctgactcttgggctcagcctccaggtgcgctcccagggctcttttcgaggaagtgttcagctccttgtgagaatccagggcagtacagggctgcatcacaggtgttgctaaatccctgttcgccgctttgatggccgctttgatggatacctgctctttcaggacttccaccttctcattgagctcattcctttctgtctgaagagccctgcacagcttctctaaccgttccagttttatttgaagggccttgtactctttatcacggactgttttctgtaagaaaaaagaggatttctgtaaccctgttaaatatcaatcaggttacaaaaaaattaagccagctcagccatattggacacttctcacctatggaacatgttccgtctcttcagcctcctaacattctagctagctagcatgactgcacccataactataccgaatgagatttagcatattgtttcagggggacaaaattaaattccttttgtcactttttttttttttgagacagagtcttgctctgttgccaggctggagtgcaatggcgtgatctcggctcactgcaacctctgcctcctgggttgaggtgattctcctgcctcagcatcccgagtaactgggactacaggcgcgccccaccacgcccagctaatttttgtatttttagtagagatggagtttcaccatgttggccaggatggtcttgatttcctgacctcgt

SEQ ID NO: 136343 - DNA, 1304 bp, Homo sapiens
atctctactaaaaatacaaaaattagctgggcgtggtggggcgcgcctgtagtcccagttactcgggatgctgaggcaggagaatcacctcaacccaggaggcagaggttgcagtgagccgagatcacgccattgcactccagcctggcaacagagcaagactctgtctcaaaaaaaaaaaaagtgacaaaaggaatttaattttgtccccctgaaacaatatgctaaatctcattcggtatagttatgggtgcagtcatgctagctagctagaatgttaggaggctgaagagacggaacatgttccataggtgagaagtgtccaatatggctgagctggcttaatttttttgtaacctgattgatatttaacagggttacagaaatcctcttttttcttacagaaaacagtccgtgataaagagtacaaggcccttcaaataaaactggaacggttagagaagctgtgcagggctcttcagacagaaaggaatgagctcaatgagaaggtggaagtcctgaaagagcaggtatccatcaaagcggccatcaaagcggcgaacagggatttagcaacacctgtgatgcagccctgtactgccctggattctcacaaggagctgaacacttcctcgaaaagagccctgggagcgcacctggaggctgagcccaagagtcagagaagcgctgtgcaaaagcccccgtccacaggctctgctccggccatcgagtcggttgactaagatgaggtgtgatcactgtattgagagatatattttgtgtataactttctctgttagtagttaactattggttttgtggtgaaaattttcttactttttctaccatatctgtattttcttagaactactggacttatgtggtacaggaggctgcttagcagttttgaatagtttaatctataaattttcctcagctgtgttgcacatcagcctcgttctccctccactggaatgcatgtgttcattgccttgtcctttctctccctgctccttgcacattatcatcctaatgaaaatttcactgacagggccgaccattacaagggaactttgttctgacgatggttccttgatgtgaaaacaatattaatttaaacgtcttagcccccccccccataatattattcagaaaaacaaaataccaaggcgattagttttgtctaataacccatttaaatgccaagtaaaaataaaactcctagtgttgggtcagaagcatatttgattgaaattagctttttgaaaacatttatatctcgggacaaattgagatggccacat

SEQ ID NO: 136344 - DNA, 1306 bp, Homo sapiens
ggtgcgctacaaagccacaacactgggctggtgaggtgatcactgtaggaagatgtccttctcagggggtcccatttgtttttattcacagggtaatgggaggaagggttctgaaaggacaacaaatgcatcccagacagaatccatatcctttcaacactataatagcatctagctaaaaatacaaagtaagccaaaagcagcaggccaagtactgttaatcacattgctttaaagcccttggaagtatgcaacaggcccaagatttacaatcttccacacaggacaagcaccacaaagaaacgtggtgggctacacaaatggcttaataaaatgttaagagctgtacatccagcagagttcttgtgaaataatgtgatcattagtactaattttaaggtggattatatttctgatctatacctgcattcccccccaccaccagggaaatgagtctagtattttagtagcagaacagggtgtactcctaagaggctgttggagggtggtgttttttgcttctgactcattttgatggtaattagataatctactttgtggatttattttcctccactgtggccccttgaattaacatgactgatagtggaggcttagatacaaccctcctccactccaggcggtttcctatctatctatctgttggacaattttcaattctttcaacccagtttcgaccatgaatgtgacaggactttacaaataacacttgtaacaaagagaaaacccttttaactggacaaaacagagtttattcagtccagtaagcaatttaacaagtgtcagtctgatagttttgctcagtggaatgtgctaacatcagttctagtagaaccttttatttcataaagcatttcaatgcaaattataccagggacaaagtcaaaacttccatcagtgcagcctgattaatcatctgcataactgcgccacattcaacattgaaacaaagaactaattcaaaagttatgtgcttaatttcaaattttcccccagtccaagtgtagagaccttgataatactgtggcttttcttttttcttcttaaaaaagagatggtaactaagaagggggtgagaaaacagactgaacacgtaagtaacagatcatgactaacactctgccaagtcttcccaaagtaaaaatgttggtgccagtgtttgttttggaaatgaaaatcaatttcggttggtactgatccataatgaaaattcccttttgaaaaacctggagtactttgctggtggaatttttgtagtaactttcaagtagccagaaggtattgg

SEQ ID NO: 136345 - DNA, 1196 bp, Homo sapiens
agataggaaaccgcctggagtggaggagggttgtatctaagcctccactatcagtcatgttaattcaaggggccacagtggaggaaaataaatccacaaagtagattatctaattaccatcaaaatgagtcagaagcaaaaaacaccaccctccaacagcctcttaggagtacaccctgttctgctactaaaatactagactcatttccctggtggtgggggggaatgcaggtatagatcagaaatataatccaccttaaaattagtactaatgatcacattatttcacaagaactctgctggatgtacagctcttaacattttattaagccatttgtgtagcccaccacgtttctttgtggtgcttgtcctgtgtggaagattgtaaatcttgggcctgttgcatacttccaagggctttaaagcaatgtgattaacagtacttggcctgctgcttttggcttactttgtatttttagctagatgctattatagtgttgaaaggatatggattctgtctgggatgcatttgttgtcctttcagaacccttcctcccattaccctgtgaataaaaacaaatgggaccccctgagaaggacatcttcctacagtgatcacctcaccagcccagtgttgtggctttgtagcgcaccccgtatctaccatattctagaacactgtaatgctactaggctggcccagaaaaggtttaaatgttgaattcacttaaattgcaattgttgcaccatcatggaatcgtgatgtgtattatttatattggcggtggactccaaggtgtagagaaaacttgggtcttgggtaatatggaccatttcatcctcagacttgttaggagtacatttcttggtcttgagaccagtatttttcagttatgtatgcaactgcctttattacacctggttatcacaattcaattctcaggtgttgcagaaaaatctacctctttcagactgtagatggaaataactgtgaaaaaaatgatgcagatatcttctagtttgtgctaaacacactgctttatttttacagcccacgtctttcatgaggatacgaattgttaagaggcagtctcgttttgcttttcaaagacattttgtagagatttttcactaatgtgaatctgattttatctacttgattctgtatagattaagtaaatatgtatgataaactt

SEQ ID NO: 136346 - DNA, 2913 bp, Homo sapiens
tagagacggggttttgtcatgttgcccaggctggtcttgaactcctgagctcgagccatccgcctgctttggcctcccaaagtgctgggattacaggcgtgagttttacccagccccacctcatatttttaacccgataagattattcggtaaaatagatacattgcataatacctagttggcaggcagagacctcattgtcaaactagagtcaaatcagactttgtcagaaagtgtgatgtcccagttccaaacagtgtatttagtactgtccttgtgaagaagtgtttcgtttaaatcttaattctaagataaaaaaataaggcatagtgcattccgacgaggttgtctcttgcggggaacaactgctctcttcagaattgtttagcaaagctctcaccttaggcatagcttatgagggactatctggagctatgcttttggagccagggattttctttcaccctggtgctgtctgtgtacgttggaaagatgggcaagaagtatgcctctctcagtaaagtggagaggggaagaaccagaagactcctcaggccccttgtataatagaagagtatgttacatggcatataacggattgattaccttagatgtttgcacctaactgtatatgagcaaatgatgctggattaatgttcatcataatcagtatggaaatggcattttgactaggaaaatgtcctcattcttaagggatgcaggctgaagtcttcagccatttcattgtataggctcatggataaagcatcagttatgctagtatcacttggtgaatctaggtaaagggtatacaggtatccattgtactatattctgtcacctattctggaggtttggaaatttgcaaaataagtataaatagattactgagcctgtaccaccttctaaaaccagacagcacccacccccagttgaaatactgatagctctaaaaacttagtaaaacctttgttaggattaacaggagagtatatgaaatcaaagctttttttgttcttgtaacagtttattcatggaggacacactgctaagatttcagattttagctggaaccccaatgagccttgggtcatttgctcagtgtctgaggataacatcatgcagatatggcaaatggtgagttaaaatgtttttcttgaatgactgtcttgtaaaggagagatttactacttacataatgtaataaagttatttcgaatatgtaggtgcatattatgccaaacatttacagaaaccgtttaaaagaactttttccatttcaacaatacaatctttagtcccatatggtgcttcgtccactgtttgctatttgtagcacctgtcaggtcaggagaaatctctgcatctgcactgattttcattgttgttgtgctcttcatacactggagtcttggcgtcgctactctgtctccagtgtctgttctgtgtggtaggcatgagggatacaggaaggagaggtcaaggcattcaaatgacagcaagttctctgaggatgagcactaagtagctgacatttctaagttgttgttaaccgagacttccataacatctgggctaccacttcctctaaacgatgcttgaagtgcctttggaaaacatctcttatgaacagtgattgaaataagtagtgcatcgatgggtggctaagtatacatacggaattacacactggcaaagaatttttcaaaatactggctagcctaccatttccttattgaagtttttaagagagaaatgtaaaaatgaaactattaagttctaaatagattaaattgtttttacatgaccatgtgaaaaccatagggagtttttacctgtgaatttatttggttatctccaggctgaaaatatttacaatgatgaagagtcagatgtcacgacatccgaactggagggacaaggatcttaaacccaaagtacgagaaatgtttctgttgaatgtaatgctacatgaatgcttgatttatcaagcgccaaaaaggcattgtatagtaggaaatgtaagtggggtggcttatggcttctttatcctctgattctagcactttcaagtgagctgttgcgtactgtatcatattgtagctattagggaagagaagaatgttgcttaagaaagaacatcaccattgattttaaatacaagtagcagggtattgcctttgattcaactgttttaagtcctcattttctcaaactaagtgcttgctgttcccaaatatgcaagaataacttttacactttttccttccaacacttcttgattggctttgcagaaataaagttttaaaataaaacttgtgtttttttaaaagcttagtgggggggggcgggggagtctactttttgagtagaaatgggtaaaatggtacctttggactcctacagttaaggtcacatggataatgaaagaatacacagaagctgttaagtttatcatacatatttacttaatctatacagaatcaagtagataaaatcagattcacattagtgaaaaatctctacaaaatgtctttgaaaagcaaaacgagactgcctcttaacaattcgtatcctcatgaaagacgtgggctgtaaaaataaagcagtgtgtttagcacaaactagaagatatctgcatcatttttttcacagttatttccatctacagtctgaaagaggtagatttttctgcaacacctgagaattgaattgtgataaccaggtgtaataaaggcagttgcatacataactgaaaaatactggtctcaagaccaagaaatgtactcctaacaagtctgaggatgaaatggtccatattacccaagacccaagttttctctacaccttggagtccaccgccaatataaataatacacatcacgattccatgatggtgcaacaattgcaatt

SEQ ID NO: 136347 - DNA, 1086 bp, Homo sapiens
gcacacttgtactttgtccatgagttttatttattcattttttctgtgaacctatggagtatattgaatgtccacaagttttcaaaggtaaagaaggtccttgagagcaagccctgcacacagaagatgttcactaagcccaccttgtaagaatgctccagacccttttattttgatgacggctttactgagatataatttacataccacacagttcacttctttaaagtgtacagttcagtggggagggagtgttcttgggttttgggggttttttttctttttttgttcttgaagtcagtggtttttagtatattcatagacttgtaaaactatcaccacaaatcaattctagaacattattcatcccctccaaaagaaactatagctatcacctcccaattctcttcttcctccagcccttggcaactactgtgctactttctggcactataagattgggctattctagatatttcatataaatatgacttttgtcttttgggactgattctttcacatagtacaatgttttcaaggtctccagctattttttttagggagaaaggaaagcgtattactttgtatattatgcctctgcaacaattccaaggtccttgagaaaatacactaggattttgctttttacaagagagcttgaaatcaagggacatttgagagtagtaaactgggcctgggcatggtggctcctgcctggaatcccagcactttgggaggccaaggcaggtggatcacgtgagcccacaagttcaagaccaggctgggaaacatggcaaaaccctgtcctgtctctaccaaaaaaaaaaaaaaatacataaattagccaggtgtggtggcgcgtgcctgtagtcccagctacttgggagactgaggtaggagaatcacctgagcccgggaagttgaggctgcagtgagccatgatcacaccactgcactccagcctgggcaatgggagtgagaccctgtcccaaaaacaaagtagtaaactattccaccagtatgctttgataactcctgtatgttttctaagccccagtgatcttaaaatatattcacctgtgtacc

SEQ ID NO: 136348 - DNA, 1086 bp, Homo sapiens
gcaacaggctttgagtgaagtatagggattgcacatcagtttatgtgtagatttttttaactatacatttcaccttttaattctaaggcaataaacagttaatgaagggattttgagttaatgtttattattgacaataattcctcattctgcaacttcaattatgaacaactctaacttatttccagaaagtaaacatcccgtccttacaccaaatataaacagtagccagatgtggtgaggctgaggcgagaggatcgcttttgagcccaggagttcaaggctgtagtgcacagtgatcgtgcctgtgaatgaatagctactgactgcagcctgggaaacatagcgaggccatgtctctaaggaaaaaaaaaacctaattgattgtagtatagaaataagttgtttttgtgagtgtgtttatgttttaagattactttctgggctgatactggtttagcagatgttcgtgctacaagaatttcactgatgaaagcgttatattctttattcttacagtaaaattggggaagaacaatcagcagaagatgcagaagatgggcctccagaactcctggtacgcattggcttatagaagatgaaatgtcatatgcagattggattgtcattgatctctttatttcgagaatgggtcagaacttcgaattctagctcttgcagatggtttcaaaatggaggccctgaaggttattgcaactgggctttgacatttatcaaaaatagtaaatggagcccagtaggtttttatgaatgtttcactgagaatggtttgaggtcctggaaaatagtatatagtaatttctcactgatttcaactctggtatttgtgatggtttggggatggggagtgagtataattgctattcagttggcagtacttaacatttcctaacagtatagaaaaaattttaaatgctttttaagtttcctgcccagaaaaggagtgctttctcaatcttgatgttagcagagcccactatctccctcccatgcctgattgaagcatcacgcatctccttggccctttgaaagcttatgtggtggtatctgcccatcctcattctt

SEQ ID NO: 136349 - DNA, 2883 bp, Homo sapiens
gtgtccttttcctctgcacctcacatggaggctgcagccacatactcttctgtttgcttatattttctctcttgtgtttacctcaaacttatatagttgaatagttttgtttgtaatgaaattattttaaataagatgttagcatttaaattcaatctcttgaccgggcacagtggctcacacctgtagtcccagcactttgggaggccaaggcaggcggatcacttgaggccaggagttcaagaccagcctggccaatatggtgagacccccgtctctactaaaaatacaaaaaaaatgagccaggcatggtggcttgcacctgtaatcccagctcaggaggctgaggcaggagaatcgcttgagccctggaggcggaggctgcagtgagccgagatcgcaccagcctgggtgacagactgagacactgtctcgagggaaaaaaaaaaaaatcagtctcttatagcccttgttcttttttttttctctccttctctcttagactgtttgtctgtgggatataaacgcaggaccaaaagaaggcaaaattgtggatgctaaagccatctttactggccactcagctgttgtagaggatgtggcctggcacctgctgcacgagtcattgtttggatctgttgctgatgatcagaaacttatgatgtaaggtggaaaattcagtgggatcttgttaaatgggtgacctgaatgaccatcagtgattgctgcaggctgtagtttgattttttttttttaagttatggctttaaaaaacagctttaggtagcttactcctgtaatctcaataccttgggaagctgaggcaggaggattgcttgagaccaggagtgtgagactctacacaaaatttaaaaacaaaaaattagttgggtatggtggtgtgcacctgtagtcctagctactcaggaggctgaagtgggaggatcacttattatttagaaaaaaagaaaactaggtatggacatgtgaaggaacatacttggtgtggtggtaaatatcaaaattgagatccagagtgatgccagttggaggtcgaggaggaaaatgatttcatcaaggtgtggccacagggcttcattcacttataatcttataaagaaatacctgaggcaaatgtgacaaaatactgggcatttgtcaaaactagttttaggtatcagattgtgacattattctctacatagtctgtattttgtgtacacttgaaatagttggtaattaaaataggaatctaatttaaaaaacaggactaacagccctagcttgttctctgtaggtttcgaatgtatcatttagtggtcgaggtctgaatcaccagctgtgtggttggtttcttcatgaaggggagcacatagtggagctagttgtggagtgcagtgacagtgatgtgaggccgaatgtgagtgtgtcatccctgggtgccgtgtgcctttacctttgtgttttagatgggacaccaggtccaataccacctccaagccgagtcacttggtggatgcgcacactgccgaagtcaactgcctctcattcaatccctacagcgaatttattctagccaccggctctgcggataaggtttcgaagtttttgcattatttggtgtttataaaacccagttctcttgtgccttaatcagatatttgaaaattcttaggtaaagcatagaaatcattttcacttgttatttttctttagaccgtagctttatgggatctgcgtaacttaaaattaaaactccataccttcgaatctcataaagatgaaattttccaggtatgtgacagttttctggtgtctgtatgtcaggaaatgaaatccagggattcatcagttaagctataccagactcgtgggtccactattgaaaaaaatgtcttgtacgtggtgttacatggagatgctcatagggtaaggtacaccttgttgaagaattaaaaagcttctgggatggttatggggtcgaataaatttattgagatcccaggctgagttcctcagtgctggggagtgcagccttcctgaggacaggatggagctgagcccttgcagagcacttgaaagtcggggacaagagagtgaggccatcaggccaaggataagataatagagtgcaagatgggaaaatatcagattagaacaacagccacaaacctagcagcggatgattctttaaatacattttcaaaattatctattactaggtccactggtctccacataatgaaactattctggcttcaagtggtactgaccgccgcctgaatgtgtgggatttaaggtaacttacagtcctgtgacaagatactgcataaatgtgcctatctggcaagttacatagtcattcataaactagaaaagcaatttggtaatccccccttcaagaaacctaatattaaagaaacttctaagcatcttcctaaagagcctttgttctgtaaaatagaagtgaagcagcaaatggaccataaaataaatttctctagtgtgagttttgtctcttaatattcaggcatgaaggtgtatgtgtctgtttttgtttttgcattcaaatgactgtatttaaaacacacttgatatagagaaatcaagatgttagctgttttatgtctcattggatctcagtacgtgtaggcaggactgttttttctgggtttttgtaccatttactttgctttcagtgattcattctgcagatgtgcactcctgctgtgggttgtgtaactgctggggagacctttgtgaaggggacaaggacagcccaagctgtcagagagcttatgttctctggggcctcattgtataaagagtttctgccaatttttaaagttcctttagttcagacttgctgttctaagaatttta

SEQ ID NO: 136350 - DNA, 2218 bp, Homo sapiens
gtcttattcacacaccagatgggcggagaggttaaccttggcactgcactagcagttaaaccaagtatgctggcagggccaatgtatgtgtgtttagggacaggtaggggttagcgtgggtttctgattgatttgaggatgcttctgacttcagactcaaagggtgttcatactgtggagggttaaaacctttcctgttttgatgaatcctaaaataagatgctaattcagtgcagtacttacagtgagttgtatttgaactaaaaagctattggtctgcttattatatggttacttgaaatttcagtgaataactatatcatcttcataactgaaagaggacagttgttttagatccaaggtggaactgaattaagttgcataaggcagctaccaatattttccagtgcaaatgggctttaagaataaattgatgtggcaaatgaacccacatttttgggttttctctatgcatgtttctgtctttgtcttgtcagtttgtgttgtattctgccaggtcaaaatctgttaggttgattgaactaagtgatttgtgaattttaatcctgagtgtgtgtgtgtgtgtttctttctcctcacattagaatttggtggctttggttctgtaacaggaaaaattgaatgtgaaattaaaatcaatcacgaaggagaagtaaaccgtgctcgttacatgccgcagaatcctcacatcattgctacaaaaacaccatcttctgatgtgttggtttttgactatacaaaacaccctgctaaaccaggtatgtaataatagagttaggtcattacttgagcagttttcttgattcaaactggtaatgtttttaaggtcaaagtagcatactttataatatttaaaggtttaaaaattgctttgggggtcccataaccatcctcaagttcagggatttgccagaactacctaaaagcagcttatactaacagctaaagtttattacagcaaagaatccagagcaagagtaggaagaaaaagatacacatcaggggaagtccagaggggttagctacaggcgtctgagtccttcccatccagggccacgtgggacatgttttgtctctagcagcaaaccataggaacatgtgctaaatgtctctacccagggcagcccatttgagtttcagaatctgggatttttgtggaggtctgttggcgtgggcacatcctgttctatgaccagccatggtaacaaaattgaggaccccaatagtgaagccaaatacattgtgaatcttgctaaacaatcctacaagtcttgacaggtccctatggcataccccactgctctgggcttacaaaactttatcagtcagtgacgtgaagaactttctgagggtcacattcccaggggttggccaagggtcatttatggttgcaggctaccctagaggcatgcaaggactgagcaaccagacctgttgtgttagaaatatttctaaaaaattggggggttgcggggatacggtcaccactgcccaaatttgtaggatagctatagtttttaatatttttgtgttggggatagtattaggttttccaaagaaaccaatcatctaatggtcatgaggctcaatttgcattgggtattaaagaccagatctcgttcgtgtgcagttgctgtaatggttcactcaatgaaggagtgagaatttattctcaccagttctgataaacagagaataacttaatgtttttcatcttttcttagacccaagtggagaatgtaatcctgatctcagattaagaggtcaccagaaggaaggctatggtctctcctggaattcaaatttgagtggacatctcctaagtgcatctgatgaccatgtgagaaacgtattctttgtaatttgttcatatagtgagagctgacgtgtcacagctgtgctgaaggagtactatatagatgaaaggttttctaagataatactgctgattattgtggtaacattcccccaggactttagagagatggttttcatactgccctgtatgagtcttcggattccacagagctcttttgaagtagccttagaatggagggagcataggcaaaaggcctcccattatttaaaagaggaccctccaggcccttaaaatggaaactgtagagtgtttgtgggacctgattaatataaagtattttttaagtgtacagttcagtgggttttagtatattcacaa

SEQ ID NO: 136351 - DNA, 3326 bp, Homo sapiens
tcctacttcctttccccagtcattgttttcaatttcctaacccatccttgccagcgtgtagaagtgcatacctgtatcttcattttttatggtagcaagttcttcacttgagtttgtcagtaagagtatgtattggagattttcctgtcagcatgcttggatatgcttgttcttttcaagagtgccatagaattttgtttatggatacactgtgtaatgtatgataccagttccttgctgatggatacttagttattttcagtctttttccttctataaacaatactgctgagaataatcttgcaataggccagatttatgtgatgcttggctaaatttcctagtggtagttactggggtcaaaggattctgcactgaaaatgaataggctttcttaaccattagtccttctgcagcctttaggtacatccagtattggaggaaaatagtgtcatattgattagtttaggaaaacaggctgtgttttaatgatggaggtgaagggatttctagtaaaaagaaaagtcctcatatgatgatcaagttggggaaaactggaataattaaatttgagtccagagggatttttaagctcctccagtccgtcttgggacagtgttccttagaaagggcctgtgataaactgacctacctgttattttttacttgttggtcttagttttcctgctcaactccacaaaaaacaagtgacttttttcctttgatgacagtaccagcattgctctgtggtgccttctttctctcaagcattattatttctctttttaaatatttatttaaatttttgttttttgtttttgtgttttttgttttttgtggagatgggattttgccacgttgcccaggctggtctcgaagtcctgggttcaagcaatccgcttgccttggcttcccaaagtgctgggattagaggcgtgagccaccacatccggccaaatatttattctttttttttttttttttttttttttttgagacagggtcttgctatgttgcccaggctggacatgaactcctaggctcaagcagtcttccgtagtagccctagtagctggtactacgggtgcacagcactgcacctggcttaccctttcattttaagccactattccctgtaaaggtttgatttttatccaagtcctcataaagtatgttgcttagagcctaattttaatggttttactggttaaaaataagtgggcaagccagatatggtggcacacatctgtagtcccagctgctgaagaggttgatgtaggaggatcaacttgagtccaggagttggaggccagcctgggcaacatagtgagaccttgtctcttaaaaaaagaaaaggtcgggggtggggggcacatgtgctcatgtgcattgccccctacatacatataaagaccacctaagatggaattaattaattttttgatagccacatcatattcttggcccactgtgcatgtatcaaccaagacccatgttttctttctttttctttttttttttttttttttttggagacggagtttcactcgttgcccaggctggagtgcaatggtgtgatcttgagatcttgactcaccacaacctccacctcccaggttcaagtgattctcctgcctccgcctcctgagtagctgggattacaggcatgcgccaccatgcccggctaattttgtatttttaatagagatggggtttctccacgttggctaggctggtctcgaactcctgacctcaggtgatccgcctgccttggcctcctaaagtgctgggattacaggcgtgagccacggcgcccatttgtctttttttcaaacacgttgctattgcttagtcacggctgccttactctgttttggggggagtgtgtctgtgtgtgtgtgtgtctcttctccatgtgcacacacttttttaccgtaagccaaattttggtaaaattgcatcttgtattttcttattactaaattacttgcctagaagtaatcttcaatctttttagaaaaaaaaaaaaaattgaatcctttgtgcagctgaaatttagaaacagataaatggcctaacttgtcttgtgttagggcctagacccctacttctcagtcctcttcattgaagtgggaccatggagcacagttgaaaattgtattctagataatacaaatgggaaagcctttttaatagatactgatgcaaaaatcactgctcggaccaaggtgccaagaggtttgggcaagttcttcagcctcaaggtgtttccacagaacaaggtaacaaagatacctcggtaaaattgagaatgttcgtttcataaacttaggtatcataaacgtcagtgagtttcacatcatgccatttgcacttatagcctattttattcagtgaagaaactgaggccccagggaggttgtgttttaagcaactgcattttagtttgatccaggatttaagctaagtttttttgattcaacactttctgtccatactaccttgtagaatttcttattgggaaataagaaacatctagtgtataagatatttttaggtgggaagaagatttctttaggtgggaagttgtgatttatgagtgtggggattgttggtggattcctgtgtagatgtttgtctgtgtttactgagttgggcctaccttccccggagtgctgctctataaaaggtagtgttcacgctgataattgaggcacaggaggatggctctttgggaaagaagcaagccctctgcatgttgtagctagaatattttcttatatttgcatatgtggggattgtaaagttggtaaccagagggggagaagatacacagttgatgctaagtatatatttgctaaagaaatatgaatgtattttgagggaactagactgaatttgttagcaattggagatttcttgtaggattagtgtgacttattttctttcttaaacagacctgaaggaaaagattatgcccttcattggctagtgctggggactcatacgtctgatgagcagaatcatctggtggttgctcgagtacatattcccaatgatgatgcacagtttgatgcttcccattgtgacagtgacaagggtggtaggtatatcatatattccaatattggtgtcaaagggaaaatgtctctttcaaagcatatgctattaaaactatactattagcttttggcccagtaatttaacttctaggactttattctacagaacttcccacccacatgtgcacaaggattttagtcgtaattgcagaattgaaaaattaggatcaaccttgtaacccagatgttggttcatagaaagtt

SEQ ID NO: 136352 - DNA, 2868 bp, Homo sapiens
cacccccaccaccgctgccgctacaagcaaccacgccccgcgggccccaaggctcgccgccccggggctcgcggcccccactcagccggccagccgcgcctccatcagccccgccctcgcgcgcccccatccgccccgccccctcgggccctcatccgccccgcccccgcgcgccccatccgcctccgcggccggccctgggagcgccgggcgagccctcgcgcctgcgcatcgccaacttcctgccgcggcacgctccgcccacccccagaagcccgcctccgaacgccgcgtgaaacccgcccgccgcgcgtcattggtctcggcgccggagccgttggctcccagacccgcctctccgcctcctctcacttttcccagggcggatgcgcctgcgctcagctgcctgggcgggctgggaggcgcgggttgaaaagtctcgttccaagtttggagagagagagaagagcgcctcagacctcggtacccgcgagcggggaggaggcaggaaagaaggacgcggcgtctggggagcacccaggcagcaagacggggcccgggctttcgacagtggggagtgtgacgcgcttgggaaaggcaggagcgccagcggtcgggctgctcttggctaacgagaggagtccgaggcggcggcgaggggcgaacgacccgacgcaagatggcgagtaaagagagtaagaggccctgcggggcggcgcgcgccggggccgcggggggcggcgggcgcgcgaggccgcggcacgcgccggcgaaaggcgcgaattggcgtgcggagcagggggcggggccgggcgcgagactgggcgcgcgcctcgaggggcctgcgcgggacgggaccgccgcgccgagggctccgagcacttccggagccgggcgcggggccgagggctgggcccccctcttcccttccctcctccagcggctgcgctccctccggcgccctcggccccggggcggaggcggcccccgccgctgggaagcgagcgccgcggctctttctacgcgcgcgcgcgcgttgaccgcctcggggtcgcggcccttgtccgggggttgctggggtcctcaggcctatggctgccgaggcgggcgtcgtgggagctggggcctcccctgatggggattggagagaccaggcctgtgggcttctgctacacgtgcatttgtcttcccgactgggtcgcgcagcccctgtacgtacaggtcgtcatcttagaacaggtgcgaacagctgtaacagggtaaacaatttccatgtccgtgtaattgactacccaacatggtgtacgcagggggtattgatctcaatggaaaaaataggcttcctgattgttagtattttctccaccttctggaagagcagttagttgtccgtgtccaaattagaggtaaaaggaaagagtacatgaggtgtggccatcttgaggtgacctccaatttctgactttgatctatctcagccacttaatcgtgtgggctttctccaaatttcagtgtttgaagatactgtggaggagcgtgtcatcaatgaagaatataaaatctggaagaagaatacaccgtttctatatgacctggttatgacccatgctcttcagtggcccagtcttaccgttcagtggcttcctgaagtgactaagtaagggtttctggcaacttttattttgtttaaatttaactgtcgttctgaatttcctagttttggcgttttatgcatagaacataagtatgtaatcagcccttgcatgaggtggcaggtggtttttattttcaaaacttacgtgatttgtgggatgatttctggtgtatagtgtggtggtaaaaggggagaaagaagctgttgtgagattaatcgtgtttggaggaagcactgaatatatttgacatttcctgggcttgaatgtagagcagcatctttctgggcccaaactaatgcgtttctttaaaactttactgaaaaatagaatatttacggaaaagttcacacatcttaagtgttgtatggcttgataaatttttacaaagtgaacacacgtaacagtcatccaagataaatacattttaattggtaaagggaaaaagaccttgtcaacaattgaccaaagaaaagatgttatcggcttatggaatacactttgagattgctgttagtcttcataagagtattcttttctgttacatctgcagtttctctggtaataattgctggcatttattgagcactcagaacagggcctggcacatctgaagaatctacgtcctgttgtttgttgtaatcctcataatagtactatgctgtaggtacttttcatcatccttgttttactgataaggaaactgggagtgagagtttaagtgccatcccaagatcacacagctggtccctgcattagactgcctttctcattcacttgcaccttttctagtaggaacttgaccatgtacttttaaagtgtattaaatatggggtcaggcacagtggtttatactcctgtaatcctagtgctttggaaggttagcttgagctcaggagttcaaggctgcagtgagccatgattgcgccactgcattctagcttagccaacagagtgagaccgtgtctctcaaagaaacaaaaaacaagcatcttaaatttgggtgttgcggacatataatttaaagaggattaaatgaaactctaacctaaaaagaggattttgcaacaagttataaaaataataagctaattttggctgggtgcggtggctcacgcctgtaatcgtagcacttcgggaggccgaggcaggcggattgcctgagctcaggagttcaaaaccagcccaggcaacaaggtgaaatcccatctctact

SEQ ID NO: 136353 - DNA, 1029 bp, Homo sapiens
attggaggggtggagatgaacgccaaatcagaggtgttggagaaagaataggagaggtggagaggaaatagcaactacagagagctttttttttttttttcactctatcacccagactgggtacagtgacttgatcatgactcactgcagccttgaccgccccaggctcccatctcggccccccaagtagctaggactacaggtgtgcaccactacgctaggctaattttgttttttttcatagagacagggtttcgccatgttacccggggtggtctcgaactcttgcgctgaagcagtcctcacgcctcccaaagtgctgggattacaggcgtgagccaccgcacccagctctacagacaactcttgtaaggcgtttcactctgaaggggagtggagaaatggagcagtggctggaagggaatacagtatcaaggaaaaatgtcttaaaaggtattgatattttaggcatgttcagattccaagagaagggtgaattgatgatcctgggggagagaactgaataattatggatatcattgagaagccgagaggggatgagatgagagcaccatttcatccatggccgctggagggaagctgaaggatacgagcagggaggcaggtgggctggtgaactgctggtggtgggatggggtattcttctataaggggatctattttctctgtaaagtatggggtgaggtcatcagctgagagtgttggcaatgtgaggagagaagggagggtgttaataagttgtctcagggagggaacgtgaaggcattaaggaagtatattgggatgatcttactgtgttgagagccttctgagactgatggtcatcaatttgaagagtccaacttttcagtcactgaaacctgagactttggaaatacttcatgggctttgactccaggatgttcatctttagacattttaatgttgctggcattttggttgccgttgatttatttagttactgagttttaaaataaattttatattaaagtttaacattcccacaga

SEQ ID NO: 136354 - DNA, 1071 bp, Homo sapiens
cttactcacaatatctatcatcacgagcaactgttaagtggtttgctgaaatcaagataccatatgtctgtagcattcttttgatctcccggtgtaattaccctactcaaaagggaaatgaggttaatctggctcaaactggactcaattccagcaatcagaggggccattttaattttcttatatataatgggtaaggagtttatttgggggaaatctgctttggcatgttggtcacagaataactgtaacgttggactacaaggggactctatgggtcttagagttcatttctctgactctagagtgtcagaatgcttttcccttcctttcttttaaggtacatggatgtccttgttctctgttccttaaggaaaggttgaaattcatgaccttttggcatttgctgaggctcagtttgagtaacattggcaagtgtctggtttaactaattgttgagaagcaagagaatatgtggttaagagagtagactctgaagctggactacatgggttcaaatcccagctccactccttcaaagctgtatgactctggacaatttattgaattttcttttcttcatctgctatggagtggagataaaagcagtactgattgcatcaggttgttgacaaaactaagaaagtcaaggtgtgcaggcactgagaactgtgctttgcacatggttagcctctgataattattggctattattggctattttattgatactataattggatcagagtaggaggtatgtgttaatttctttcaagtaggtgaaaacctgtgcctgaatctgtgaagtgctgggtcagggtaaagtatacagctgaccaagcaatgctgtgtgtctctgcatggtcaaagatgtctattaaggttcttttgttgttgttgttgttgttgtggcttctttttgttatgcagaaaagtagagaaaaaattgaccaataatcttattatccagattcattcatttattacacagcagtcactattctaggcccttgagtttcatcagtaaacaaaaagttaccaggaccttatgtttcaatggagagagacaaa

SEQ ID NO: 136355 - DNA, 1058 bp, Homo sapiens
gctaggcatgcaactcatacagaagggtacaacattgaaaagaacaagaaagccctcctctccgctctcactctgccagacttgctccagacttttgcaaaaccattgaatgttgaggaagtaggcacttctcctacggtcttgttgattaatctgctgtcttggaaaaatttaaaaagtgtcctaactaatactctttttaaaaaatcaagatataatttacatgcagtgaaatgtacagatcttgatgagttttaacagctgtatccacctgcataacatacaaccctattaagatagagaacattctcctcacaccaggcaggtaatactactttcaggtaggaaagcagtatttgaactctgatagcctagcactatcccctaccaaggttgttgtgtgaacatgggcacagaagaagataattccatggggggcttctgggctttcgaccaagactaagaattagtgattccatttataagatatccaagacaaattgaaatagtggagtttcctcacttttggtctgatggtgttgggctgtttatgacatcatcgtgctggattttagggagaatcaggtttttgacaaggataaaaatctagcctcagaggtgccaggggtaacttagaagtaggagccttttattttcttatttatttatttatttatttatttattttttgagacagagtctcgccctgtcatccaggctggagtacagtggtgcaatctcagctcactgcaacctctgcccaccgggttcaagcaattctcctgtgtcagcctcccaagtagctgaaattatgggtgcctgccaccacgcccagctcatttttgtagttttagtagagatggggttttgccatgttggccaggctggtctcgaactcctgacctcaagtgatctgcccgcctcggcctcccaaagtgctgggattacaggcgtgagccaccgcacctggccagtaggagccttttctacgataaagctaaaataacatttttaaaaaaaatgaaaaaaaaaaaagaccttgatactctctggtacat

SEQ ID NO: 136356 - DNA, 1051 bp, Homo sapiens
agttcactttgggcttgaggtgtgtgatgcctttacagttaagtctgaaaaaatggtcgtgaaaagcccctgggggacctggctgctgagtgacacacagctgggcctttgaaagtgggcttttatgataaatttgaacatggttttagaccttactataagtgcttcaatttttttcccctaactacagaataagtgagctgatttttccatgagggaattgctttggaacattaaccaagattttcttcaaatatagaggtgactatgtaatttgcttgtgccttttaaaaactgatggaggcctagtgaggcatctctgtgaagtcagaagttagacaagggatgcttttcttcacttgccaggtgtggaatgcaaatgagcttcatgcagaataagaggcctttaaaaatccaggttgcctttgaggacctggtaactcttgtttcgatccactgcttctcccaggttgcctatcttttctgtaggtgacagctaagaccatggcctacactttgttttccttcaaccccctaacttcttcctatggccaaccccacccccagtttttggaagatcgctgattttttgtcttagatgactgagtgttatcaacaggattctaaatgtgttgaggcagatacgaaacaaattcacacataccaccccgacatttcgtgtgtgactgccttctgctagtacaatgtcacgttatttcacaagcccctcaaaattctgtgatggaaatattataatattcttttgatagatgaggaaatgaaggctccactagtggctttaagaccacagtgttaaaaaattgtctggtcttggattcaaatgtggttcttgcatcttcagtttgggcacctcctctgctctaccctgcttctctctgtcagcctactactcttcctcccatcaccaccaccttatggccactgaggtgacattctccctcccagtttatgatggagaaacagaggcaaagaaaaaaaaaaaagacatgaggacaatatccaggtgcaactttgaatactcaaaagggct

SEQ ID NO: 136357 - DNA, 2444 bp, Homo sapiens
cagaactcagtcacatggccacacctaactgcaggagagattggcacatacagtctacttatgtgtccaggaggaaaagataaacaggtttgctgaacagctagccagcttctgctacaagggctgaccaaggacaaagaacgattgcaggctccaagcccagcttgaggtggcatgttttcgtggctgagagcagggctggatcattttctcccactgttcttggtggaacattcataggttgaaagtactactatggggcacattcctgctggtaaatgtagcccagtctccaccagtaatatctggtgatggaataaacactagagcaaccttgaacactttggcatctcacccacagaatgagaaatgtagccatgctgtccacactgtcattcaaaggggagcaggagatgaatgtgggaaataaactgctatttctttgcacttggacaagggttgaataaaaataagactctgtccccttttaaggttgtgctttaaatagaaatctgccccaggcccttcttgatcttttttttcctggctccctctctcttagtgtccttcactcctggccacatctgctcctttgtggctgaggggcctgagttctccttgggaaccagattgcctggtggatccctcagattgaagccccctccccacttaccttttcataagtttctagtgctacccggacaggtgcagctattttagttatatttctatagtggttgtgcctgcccttctagacagctgccacttgtctttctgacagactgtttgcttgtgtgtggctgctaatgctgtagtaaaaatcacctcgctgtcctgtccttgttttcagaggcacttgtctcttggtgtaatgctggatgtttaatgggcattgtttataaggagtataagacggaatagtatagcctcttgctttgtgtcgtaattccctctgggcttactgaaaaggatgctgggagttaggccaggctggcaggaagagggatataaattagaaagggagggagcaccagggccagagagaagtgattctgttaagagtgggccctcagaaaaggtggccaaaggtctaaataacaatgaccaaagtgtgcagtaaggagggtgggatccgggttggtgtcaatgtctaagagtctgaagcactatattggtttctggaagagattttcaactggtgagtatgtttgccttgccttattctcccctaatccattctctacactcctgcagagtgaaatcttgcaaggtacaattcctagttcacattcttccatggcttcttataataatatctaaatgaactggttttcaagaccatatgagcctggtcccagcctctctccagcctaatctctccttctgcctccctagattcattgccatggccccagttctaagattcttctgtttccttcttatacgccaagctctctagcacctcatacagctccctctggtcccaactttgataccacttttttcctggtagctttcctgactaaccctccccattgagttagttgcccgtaacactctgtctctctctctctctctctctctctctccgtggcaattatctcactctattgcaattacctgctcatttttgtgctcttccactaaactggaaacttcataggatcagggaccatgacttagtccactttgtactcccaattctatagtcagaataggctaatttctgtaataaagaaccccaaaagtctcagtatctgaagacaacagaagttttatgtcttacccacatggaattcaatgtgggtgttcagtagataaccttctacactgttattcggcaattaggcccctttcattttgtagttttcttatctcctagggctgtcctctctttccaagcctgcatctgacagacagatggaagaagagggaatggagaattgtataggaaggtttttaatgggctctgcctggaagttgggtactaaacccccactcatattccattggctggaactcagccatatgactgcatatacctgcaggagctgctggaaaatgtcatctagccatgagcaggcttggtgagcaagtagtgggtctctgcatgccaccagttagtgcctgcctggaatgtggtaggagctgagtgaatatttgttgaatgagtgaactttggattctaggtttcatcttgattcttaggtgattcagtttaatcatcaggagggacatgtgatgactaatcacagtggatttcagggctctgggcaccttggaagggttacggataatgatagagagaagagtagtgctgcctaagagtccagctcccagtgaggtgctttccttcaaatccaacagggaaagagatttttaaaaattaatcttgaattttcattttttggagaggacaaaggaggaggtaacagagaagagga

SEQ ID NO: 136358 - DNA, 1287 bp, Homo sapiens
accaaatttttagcatcaaaatcctaacagcagaaagaaagtttccctgtggaagaaggactgggccatgtcaattcccaaaccttccatccttccttcctcccaacggctcaggtatacctgagaaacctacatctgctggcatcatctcccatgcattgtttttgcagaagcagagcatgaccgacatctaataatatctatgttggtatctgtctcagcaaatcctttctgtattaaaagattaatgtagtaaatccagagttacagggagattgtggtgtttcctcttctggtgtcagagtgttgtttttttaatactatattttgttttcctttttcaccctcccttctcatccctataaaccatattttgaagcccttctccaattgcttgattttcctaatagtaataaaaagcctagacagtttggatggcatctgtaccacctcttttagggattataacccaatttttctccaacagtgaacttatgggtcttttatgatctggctttaggtctcttgaatgaggctgacatgaggatgtaaggcttgaatcataagattttaggaaaggctctgaaaagcaagctctttctgaggagtgttgattttttttgggggaagattattttgccagtgttcaggtaagaattcacatttgcttctgttactagtcatgatagctgaatggtgtgcttcattcagatactgtgtagtgatcacttactttgaattgcatattaagacatgtgaccatataaccttttatttgaaccaagcaatttacatggtggagctgaagattggttgttactggttcatttttagtgagcactgactgtttctaagactctatcttggtcagactctctcttgaggtctcccagggtaagtcagccagactgagagtgacccaagaagatggggcaacattctgaagaaaatagaaaatagtgctgtcatgtggtgaagaggccagggagcatttgtttccccatgcccctacccaccccgttatttattgattctgctcataacgtaacagtatatgtatttttgttgttgttgttgttgttggagacagggtctcactgtcacccaggctggagtacagtgatgtgatctcctctcactgcaacctccacctcctggactcagtcctcctacctcagcctctctagtagctgggaatacaggcatgtgccaccatacctggctaatttttgtattttttgtagagatggggttttgccatgttgcccaggctggacttgaactcct

SEQ ID NO: 136359 - DNA, 1457 bp, Homo sapiens
agggagcatacaggctccctggtgtctcttctgataaagatgctaattcacctggatcagagctccaccctcatgaacttgtttaaccttaatcacttccttagagcccccgtctccaaatacagccccactgggggttagggcttcagcatatgaaatttgggtacaaacaatcagttcataacacaaggtacttgttgcccactgtaacatctgctgtttcccgaacaagacaaaggtgatgataattaaacatggtactagactattcatgttaaaaagcatagtactgtgtgtgaagcatcttaaatgagtcaggcaggagcacttaatgaaaatctatggtcaattgaacataggtttactgtgcccttgtcttttccttccattatgttttttttttttttttaaattactattccatggggattctcctaagcttgtcaattacagacaggtgctcttgttttggagccagagcagcagttgtaaaaaggtgaaactggaaggtcaggataagctgggttatgccatgacaataaacatctcccaaatctcaatggctcatataacaaatgtttctttctcccctacgctacatgtctaaggggtgtcaccaggggtgctctgttagttgtaattgttcttggatctggactgatggaggcttcattctgacacgtgtcacaaaggagaatatagtaaattgtatactggctccaaagttttcacctagaagtgccacataccacttttgctcatccttcattggctaaagcaagtcacatggccacatccaacctcaaagaagtaggtgaaacaatcttactaagaaggaggagagctaaagctttcctttggcaaatggcactgattaatactataatggggtaataatgaggcctaggtaaacagggtaggacttgagcaaaacttgtggcacaaatgagaaattttatgtacttaatgcttttttagaaaaatgctgcttccaaaacagctctaacatccaggatttcttgcctagccagtatttctgtgcctagagtgagattcagagaatgaaacccttttttactgagatcctgagagttgcctttcaagtgtccatagagtataaataacaatagcctcaaagaaacaattaaaggctctccgggtggcttatctcagatccactgagaaatgaaaacccccaaacatgccagaacactaaaaaaatggctgtgtctgagggtggtctccttgtcatgataaagctttctcctcatccttctgaaaatgataccaccctcatgttagcaacagtatcgctgtctggaaaggggctggctgaatctggtgggattactttgagttgcataaacacagattgaattaagcatggcgagttgatgatggggagtgtagaaagagtcaggaccttgcgttgggataataactagttcattatctgc

SEQ ID NO: 136360 - DNA, 1026 bp, Homo sapiens
tactgacatttggggctggatcattctttgctgtggagctgtctgtgcactgtaggatgtttagccacacccctgttctccactcactgggtaccagtggtatctactcctcttttgtccagttatgacaccaaaaatgttttcagatattgccaatatccctggtgaggcaaaattaccctcagttgagagtcactgtcataaacctactgccactgctttctacattttatttcacaaacttttttgggtactttctgataagaagaacctatgagacactttggacgagtagggaaggtgggctccaagttctttatttgttatgtacttggttgagtgaagcacacagttttcatttctaggggtgggtaatattatgaaaaaaaggtagaaattggtaagatttgatgatagctactgacagggtaactgggtcaaacttcaaagtggcaattctgaaaatgcactagcagtctgaatctccaagtgatttttagacgttttgaaaaatccaagaaattctaagaccaccacagtttggaaccatgccttgagtaataggcctgggatagacatgaaattcctacactgcatttaattaggaggttttgatcagggttccaactggcatttgcagctgatgtttgattaagagaaagtcctgtctcaaaatatgagaaaacttgaataataaaagcactgtgccaatggcttttcatgtatttgtttagaacctgccttggttccaggaaggatttaatgtggatttctatcattgcatgtgctgtcttcatcaatggtttaaaatatcaaccagggtgaagatataagagaggaatatcgaatcattgcttagaagaagacttgagcaggcatctcctcctcctccatctaagcttcaaaagaggcctcccctaaccagacagtccagtgagataatgaattaattagagacttggaagggttagcatgagagccttgtctgtcttgcctctggccctctgtctgctcggctagatcctg

SEQ ID NO: 136361 - DNA, 1206 bp, Homo sapiens
tttgggaggcatgcatatggaagcagaaaatatggaaactgaatctcttaaagctatccatatacctacatactgccagaaagtctctggggaccccagtggtaggtgagcccaagtttaagaaagttgagttggagaatcaattaatgcccttttggaacttcctggtttccagcctttttatctccttgaatgcacatgtctctctctctctctctttctctctctgtgtgtgtgtgtttataaataagagtcattaagccccaattcaccacaaccaaagcttttgcctgttccctcatctcctcttgaattccaactgcaattaaatttatcaaatatttatttaatccaactgcgcatcaggcactacaccaggcattggtgatgttgagatgaccaatggagacaacaatagtcattgttgataacgaagacgcacacacttgtggaattctatagagattttcagaagaagggatggcaagcaacttccaatgttatccttggaaatcaactccttattaggggggaagttcctaaagaaaggataatgaagtctgctaaagaaaagatgcatctgcctgtgtgtactgggggatgtgtgtgtgtgtgtgtgtgtgtgtgtgtgtgtgcacacgtgcgcgcgcgctatacagatcaaaccattgcagacctgcaatgttttccaagtgctttaatgtttaattctctttgatttgatccacggcgtcatcaagtattcctgcgggcaattccaaggtgtctgaggacccttgctgggtatcaaaatccagtaagacctttggagaaattgaagaaggggaactttattggtttttaggccagtcttataatttaattctgttttttgtctgaaacacacatgcacggaatcttttatcgtctgttaggcatgtgtcctaccaatcacaagacttaagatgagaaaaataagcaaatgtttgatggagagaaaacagccgttggaatcctgtggctgttcccacactggggggatcaggcaaacccaggatccatgcattagaaaagaatggtgcagagagagctattgtcccctttgagctgtggcccatagtaaattgttgactctgatcctagggtcaggttattgctgagttgctgttagcattaataattatataatggccttcccatttttctaccccatgtggatcattttgg

SEQ ID NO: 136362 - DNA, 1089 bp, Homo sapiens
gcctattctggacatttcatataaatgcagtcacacaatatgtgatccttggtgtctgacttctttcccttagcatgatgttttcaaggttcatttatgttgtagcatgtatcagtatttcattcctttttatggattaaatacattccattctatggatatactacattttatttgtccatttattcattgatggacatttgagctgttcccacctttttgctattatgaatagtgatgctatgaatatttgtgtgcaagtctttgtgtggacatatgttctcatttcttctcttatatacctaaggagtggaatttctgggtcatatgataactccatgtttaacccttggaggaatagattatgcatttttgacttgttattgtcccatgaggtctgaagttaggaaaggtagggagaataacttcttatggggtagacatcaatggatctcagcagtgcccaggctggcagtgccatttttatgagtgtaacaagtttatcttcttcagccctttgaggcctcattttccagagactactggccctcctgggtctgtgaccctggccagaactaggattttttatttttaacctctcataagggattcctacgaaatatgacccactagagtgcttggtggactgtcaactctgtatctgtggggaacaaaatccagctgttcagcttggttagctgctgtctcatctggaactgcctttcctaggtttatttccccaaacaatggcccaagttgtaggcttgtggttgccagccccctttaatttggtccttagttgcatagtctgttatttgtgctgtgactggctgtgattgaaggggtatgctttttcctaaactcaacagtgtagtaagatgcttggtggactccaataattcatctatcccatggagaatgtgaggagtgtgtgtagtgatggtgaggggcatggcacactgaggggaaagtacctttaaaacagaatactgaatttaatatcagatcaggctgatgttaaacctctgctttccatatgagaacactttcccaggggatttaattgtaaaatgacaaaagggtcttagt

SEQ ID NO: 136363 - DNA, 1224 bp, Homo sapiens
tgaatggcgcagagatcagaaaaggaggagctgggtgagccttgcaggaagtcttatggatttcaccagtgaatttctactcacttaagccagtggttcttaaacttgaatgagcgtcggaatcacctggaggacttgtttaaacaagatgtttgggctcaccacccctgtccccaagtttctgatttagtaggtctggagggaggcctgagaatttgcattagtaataagcttctgctgctgctatttcaggaacaacacttggaaaatcactgacataaacaataagtaagattttgtaagtggcaagataaaggaaatgagtgtgatctgtgtattagtcaggataggttaactgtcataacaaataaatgctaaagtctttgtggtgtagcacagtaatatttgatctcttgctcatgttacagtccagtgtgggttgatagaagagtgctctgctccatgcagtcattctaaggaccaaactccttctaccattgactctgccacaccccagtgccaaagagccctgaattgagccagcagatgacagaggaaaatatggcagatttggcaggtttttatgggtcagacctaaaggagaaacacatcacttctgcccacttgccgttggctggaactcagttacacacctctacttaactgcaagaaagtctgggaaatgtgtcccagccacgaggttccacatggaacttggtttgactagagaggagcattcaacattcacgttgagagaataaatggatgtttcatgttcttccaaggaaatttgcatcagacaattcgggtcattatttagcataattatagcatagattagagtagggggcaaatcaccagatttaggcccagatgctctttattcgaaagcaaaatagctgactgtaaagttacataacttctcagtacctgtttatttatttctctataaaaactgggataagatatatgtgaaaatcactagcctggtgctaagcacataaaaacagagtagttattcccgtgttttctgcattcagatggacagacagtgacaagctattgtggccctgagagccccttcatgtggacagctgtgggattcacagtttaaaggacatgggcacaacctgatctcagcagttgcatggctattctaaagactgctacactgatgtctcagatgtaccataggaaatcaggccatgccagcaaggcccaagg

SEQ ID NO: 136364 - DNA, 1023 bp, Homo sapiens
aaagaagtataactatttttgcttagaaagacctttccttatttcatacgatatgttactggccatcctgggatttcagagtcttttagctccatcgctgttccattcccaagtcccctccttgttgaactgatctgtaagattgggttttgagttgcttccttctgacccttttatgtatagcagtatattttcatcccatggtaacctcctgggtgaaatgttggagacagatatattacaggatatttgtaattatactagaagatgttttagtgggaaagttccttacttatgatcacagcatctctgaaaactttcactgctgtctagaaaaaaaatctttagagttgtcaaatatattccctttagagccaaggacatcttgatactacctaatgccacttccctatttctctctagcttggagatctgggacatttcatagatgtcatggaattctaaaagtcaacagaatttgtaagatgatactctgggatgatttgattttgtacctagtatttgctctaatgagaattcgagtaatccaactgcctttctcctttcatgaatgcccactgtggctgggggcccatgaatcaggtctcccatcaggaattatggccatttggtgacttccagctcacatagtgccatctcagaatgagtgaacccggtgtgcactcagggagggagacatttgagttctccagacctacttaaggcaaatatgttccttatgaatgaggttcctctccttgttttacacttcctttactttgatctcttgcctctggtttttaatgagcaggagctttgtaggaaggtgaggagaatttttgtcatctatagcctgagcagaggggagttgaaggtgaatatgtgtgggcatatacacacacatgtatgtaagtatatgtgcatatatatgtgtgcatctgtgagcatgtggttgtatgtgcacactgcacgtttgctggtctaggcattaagggtattgtctagatgataataataataata

SEQ ID NO: 136365 - DNA, 1034 bp, Homo sapiens
tactgtatgtaagtgatatctcaattaaaaagtacataaaaatggaggcatttaaattgacttgtgccactattgtagaagcagtgtgagggatgccaggggagaggaatagatatatttgatgcagatttaaaggaaaaatcagtcaggtgtttagagatgtagatagctcttaatctgtaagaaccagaagtgatttccaggaagacataattgcttatatccggaagacaataattttattgctcttaatttcatctttattttttttatttgtattttggcttctaatccccctgagcatttgtgtgtttgccctgccttcatttgattctggctctgccttttaaaacagttgctgctgccacctctcccaagttctgaaagatttacaaatgtttgaacagagaaacaaagacagaaaatgggagacatgctctggtttgctgcaaatggcttttcctgccaagctgcggggaatggtatttgggccagctttgccttcctaattggaaccatagctccttggattgccttcagattgaaaacttgagggtctgccactctgcaaggaccatttcatgctgggacactacgtaccaggattctcactttcattggcctttaagagagaacagcagagttccctaatcagtttggctaacacttgaaaggggagtagcaaacttctaattttttgtaggttttatacttctctgctactctcttcatgcccctctcccccagagctgtaataataataccagctaacgtttattgatagcttactctgtgcctgatgtcactctaagcattttgcatgtgttaattcatttaatcctcaccaactctggaagctggtattgctgttgctcaatatagatgaagaaattaggcacagagagatgaagtcagtggtccaagatcacacagctggttaagtgacagagccagcatttgaacacagtctcgttccagagtctgagctcttattcactgtctaaataaaattgattccctgggccgggcgtggt

SEQ ID NO: 136366 - DNA, 1024 bp, Homo sapiens
ctatgtctatgagtgtgctccacagagtgcatatcttcttgtctgattgttaatcagccccacatgtttgtattgttattgaatgatatgagtccttaagttgatgcttccctttcctggattagaaggaagtagagcaggcaaattttgtataggagcccaactctgagtctttggagccctgttgatttataggctatttgatagcattgaagctcattggttaaccagtcctttcccactagaaagccaagtaaaggaagatgctgggtagatgggatgaaggaataaactcagggcagaagagaccacagaaaacatgggctacagcaagtcaagaactcctcatggacaccatctggtcagtggtcctagtcactggcaatcccaggtggacattcacataggctacttctgaggttctcccggtacctgactcagagctactgactccctttctattctagtcacaagcaatccattcgctcattctgctagtggagatttacaagctcagttcagcagctgaatgttggctagaaggccacttggtgaaaagaactcaagtttggaataaggaaaccgaagttctaacttttactgttctagtgacagctctgtgatcttgcgggagtcatattgtctctgtccacttcagtttattcatctgttaaatgagttcagtattaagttgccttctagaattcctgtgagcatcaaagggtatgaaaacacttgaagaagaacaaaattttatgagtgcacaagggaatatcgtaaggcatctacggactccatcataagagcttcatgtcaatttcttcttgctgtctttccatttggtgttcattgaagagaagggcctgagggactgagtttgtttctgtgcctagaataccgctaatggtcatctgtcaaattgcaataagagagtttaattttatgttcaatcagagcagggttcctgttggtttctacctcttagaggttgagctccaagcttaagcatgaggaatatgtgcag

SEQ ID NO: 136367 - DNA, 1085 bp, Homo sapiens
ctttttagccatcagttcctatgggaactaatagagtaagaactcactcctgggcaccaaagcatgcatgagggatccactctcacaacccaaacatctcccaccgggccccacctccaacattggagattaaatttcaacatgagctttggaggaaacaaatatccaaaccatagcagaggttaagtaacttaccccaaaatccatagccagcagaccaggatttagagctggagactgcgatattcaaggcagatctcagaaaaggacccagtgggcttaagatttaaagtatggagagcatcatatacagtgaagcctcagactctcagctttatgagggtagaaaccatgtatattatgttcattgtgggatccagcacagaatgtattccaggcctgacacagtccttgtgctctttcagtgcttgttgactcattgatttttgataaggcagagaaatgcacaaccaagacatgaaactttggtacataaatttaatgaacaaatgcctatatttatatttgttcttttatttaataaatattctattgagcctctactatgtgccaggtgttagaagtagaaaaatgaatacaatgtggtttttttgcccatgaagaactcatgtatggagatatatgcatacagcccaaccttttctctcaatttctctcacttgctgtctgggtctctcctaaggctcatcatgtgttacctggtgttaaagttttgtttttcatgtgtttgtgtgtgcatgcattctttttctttgtttgtttgtttgtttgtttcttgacagtgtcttgctctgtgtcccaggctggagtgcagtggcgagatctcggctcactgcagcctccgccccctggggttcaagtgattctcatgcctcagcctgctgagtagctgagaccacaggcgcacactaccacacctggctaatttttttatttttagtagagatgggatttcaccatgttggctaggctggtcttgaactcctgacctcaagtcatctacctgcctcggcctcccaaagtgctgggattacaggcgcgagagggagtctcactctgttgcc

SEQ ID NO: 136368 - DNA, 1048 bp, Homo sapiens
agaagcattagcatcacttgggagcttgttagaactgctgactctggactctacccccagacctactgcactagtagctctgggggtgggacccaggaatttgtgttttagcatttctccgggaggtccccatgcatgctccagtttgagaagcactgctaaggatagggaagccaggttctgtcatgtgtgattgctcaataaataatttttgcttgattgcatacataaattactgtatgaacagggaaagtgggttggtcttactaggtctgggcatgactccaagcatccattttgccaagtctgcggagactgtgaggaggtggagtcgtatttccttccctctcagaaaatttggatggatgtgtttaaatggctgggaagatagactccatcagcatcaatgtgggaaatggtgagcaactgagcatgaaacctgatgggaaccaagtgaatgggccagttcgtaatgaaggccagaagataaaacagggtggagtgatgatttcacagaagggctgagaactctgtgcagatggtttggggcaagatgctaaagccacaagtttacaagaattgtatgcttgggactcttttctgttccagggacttattacaaattaagccctccctattcctgcatatgtggcagagccttgctgtaaatctatttcaaactgttttttctttctcatcttattctccttttctctttctttaactcttccttccctctctatctcctttttcctttctgaccaagaggctattgttgtccgtgttttgatcagggctaaagctaccctgtggcataacatttgttaaggacaaggatgtgtgggtttttgtgagtaatcagcagctgcttttggagtcatggttttaaggaatctcccttcctcaatagtgtgatcattccctcctcccaacacccccttccaaaagagaaaacttgcataagagcagttggctcaatataataaaatatagcttggcatcatgagctttataaacaagaggcatttaatacactgcatagagtttt

SEQ ID NO: 136369 - DNA, 1033 bp, Homo sapiens
atttgggtaaggaagattcaaattttccaatgatttgcagacagtgaaaagtttgaacataaacacacatgatttatttaccacagaatatcaagactgtcgagccaagtcaggaagcaagcgtgtgccaataaaatcttgacagataccagaagaaaaatgagaacccaacttagtaagtggtgggaaagaataagtggtggtagatggaattctttttaaagagcccatatagaaatgagtgagtgtagtgttcttgaacagtggcccatttatactggaagctatttctttgacatatatgaaccagccagatcactgagagggaggatgcttcttcccacaagaagagtaatctgattgtttttcctcaaataaataaccaatttattatccacccagatatgcaattgttaaagacactaaggttgtgctgttcaatatggcagcctctagctgcagagctgtaagcacttgaaatgtagttagtgcgattgaggagctgaatcttgaatttcatttaattttaatgagtttaaattttaaaatgggtgtttgattcagttattggaaaagtttttgttctttgcaacaattctggtatgtgaatctactttttcaaccatttcatgaaatctaaatatagatcaagtaattctgatgaaaatttaccatccaaattgagctgtgctttaactgtaaaaacacatgggatttcaaagacttaatataaaagaagagaatgtaaaatatctcgttagtaatttttttacattgatcacatgttgaaatgataatattttagacataatggattaaataaaacacattattaaacttaatttcacctcctttaaaaatttttttatgtggttattacatatgtggcctgcattcttgcattatatttcacatgaacaatgctttatatttatttatttatttatttatttttaacttttattttaggttcgggggtacacgtgaaggtttgttatataggtagacttgtgtcataggggtttgcggtaca

SEQ ID NO: 136370 - DNA, 1092 bp, Homo sapiens
gtgagctccatttcctctgcaatgcttcagcctaaccagcaaaattgtttacttcctaaacatttttccaacctccaaaacagctcacaggtgcagacactctggcctcgaggaatcttctagtgctgaaggtgccatgtctaggttttctgaatcatagatcatggcagaatattcgtgattggtacttgttgaggacatccacttgccatgtttccaggactccagacataactgtggccagttcctgtaggagtcaaagcatgaaagtaactcaggaaacacccagtcagtggggatggagttgggaattgcatccggtgctgtcatggattggagagccttgtctggggccaggtaagccatagttaggatttctggtgggtaagagagaacaccaggcagtaagcaccatcctcctattcagcggatttctcttttaaatttttttaaagttttattttatttttaattgacaaataatacttgtatgtacaactcatagaattagagagtagaatggtatttactagaggctatggggaggggatggggaatggagacattttgatcagtggctttcttgatgttctgacacctcgtggggacacggagctgagacttttccagggggcatctgctccactgctatcacccaagtaagtctgttaatgccccagaagctgtgagaataataataacgataataataaagtagctaccatttttagtatcactccagggattcttgttgtttgtttgaaatatggcaatctagtgaaacctatggatcccttctcagaataatgtttcttaatgcgtaaagtataatacataggattgcaaaggaagccaagtatattgaaatacagttatcaaagtatttaaaaaattccaatattataatagatatatgctcctttattactacattaaataacaagagttagtggtgagtctaacacacattataatttgaagtagtggtggtgtaaataatatttcagtacagcaactttaatgtgatatgaaaatatctgtaattcctattggtaagaaactcacaagtactgctaataccaccgtggtttg

SEQ ID NO: 136371 - DNA, 1055 bp, Homo sapiens
atcccagggccaagtaccagacaactaaggacatctatgccttagttgtctggtacttggccctgggatgattagggcaggtggatggtgacctggagtgtgagagctgcataaaggaagtggttgggatgtggactctggattggttggttcgcatatgaaaggagctctcccaggtgagttgtttgctatctctaggaattacctagccctgggaggtgcagctcctctagggtgaacaaggccccaagatgtcaaagcatcaaaaatacagaattaatgcaaaagccaacactgtcctcagagtggatggcagcagcattagattggagtgatttcccaataagtggtgtgagaggctcccctcttcatttagctccaatggcgagaatgttttacattgcacatattggcagctccgttgtcctcataaaaagaagcatgatagaaagtaaaagctgagacttaatggccaatttaagcttgagataactctgctatggtagatctaaagaggctcccaggttacctacgtagcaccagtctcaaccttatgtgcactaattcaaacttcaggggacacacattttgcatttctacaaactaagcgagtattaggaaaaataaacactcaccagttctttttatgctatcacattctatgttgcacataagaaaaaaatatgctttctagagagttgtaaacattctgcacacaacatccattatgttatagctggcaatggggtccaaatggaataatctgcagactaaaccctttctttatccccagagctgaggctgaggtcagtaggacagtgtgggtgaaacagcttctgaggtgccctccgactctgaaatgtgctgacctggagttttgccagttggcccaggttggataatagactgttagatggcctacatctaagggatgataaaatagcagcccagaccttgatccctgctcctgccaggttctaaagcatcagctctgggtggtgggggtggggttccggatggactgcttttcaattttcccaagccccagaaaagca

SEQ ID NO: 136372 - DNA, 1051 bp, Homo sapiens
cactgcactctagcctgggtgacagagcaagaccctatctcaagaaaaaaaaaaagtggggggattaggatatttagaaggacttacttccttgagaccatagccaaggtggaaataagagaaggtcaaggtgtgtgggtggggcccgcacagtggctcacacctgtagtcccaacactttgggaggcagaggcaggaggattgcttgagcccaggagtttgagaccagcctgagcaacatgggggaaaccccatctctataaaaattagccaggcatagtggtgggcgcctatattctcaactattcaggaggctgaaatgggaggaatgcttgagtctgggaggtcaaggctgcagtgagccatgattacaccaactgcactccagcctgggcaacagagcgagaccctgtctcaaaaacaaacaaacaaacaaaaagatgtgtgggctgggtaacaacaagtcttgaatgttccaggacggtgatgatttcagatattccctttcagcgagaaaccaagtatatagatttggggttcatagaaaacatgatcactatccttgtgagaaaatgcagctctaggccaacttgcttgggaatattaagagtctttggcacatcttcaaagaaaagtttccccatggggttacttctgacgtttatgcttccagtttcaattgtttggtggagagtccattgaactcagttaattctttttatttacctcaatgttcgatatgacaggccaacattttaagtgctattctaaattgtagcttgtgtacactcgggaaaaaagggcctatttgtctcctcgggtctcctccatttttttcttcctgcattggttaatgttcccttctccttgttgaatatttggaagtttccttccaaagcttgggaggggctagtttcacaggaaggtcacatgaacacgatctcatgggcagttcattgactctgcccagctttaatctctgcggttggagcaggagagtgaagggcagtggacagacactgccctctccctctccatttattctcctcct

SEQ ID NO: 136373 - DNA, 1047 bp, Homo sapiens
ctcactgcaacctccacctcccaggctcaagtgattctcctgcctcagcctcccgagtagctgggattacaggcatgtgccactactgcccggctaatatttgtgtttttagtagacggggtttcaccatgttggccaggctagacttgaactcctgacctcaaattatccgcctgcctcagcctcccaaagtgctgggattacaagagtgagccactgtgcccggctcatttttgtttatctattcatctgttgatgtacttttgggctccttctaccttttggctattgtgaatagtgccatgtgaacatttgtgtgtgtatttgcttgagtactagttttcatttcttttgggcatatacaaggaaagtcagcatgtggaagtgtgggtacagagaaggtaaggggttggagataggattcaaacccagagccttcatgtaaccaccatgtggtgctgcttcctataatacagcactgtccctggaatccctcttagggaactagcttataacaaagtctctttagcatttggtaatgaaagtcctgcaggcatgatggggttcaggtagaatccctttaaagtatcagctgctctccagcaaatggtggtgttgggaggcattcttctttattcttgaacttcaggtaatagttacaagtaatttatttatttatttatttatttatttatttatttatgagacagagtcttactctgttgcccaggctggagtgcagtggtgtgatcttggcccactgcaacctccgcctcccaggttcaagtgattctcgtgtctcagcctccagagtagctgggactacaggcacccgccatgatgcccagctattttttgtacttttagtaaagacgaggtttctccatgttggccaggctggtctcaaactccttacctcaggtgatccacctgccttggtcccccaaagtgctgggattacaggcgtgagccaccacgcctggcccagtagttagaagtagttttaatctctatggcatgttactcttaaaaaatatttttacctag

SEQ ID NO: 136374 - DNA, 1079 bp, Homo sapiens
gttttacaggtcttgagaatcttggctgcctatttacagtttcttggaacgggcttaaacctaaaatcaaatgtcagattattacgagctgaagcagaattctgtaaatgctcggtttcttcattaggggaaaaaattaacgtggaaccttggtagatatattactcacctgcattcagtgcttcccaggaggtaaaattacagtatgagctcagtgcattcttaatttcccatggtaggttacaaatgggctcttttctattctacaacttctttaatctcaataccttatttctcccacgtgtagctctacacaatcaagcaacttatacaccacatggctcatttgtctaactggttctgctttggtttcaagttcatgctttctataaccttgattttgacctgggtgtgcatgcaggctgcaagttcaatgtttttcagaatgtggacttcagatcaaccacatcagaatctcccccagagagcttgttgcaagcacagcttcttgggctccaccctagacctcctgaatcaaactattttgagagtggggctcagggatctacattgttttctacaagctattgggtgatgcttatgtgcactcaaggttgagactcactggtttcgaccagtgggtctcaactggggccagttgtgcaccacaaggggacatttgacaatgtctggaaatgtatttggttgtcacatctggagggaggtgctactgcctaagtaagtagaggccaggtgtgatggttaatattgaatgtcaacttgattgaaggatgcaaaatattcttcctggatgtgtgtattagtctgttttctgctgctgataaagatatacccaaggccgggcaatttacaaaagaaagaggtttaatggatttatagttccacgtggctggggaggcctcacaatcatggcagaaggcaaggaggagcaagtcatgtcttacatcagtggtgacaggcaaagagagagcttgtgcagggaacctcccctttataaagccatcagatctcatgagactttttcactatcacgagaacaccatgggaaagacctgcct

SEQ ID NO: 136375 - DNA, 1043 bp, Homo sapiens
caaactacaattggaactcaggcagtctgggttcttaacaagagtattattctgcctcaattacttcaaatgtagtcaataatttgtcacatctgacttgaatcaagtgaaataatcattaagatgattttcctggtccagcgtagaaatgggatgcaagccacatgtataatttcaagttttctaggagacaaactgttaaaagatgtaaaaaaaaaaaaaaaggtgaacttaatcttaatagtatattttattaaccaacatatctgaagtactataatttgaacatgtgatcactataaaacattattagcattttacatttttcttttgtagtatgcctttgaagttctgtatatattttacacttacagcatatctcaattcagactagccaagtttcaaataccccaaagccatatgtgacaactggccaccatattggacagtgcatccttagctgatacttggtgagaagcattaggcttggagaactgagtttgaatgattttttgaaaggcaggaagattgttttccaatcctgcttatttagctcaagtcagagagaggccttaaatgtttttccatattttgacagacttcagtggctacttctttccagggtctggcttctgcaaatggacccaagcatttataccctcatgtgcacacatgcccctcctctgccaataaatattcttgaaaggggatttaacttacaacacacacacacgcgcacacacacacacacacacacacacacacacacacgaagaaaacactgaccatctttgttaccaatgtgttattttcattagattgaggagtgtacaggaggggagagatgtttcatttgtgcctgtgtgatatcttcctatgtctgcttgacctttcaacctccacatactgccaacttggccccagtgtaattcaaatggcacacacacacacacacacgtgcacatacacattttaacccaggaatgggaatatatggatctacagccttaaaagcaaaagcttgttgcatggctagcccagaa

SEQ ID NO: 136376 - DNA, 1001 bp, Homo sapiens
tcataactcttcctttgtcttcagtggccttgacatttttgaagaataccagccagttgttttatagaatgttccttaattttggtttctctgatgtttcttcacatttacatttggatttaggcatttttcagttggaatgctatataggcatgtaagtgatttgttctctggggaccatatcaggaggcacagatgtccatttggcccttgttggtgaggtcacatttgattagttaagctggtgtctgtgtagctgttctttttccttttgtaatgaacaaatataatttgttggaagatattttgacattatgtaaatatcccattcctcatcaaactctctccacctagctttagcattcattgaggattcttgcctggataatgatttactctaatggtttcatccatcatcccttctatatttgttagtccaaaatagtctttgattgggtgggaaggcatactaagcctgccgatcttagtagctgagctcacagggaggaagggccttgatttcctccttggactctgactgacagctcttttgaagcagtcctgttctgttgggtgtatgttttgacacatgtagtaactcattttggaaatacttattttttactagataactttcaaataagtttttaaatactttacaaaaaaatggtaggatgttggttgcatatgttatcatttatttttgtggcatctgctggaaaattgcacctggttcttttacacagtgttgatcaacagaaacctgatcatgatgatagcaataataatatcttctcaccatctgaaccctgctccagagaaagggatgaaattagagagattgtttgaattctgagaaggatggttggactaaaaaggaaaaccagctattggaagcagatgaattaagtaaaacatgaatttccaggaatgtttcaaaatacttgtgtgggagttctttttggaatgttaaagcagtgaatggcattgcttggaatttt

SEQ ID NO: 136377 - DNA, 1051 bp, Homo sapiens
ctgggagtgctggctaactcaccccttcttcaaacacgctgtgtggcttcaggatatggctgctggctttaaaaaagaaggaaaaataaattaagacacccacactgcaagacaacccctgtgagtatatgttatactgggaatgccccatttctcaaatatttataaatatatggtctcttggagtgttctaggtctgtcatttgggaaggttagacagccctgggccactatcctttttcgtaagcacagggcactttcacaaataccagattgacagctgggtgatgccaagggaatggtgatgtgttgccctgtgtatatctgggatgtgttagacatccctcccttccttctttttctttgttttccctccctccttcccttcttcccttccttctttcttttttcttcctccctccttcccttcttcccctcctttctttccaagcacatcagtgagaatgtagcacagcttggttttctgaagtccgtcaactactgtgtactgcttgtcaagaagggtgctatataagctgaaatgctgctctaaatttcacattatcccttcctgctgctcattgagttatttaattagaagctgccatattttctagggaaaacactttgaacagaaggcctgatttcactgagaatggatgcctttattatgtgtcaaggagctaaaaattgctagtaagatgtcagtgtgtatatgtatatgaaatacagaaaagtgcatgtacatatatgaagagcaatcaaaagagaaatgcgaaggggttggaaaatgaagaggtgtcagatccagtcgatgatttggttcctgctcaggagtgtgtaagcttcagttggctccagtttggctaacactgcaatgcctttagtgtcactgaagccgacaaagaaagctgacgcgttgtttttctagggggaaaaaaaatgctctccttccacattcccagtgcagacaacagcagaaaacagaaatgagaccgtactgcccagagtccacacagactccaactcaaagtctttgaattatgtattc

SEQ ID NO: 136378 - DNA, 1051 bp, Homo sapiens
ctattctaaccaatagaattaagtactagtggtgttgctatgggaaagtcatttcactctgagcccatactttctcattcgttaataatctttgtaccatagggcagatgttcaacatggtatgttgaacacactcatactttaacttatgacttccacagtaaccctagggaggagttgctgaggactccatctctcttacagatgcaatatctcagccaggtagacatagcattatgcctttacattcagaaaaggaagcaaattctgtgacatgggactatcagggggtttcttggtgcatttgggccttgacctgggttctttagaatggcaaattttgccaccaggaaaaggcagaagagattgtgagtgataaaagctaaagcagtctgggccagaagagctacatatgagttctgtgtctatacagcatgtgactttgttatttgagaaagtagaatgtcaggttgagggagagaaaaacagatcaggccaaaactactaggcatctgatttgggtggtggagagagggtgggcagaagagaacagaaatgatgaaatctggatcctagttcttgataaaccgtcaaccctctgaagaacttgggaaaattaatttcacttatctgaactctggttagggcaaaacacaagtcatttcccaagagtctttaaataatgagcatcatcacaattgtaagggctcacactgattgaatgtttattgtgtgggctgggcacggtggcttatgcctgtaatccctgcactttgggaggccaagacgggtggatcacttgagcctaggagttcaagaccagcctgggcaacatggcgagactccgtctctacaaaaaattagctgggcatggtggtgtgtgcctgtagtctcagctacttgggaggctgaggcgggaggattgcttgaatctgagaggcagaggtttcaatgagccaagattgcaccaatgtactccaacctgggtgatggagtcagatcctgtctaaaaagtaaattaaaaaaaaaatttattatgtactccttgcct

SEQ ID NO: 136379 - DNA, 1035 bp, Homo sapiens
aggttaagagacttgcctggagttaagtagcagagttgagagtcaaactcagatagtctgacttcagagccaggtttgaatgtgactggttcctgcacaaggcttttctatgagatgcgtaaaatgctttagtggacaaatctttccatttttccctctggagggggtttaagtggtatttgtcttccttctacctcacagggtgattgtgaaggtgaacagcttagtaacatactgggagtgggagtggtgatacagcccactctgcaatgcagggtgtgtggttaaacctgtaaattgaatgttgataatgataatgatttttactttacagataacatttatcacatgttaataaaatataaagtaagatgcacgtaagtaaagaatgtagttactctgtccagaccctctggaattttttaagggtctttcccccacttcagctttgatgggctttcagcggccagccctgcagctcatctttggactattggacctgcattgatcccaggatgaaagagcccaaggtatctgagtttgcgaacacacacacacacacacacacacacacacacacacacacacacacactttagccaaagactgatgggtacaagagcccagctgccttacctcaaattgagacaactttgaggtgtaaactcacactctagagttccctgtgcgacctcagtggaactttgctggagaccttcgccttgcttagctcttgcccttctctcttgggagcatctcttatccaatagcttgtaatcccaatttccttgggaaacaatgagaagagaaaacattgaaaaacaaaccagtagggacatctaaagcttcaaaagaggcatggcaaggagggcttgatcttcttggtttgacaagtcattgtttgctgattgcttgacatccattacagagccaggcctgccacaagccatctctgccctacctccctgccaacattgtcctgcaagacggccagggccttttgaagcagcctgtggagagcctgccagggttctg

SEQ ID NO: 136380 - DNA, 1025 bp, Homo sapiens
attcattcattcaacaaacttgtttgtgtgagtgcctgttaggtgttactgtgctagccatgaaactagcaccattcttgtcctagaaataatataaaatatgtttgttaaatatgtagtaagcatttcataaatgctcttgaagggtgtacacaatagaggctataacagcttctctgaacaatcctgtggttaatgatgttctttaattatgccaacatccaatacctcatgttaaagacttttagcattttccagatgttggaaatgatcagaaaattgtatattctcagtaactatgaagaataatctgagttcttagttgtgggtgctgaggcccaagaggtatatccttcatcaaggttacatgtgggtagaggtagatgcctcctgcatcccagcattgggttagttagctaagaaagtaggctcgaggcccaactgccggggttccaattctgtctctgccacctataggttaagtgatcttgaggaagtcatttaacttctctgtgttttagtttccttctctgtgaagtggggctggaatagtaactggctgcatagggtgtatggattcagtgagttcctatatatcgaaatactcaagagtgtaaacagtatagtttcatgtgtaataacagccattagcaacaagaagtaaggctggactgttttctcacatatggcagaaattcaattggtgttataaaataatcaaaactggtaaatagccagttcttagatctatctgtccaagatatttcatgagcagattgtatttccacaaacaaagaaaaacctgtttacaactgtacctggcatatagtaagtgctcaataagtgttcgctagtatcttgcggcactgctctcatctcctgcagtgttggagagggtgtttgaagcgctttattggagtcaaaggataatgctcccaccccctgactctgtgcgcatgtgtgtgagtgtgtgtgtatgtgtgtgagtgtgtaccagtgtacaaaaaggtgtgttgtagtggaaa

SEQ ID NO: 136381 - DNA, 1036 bp, Homo sapiens
tctagggggcatatcattttctgggctgggcagctagtactaagacactaatttagttctgattttaataatgtaaaggtatatggataaaaaggccgcctgtcaataccagagttctaaggaggatgactcttgagttaggtttcccaagaccttgaataaaaaagtttgcgctggaaaagttaaatgatgctgccaaccccagggggcaaggcagctgagacagagagagacagagagagagagagagagagagagagagtgagttggggattgtggctctttggcatctcaaaaggagcttgaatgtcagacagggtgtggaggacagcaagaagagatcagtgtgtaaaatattccaatggaaaattccaaaaaagcgtcagccacagctaaatgggacaagaaacaatatacgttaatttaagacgacgccgtcaatttagtggcatgtttattgaaatagccctttgcattctaaaaacagcactagggtatggacctctgaatccttgcaggaaactgtacaaattcctaggagggaacagcagccccaaatctgactttaataacaaaaggcaattatttttagtattttccagtagatctcagctgtctggtattgtcaggctctattcatggagaggtggaatttggagagagttagttcagtgaatggtgagtgggggagggaggaaaggaaggaggaaaataaggcagggaaaaaacacagaaaggttgggtgggggagcgagaaggaaggagagaaggagagagaaaggagagaatgagaatatgagtgggagcttgtgagcttttccactctggtactattatctggcatgatggccctcaaggcaaggtgccagtcatataataataaatgccaagatcaaacctctaggaacaaatataaagggactctaaaacaagcaatttgtcagactggtttcagggtacggagaaacataaagaacttgggagaaagtaagtcaccgataaattctcatggaaacaacaggaaagccattatagg

SEQ ID NO: 136382 - DNA, 1001 bp, Homo sapiens
cataactaatacagcaactgtgcaccatcttgaatacatttggattggggaagccaagcctttctttagcattcacactaaaggcaccagagtcatcaagagatgaaccaaagttcaatctgagtgctagaactattagggacctcagtgatcatctaatgctgtctctcttttcctgaatggtcttgctcttaggaccattttaatgttctttctcttttctgggtaaaatacagttaatacagttttgtttttactaggatcctcatgcaatcttaggtgaagtgttagctagttctagaactgtagaaaaccccatggtttctcctcctctcccatgcccaaatcctcttctacctgctggctgatgcctctagttttaccattccaggttggtcctctcagcaataggcttgatttccattaaaatgcaaaaaccctaggacaggcttaagccattatcaggtgtttttcactttgttgtgaaggaagggtcaaagtaatatgttgtggaatgaaagttttatttctgtaaggccagagggttagagaaaggaagaggaagtgccagcctggagggcaaaaggttctaaactgggaacttgggggcccacatggcagctccacagactctcactccttctcccaaaatgtctttatttgtatgtatttgtctttggactccctgtggtgatcaggtacttggtaattgttcttgctacaactggagctctgccaagtggaaggttcccaattgagaggcagctcaaatccgggatgagggtccccagccttgtcagaagggtgtgttagtgcttttttttttaatcccagtttgtggaagcagcagtggggatctgtgcaaagagggaaggttagagtgttgttttcaacttcatttgatatgggaactctttatccaggctcaaaggagagcattgcataagggggcatatgtagcctctcatgcatgcatatgcatgcttacacccatggactca

SEQ ID NO: 136383 - DNA, 1057 bp, Homo sapiens
atttctaggaccctgcaagacaaaataaaaccaaaaaattcaaggacacgcaggagttgtatgtgtccttcaactcctgcctcaccaccaaaacaaacaaatacactaaaatatttgaacttcaacaaactgacagaagatggtgccattaaactagggatcttgtgaaacacaccaaagccacacaaatgagtaagagatagattagcagatccacatagagtgattgcaaaaggtcaatgaaagaatatatgaagcaagggttttatgtccaaccatgctgttcatcaagtatagaaaagcaattttcaacatacaggaacttagagaattttgcacccatgagtcctttatgaggcatctaccacaggacaagcttcatccaaccaagggataattggggaaatgtcagcaaaaggatgggtagcatacattttaatacatgtaaatgtagatctaaaactaaaagtacagtggagatgaagatagaaaactaaggtgcaattttaaatgttgtgacaacagagaatgatacaactaaaaatgagagaagggagaggtaaagaagaaaatagaataagctaattgatcactgtctaggcaataagtggctgttaaaggataccaataagaactagttaaccagatagtaaaggcttgaataataaaacagaggactaaggacattaaaatggtataagaaaaaagaagactactagcaaaaaaaaaaaaaatacaaatcttcctaaataccaaaaaattgttttatataaacagagaagacaacacatcttacagaggaagaaacataacaaatataacaaaatacacataattataacatttatcagagtttagtcatatcaatgaatatgagtgagcttaatttgcctatttaaaaacttttcaatttggctcacaaagcaaatccaactatatgctctatacattaaacacacacaagatttttatttattaattaggtcctgattatttgaaaaaacatgaccaagaaaaagagagagaaaacacaaataaaataagcaatgacaggaaa

SEQ ID NO: 136384 - DNA, 1024 bp, Homo sapiens
atgcccaagtgatttcttcttgcattattcccatcaatgttactggtatcgttctggttttttcttaggggcagtcgggtcagaatattctgtgtattaaatatgttcaaaatctgtgctgctaagaataccattttgtaaacaagtaatgcctttttgtcatcaaaatacaaacccagaggatgttcgatatgcttttgtcaggttttgaacatcaatttacatgttttccgcgggccacttgttatgtaaattatggacagtttctttttgaaaaaaatcaccaaatagctctttggccatagctgactgaaataatggagaaagcggcagtgattaatcatatgataatgatgtgtggcactgcaagaaagaaaacagcaaacccaggcttctcaaactgcaagtaatggtcctgtaggccaactagaaaatctgttttcatgcttccttggatgaaggtaggctttttaaaaaagactgttaagacttctgtattgatttgggggatttttgacctaaaaatatatggatacagagatgaaggctgaattctattttaaaaccagcaaggctgtcttcctttcactctctttttttctcctcctgtgtactgagagtgtgaatattagtctagatagaatggaagcatagccagacctttctgaaaaatttattggcagcagttataaattccacaattggatctagtaatcttagtcgtaagtaaaataatgttataaaatattctaactttcaaagacataaatggtctatccattgggctttcttacatctctaatagttacattttaacttatttgtatattgaaaatttcaaaacagccatgttatgactgattttcatattggtaccatgtgactaaagattgcatgtcacttgagatgcatgttgcacacagctatcattaaccccactcagatttctctcaaataaagtggggaagcaaatggaccagatatctgggacagatattatttttttcctgagaaaaaaggagtc

SEQ ID NO: 136385 - DNA, 1053 bp, Homo sapiens
tttgaaaaatccatggtgcagacaagagtttgagttcctcacctcccctctcatcattctagttgtgatgggactgcatgtaatgttgataatgtgattatggagagagaaactaacaagcaccatggtttgccctctgtgtttacaaaaacaaacctatgggataaagactggcaattccagctttacagttggtatagaaggtggatccatttaagtgcagaactggggactgccttgtatgtttattttatattgaaaagacatctcatgctaaaccagaaagcattcagtttagtaaatagaagaaagtagacagagttgggtgatgatttaaaaaaacaaatccttagactgttgagtttcctcacagcaaaagaggtgtgtgtgtgtgtgtgtgtgtgtgtgtgtgtgtgtgtgtgtgtgcgcgcgcgtgcgcgcatggggaatgcaagaaggtttggaccataagagatggagggaacaaaacctcacaaagacggcttttaatgaagaaatgggtcaggatatgttagctgagctaattcaggttatcatcctggctgctgatttactatgcaaaggtatcagcttcagagagcccagaaatagatcagtaaatagtagtaactaaaggttataaatccttaaggagccatttctatgtgagagggattttttggatgtctttttctcttctctttcttttgatttttcttctttgcttgtttttgttggcagtgcaaactgttgtggagagctgcatttagaagtaaagcttaatgtactgcagcataatttaaataagagctgaataacagctcccttatatttgttcacaggcttaacccaaactctttccttacttcccgtcaaaaatatcactgtgttccaagtaaatgaaaatttgtttgccatttctaaagctaatgagacctatttgtgggttgcaggagttggctttgacagagaggctagtatacgctgctctctggttcattcacaatcggtactacagcggagacgaaaattgaggaggaggaaaaccatctc

SEQ ID NO: 136386 - DNA, 1033 bp, Homo sapiens
gtgattgtgcacacaaacccagacccctccaacactgtcaataggatatccggaaccagggactctgagtgccaaaccgaggatattctgattgctgccccatccagaaggagaatcagagctcaaaggggtcaaagcattgcagcttccctttctcattctgctggcaacatttctgccctagcagacaaaggtgacaccatgtttactcctgcagtgagcagccgcacaagatctcggagccttccccgggaaggtaatagaggtggggatgctgagcccaaagttggcgctaaaccctcagcatatgaagagggagagtcttttgtgggtgaccatgaaagaacccctaatgatttcagtgaggctccaagcagcccgagtgcccaggaccaccagcctactttgggcctggcctgctctcaacatcttcacagcccccagcacaaattaagtgagaggggaaggtcacgtctgtcccgaatggctgctgactctggcagctgtgacatctcctccaactcagacacgtttgggagccccatccactgcatctccacggctggcgtcctccttagcagccacatggaccagaaagatgaccaccagtcatccagtggcaactggagtgggagcagctccacgtgcccctcgcagacctcagaaaccatccctcctgcagcttctcctccactcactggctcttcacactgtgactcggagttgtcactaaacacagcccctcatgccaatgaggatgccagtgttttcgtgacagagcaatacaatgaccacttggataaagtgagaggccatcgggcaaactcctttacctccactgttgcagacctgctggatgatcccaacaacagcaacacaagtgacagtgagtggaattacctacaccaccaccatgatgcctcctgccgccaggattttagtcctgagcgtcccaaggcagacagcctgggctgcccaagcttcacaagcatggccacttatgacagctttctggaaaagtctccatcagaca

SEQ ID NO: 136387 - DNA, 1321 bp, Homo sapiens
gcagggaagaccaagcatctctttcaggaaaccaaaggcaaagccgaccccacctaaacgtagctcatcattgaggaagtctgatggaaacgcagatatttctgagaagaaagaaccaaagataagcagtggtcagcacctgcctcacagttccagggaaatgaagctgcctcttgatttcgccaacacgccttctcgaatggaaaacgccaatcttcccaccaagcaggaaccttcttggataaaccagagtgaacaaggcattaaggaacctcagttagatgcttcggatattccaccattcaaagatgaagttgccgaatccacacactatgcagacctctggctcctaaatgacttgaaaacaaatgatccttatagatctctatctaattcaagcaccgctacgggtaccacagtcattgaatgcatcaaatctccagagagctctgaatcccaaacatcacaatcagaatcaagagccaccaccccatctcttccttctgttgacaatgagtttaaactggcttcaccagaaaagctggctggcttggcatctccatcaagtggctattcaagccagtctgaaacgccaacatcctctttccctacagctttcttttcaggtccattgtctcccggaggtagcaaaagaaaacctaaagtcccagaaagaaaatcctcactacagcaaccctctttaaaagatggaactatatcactgagtaaagaccttgaacttccaattatacctcctacccatcttgatctaagtgctcttcataatgtcttgaacaaaccattccaccaccgtcatccactgcatgtttttactcataataagcagaacacagtaggagaaacactgaggtcgaatcctccaccgtcccttgcaattacaccaacgatcctgaaatctgttaaccttaggtccatcaacaagtctgaagaagttaagcaaaaagaagaaaacaatacagatctcccttatttagaggaaagcacactcacaacggctgccttgtctccaagtaagattaggccgcatacagcaaataaatcagtatctcgtcaatactccactgaagacaccatactgtcctttttagactcttctgcagttgagatgggaccagataaactacatttagaaaaaaactctacttttgatgtgaagaatcgctgcgatccagaaaccataacatcagctggtagcagtcttctagattcaaatgtcacaaaagaccaagtgcgtacagagactgagcctattccagaaaacacgccaaccaaaaactgtgcttttcccacagaaggattt

SEQ ID NO: 136388 - DNA, 1452 bp, Homo sapiens
gggacatgtctgttcgaagcaaatcgagagctcccctcagcagtagcagcagcagcgccagttccatcacttcacccagcagtaatgtgacaacccccaacagccagaggtctcctggtctcatataccgaaatgccaaaaagtccaacacatccaatgaagagtttaagctgttactgctcaagaaaggcagtcgctcagattctagttaccgcatgtctgccactgagatcctgaagagccccatactgcccaaacctcctggggagctcacagcagagtcccctcagagcaccgatgatgcccatcaggggtcacaaggggctgaggcattgtccccactctctccatgctccccacgagttaatgcagaaggcttttcctcgaagagctttgccacctcagcatcagcaagggttggacgttctcgggcccctcctgcagccagcagcagccgctacagtgtccgctgccggctgtacaatacgcccatgcaggcaatctccgagggagagacggaaaattctgacgggagcccacatgacgaccgttcctcccagagttcaacatagactgcctgtaccaggctgcctggcaaaggccaaaacccttactcacatgaggatggaggaacagaacagaggacttgggaaaagtctcaacttgatggggtagcatcactgctaagcaatgaatgaatttctaaatacagtatgtgctgggtaaacagaaagtggtttagacattcttgattagtttccatattttaagtagctgcagtctttcatgtttttctttagcatagtttgatttacgcaatctccttccttgtgaaaatagaggatacaaaattgtctaattttcatgacacctagaaaacgttttcccagagctgcctattcagaaactaaagccctcactgtcattattctttaagaagatgaaattactctggatgtttggtatttttttacattaaaacaaactaaagcaaaatttagaagaaagaactacacatatgtaaataccatatttttgataaaaatgtgtaaatagatttatcaatgatgagtggacatgtggtcaattatctactgcacaccaactgtttatagaatacacaaaaataaaatgtaataactgtattctgtgaataccattttcatatcaaatgccatatttaaatgtccaccaatatgatttctgagtggtaaacctcaaatatgaattttaaactggtgaactaaaggaaatcttgaggtcatatactgaaatatgaataaattaaaataatgaattcagatctaatcatttttatgacaaattgcagcaccaaacaaactaatagcaacccatggctgtgatttgttgtgtggtaatttggacagaatgaaaagcatgcttttgattttttttttaatcagtgagagaagtcatcattctcaacacaaa

SEQ ID NO: 136389 - DNA, 2412 bp, Homo sapiens
aatgagttttcagtgaagctttctctctgtgctgatgagattcatgctacctaaaaattaacagaaatgacactgtgaacaatgtagttggaaaataggtatgtgtatatgcattatttatactcattgttaaactgggaatggggaacagctctggttcacaatactacatacaactgagtttttgtctggttttactatagtgtctgcttgatggcaaaaggggagggtggagggtgggagaggaaatgtcagggcatgtgctctgataaaataaaggcagggaaacaagctgaattacttgaaattacttgaattttcttgtcttaaaactgaaaaaaaaatgtagttacacgttaaaatctgcaaatggtttttacacctctgattttaacatgaacttatactaatgtttggaatcttatgtcagaaatataagcagctatgtacttagaataggttttgaatgggagaggtagaacagagagagaattaagaagggatctgacttataaaagactagaatgtgattagagtgatagaacataccaatgttaccaagaaattgacaagctgctggctttaagcttatgcaagtggtagttgggaaagtaggaggtgtggaagagggtttgcattttggattaattcatgcaaaatgaaggaggaagcctggtctaagaagatactgtctttcaatagaaatgatttctaaactgctacagattaagaatagataatctgattgctgttgttttgtttgtttggaaagaaaaaaaatgtctggcttcttctactatttgttttcactaccaaactgtgttactaaatttcttgtcatccttgtatgtaaaatgggtgctgggggtggaggggtataagaggagggagagtcagagagagtgtgtatgggtgtgtgtgagtgtgagtgtgtgtgtacgcacacacactggggatagataagctacctggtaaagggtttgaacatttacaaaatgtcacactttttcttaaaagaaaaatattttggggtttgaataaaatggaccaccatttctcattggaacccattaattaagaaaaccagcatggtttgacaccacatgggaacatgaataaatctgtctcatgatttgaaaagtacaccttgcaaagttttaaaaataaagtttttaggcaaatgcgataagaaaccgtcatttccagtcacagtaggcgatctttcgtaatttcataaaagcagttcgtttgcagtatggcttttgtgtagttaggggttttttaagtgtgaagaaaggtatgtgggctttaaaagtgattctaaatcttgaatagaaaacacatgaattggctttaataaaaatgtcacctttttattattgacattaagtaatggtaccatatattttttaaaatacatattgacttgaattgtgaggcaataagataccttctatatgtaatgatcacagaactaacccttataatatagttttacttattttgtttactctaaaaatctatagcagagtttctctattttatatttcatagatttaaaaaacccaaataaagatggatttaaaattcactgtggaaaagagtattgagttacaaactgagaagaaaaagcaggaagttccctaataatctggaatattctacatggcttgattacatagcaaacaagaccaagatttagggctgtcttaaacatcactgccgtcttgaagcagggtacacacgttaggtattgtgaagaacatcaatccgaacttttcttctgttgtttgcactgatgcgattttttgttcttttatgtttatacaacgtatctatgttgtgtaggggaaattttttcattttttaaaaattctactttggttttgttgttgttttgatttgtttttggctaagtagaggacatggactagttgtagcaaacagaacatgctgtttgctcttgccaaaggtcagtgagtgagtgcatttgctgcagtggtggcacgtagagaactagatggtaataaagatttaaaactatgaagaaggttacagtgtaactattttggtactagaaccagttcatgctggccgaaacgacaatggtttatggacttgcatccattttgtatttttgtaatatttgtaaatatgaactttttaaattgctgcaaagatggtttcttttgtaagatgttttcaacgtttacattcaatccaagcctttgtatattttagagctgtgcaacactttaagtcttgtatttatttttagtaaaaatggtgacagtttcattgtgaacccctctcaaaaaaaatgtatcagaaaagtttgattacctagaaagtgtgtatagaaactgcaaataaacgtgactgcaattaaacaaccggtttctctcttcactg

SEQ ID NO: 136390 - DNA, 1038 bp, Homo sapiens
catgtgtcagtagtcccagctacttgggaggcaaggtgggaggatcacttgagcctgggaggtcagcgctgcagtgagccatgattgtgccactgcactccagcctgggtaacagagcgagaccctgtctcaaaaaaaccaaaacaacaacaacaacaacaaaacaaaacaaaaactaactgtaaatttggggaatttccatcggatttagctagtaaaatatacctagtctagacagatagagagagattgaaattccttgaaagacttaaagtaagagagaagtcataggttagattagattaacctaattttacccgagtaacagatcttttgctgtatttgtctgtggccaaagaggcttggattgcttagtctgttttgtgatctttgaagctttaaggtaacgtctgaacctgcttttgttgtttgggggaggtcagatgggatgctcttatgtagccatcctcacatcatttttgtataagctttcacagttggagtcttgagaccttgttggggaacttaacaaaaggttccaggaatgagaccattattccctacctaacatctcttctttcaggataatgatcaggtcaagtatgatttgtcttttttcccccccattgaagctccaagttatatagctgtacctgatcccagtgtcctgaaacaaggcttctctaaggacccttcaacctggtctgtggatgaagtgatacagtttatgaaacatacagatcctcagatatcaggccccctcgccgacctcttcaggcaacatgtaatgtatcttttgatccggttttcctgccgtaatgcctttgaatgacctctgtgcaggcccttcatttggatgctgtgtggatggtgggggaaccctatcaactgatttttccatatgtgagagaggttatttttcccaagattagttccttaaatggtagattaatggtctgttctttaagtgagtatccaggtgcctaaaatacaaactgcttcaacttctcaagatacgatgattcagcattgcaactc

SEQ ID NO: 136391 - DNA, 1051 bp, Homo sapiens
tagtagtatttgaattgtaagtctattgaagatagcctcctttgtctttttccctgtaggagaaccattgtttgctgggggaagtgccattcccaaagaggagaatctttcagaagattctaagagctcatcactaaattcaggaaattatttgaatcctgcctgtagaaatcctatgtatattcatacttcagtctcccaggatttttctcgaagtgtgccaggcaccacaagttcaccactagttggggacatatcccccaagagcagtccccatgaagttaaattccaaatgcagaggaaaagtgaaggtatgttcaaaaatagtgactctcaatgtgtttgtcttttgccttgagattttcatacctaacagcatcccctgagagtatcacattggagaaagtgctaaaatttgggaggctgagtcctctctttcacatcactgtcaggtcagaccattatggatcctccaatcctcttgacagcacagaactgtctctagggatctggatcaccaaccatgtctctgatagagacttctcagattagtagtgcttgaacagttgtaatttatcatttccttgggtaccgtctggactcacaaacctctcatgactctgaggcctggaaagacagtccctctcctttctgttgtacacttttcttcgtctctcttgagacattcctggcctcagcctgtgttgactcctggattcgggctggcatcttgttaccacagccacaccatttcctcactctccacatccttcctcagacccaccaggaagtcatgacatgtataagtagggcaatatcctgttgccatttagaaagagccagaacaggccaggcgcggggtggctcacacctgtaatcctagcactttgggaggccgaggcaggcagatcacccgaagtcgggagtttgagaccagcctgaccaacgtggagaaaccctgtctctactaaaaatacaaaattagctgagcatggtgatgcatgcctgtaatcccagctacttgggagcccgaggcaggagaatcacttga

SEQ ID NO: 136392 - DNA, 1020 bp, Homo sapiens
aagttctcaggtgttattgccgcatggttttctggccagctgctgctgattctggaaatacagagtaccatcacagactatctttttaagtccagggattctaattcacgtgccactcaagtgtgaagcgtgggtaccacgtctctagctactacttttttttctggtcctcctggttaccctcacccttcttcataaagcttgtctcctctacttcagtgacatctctcatatccatccccttttttccatttccttgttactaccctgcttcagactgtactaaccccttctctggtttagtaaagcaggcttctaactggagtcctctttccagtttctcccctctggtgtagctgtccagtgagtccctttgaaataaaggtatgatactgtgacatgcttgcaaaaagtatacatggagaagcagtggcatggagagcacaggtgttggagtttgtcagacctgggttccaatcctggccttgtaatctctgctgaaagagtataaagtctgaccggcctacattttaattcagttcctgctgttaactagctatgtgcccatagacaaagtactgagcctctctagttctcagtttccttatctgcaaagtggatacctctttggttgtgaaattgaaagaaagtatatgtaaattcttagcctgcattatgcctggcatgaagtaggagcaataaaaggtagctgttagaactagggggaagaggaagagtgaggtttcatgttttcatgtgatattatcctttttttttccttcttcaggagaggtaggaggtcatccaaaatggtaggaaatttggaagatggctaggaagggaagggccacctgtgtgggaagaggggtgtctgtgtattgataggttttctgtttctaagagtaatttggggaaaaatacgagttggagatgttgagagtacaatttcctgatttctttttttttggacacagagtctcagtctgtcacccaggttggagtgtagtgacaccatctcgg

SEQ ID NO: 136393 - DNA, 1049 bp, Homo sapiens
tttgaaaggaaattcttgtactgtgtatacaattaaaagatgaaaatattcatctgtctttgtgccattttatataatgtgggaatgtatgaagaattgtttttgtgatgtgcctaaaatgtctgtagattttatatcatcagtttggacaagattctaaaaaattgaataaacattttgattgtttctttgtgggttcagtgtctttgcatcaatgtaaaaatatatttacatatttttaggtagcagaaatgatcattgatattaactatatttaggttttctgtgagtgaagtggatagtgggatatagtaattgattatgtagtgttttcacaaaatttcttttaatcagtctcattgttatgtatgcatacgcattttttctcaagtctgtgtctatgtaaacaaacatggaaactttggccctcatctggatcccaagagaatccagcagctgcctgaccacttcggcccgggcccggtgaatgtggtgcttcgccggattgtgcaggcctgtgtggattgtgcccttgaaactaaaactgtttttggatacctgaagccagataatcgtggaggagaagtgataactggtatacttatctaatacattgtctaattcagtcccttcccccttcccttcccccttcccttcccccttcccttcccccttccctttcctctccccttcccctttcccctccccttccccctcccccgccctttcttctttcttccttcatctttttagaacagggtctcactctgtcacccaggctggagtgcagtggtgtgatcttggctcactgcagcctccacctcccaggttcaagcgattctcccaccttagcctcctgagtagctgggattataggcatgcgccatcatgcctggctaacttttgtatttttagtagagacagggttttgccatgttgcccaggctagtcgtgaactcctggcctcatgtgatctgcccaccttggcctcgcagaatgctgggattacaggtgtgagccaccgcacctagcctgtaatatttattata

SEQ ID NO: 136394 - DNA, 1189 bp, Homo sapiens
acaccaatttacatatttgttaggtttgtttgactgcctgttgtaaaatttcttgttgattgcttttccctgtccgcaaccactactatcaccagcattagaatgtaagctccaccagagcagggatgtttgatatatttgttcatcaatgaatcttaaattcctggtacatagtagataatacatatttcttgaatgaatgaacccggctggttttgtttctttccaggttcttgactctgctccagagaaaatatgagatgttggagagcagagtttcagatctgtgagaactgttgtcttcctgtattaattgataattaaacatggagcttaatttttggttgctaagggttgtgagagaatacgcaacttttcacttcgagcacatgagtcttaatacatcttaacaatgaaatcttttttttttttaatgttttgataggaaccaccaaagcccccactaaataattttaaagtggggatgaaactggaagctattgacaaaaagaacccgtatctcatctgtcctgcgaccattggagatgttaaaggggatgaagttcatatcacatttgatggctggagtggagcttttgattactggtgcaagtatgattctcgagatattttcccagctgggtggtgtcgcctgacaggagatgtattacaacccccaggaactagtggtaagataataattaactactttttcttctactttattgaagttagatgtaactgtcattggtggcattgtgattagcgttggtggtaccaggtggtacatgccccaactggtggcagacagaacaaagcgctgtccaggctagagaactggaggtaaaggaaagctatgattagaattcttgaggtcactgcagcatcatagtctgagttccagtccacactggagattatggacaaagctaaaagtcatatttggaccattgaggtcttgttgctataagcaaggggggtggtatgtactcagctccttttatagttgatattcaattaaaaattatacatggtattccattgttcatatctcaaagatattttttaaaagactgggcttaacaactgttataaacatgtcttacatgatttttgtcctgtttttaagttaaattgacactttgatagccttaagttaaatctacagtgaaaatttttgactctgtgg

SEQ ID NO: 136395 - DNA, 1054 bp, Homo sapiens
gttggctaatttcaaggggaatggtctaatcagattcttactttagaaagccactcggtatattttagaggctgtatttgggttgcctggaagtgggcagatgagtgagaacagcagcgggtagtgtttttatgctgcatgtcaagccaaggagagaattttgaagatcttttccttgactcttacagctctgacctcactcatcatccactgtgactgttatttaaaatgttcctcaggtattctggtgacatagctgtccatgtgtcttctcttatagttgatgcattttaaccaaattttatttatatatatagtctcagattccacctgtgaatgatttcaaagttggtatgaaattggaagcccgtgaccctcgcaatgccacttcagtatgtattgctacggttattggaattactggggccaggttacggttacgactggatggtagtgacaacagaaatgatttttggaggcttgtcgattccccagacatacaacctgttgggacatgtgaaaaggaaggagacttacttcaacctccactaggtaagaagaaagttttaaaaatagcgtattctttctaatgtgatattcaatagaaatggctttaagtggccttttaaaatttattttcttgggcattcttgcaaatagatggtcaggtggttgctgtggagaatgtatgatgagagaggaaatcagcaccatctgttgtggagttttgcttaagtacatatttggcatatgtgtgtagaagttttctccactccagggcaagactcatgctaggtcttcaaacttgaaatgtcaaaaccagctctactagattacatatgcagattcagaactccttctggggaagaactttgtagcgtttgatacaaggcacatgctctctcaatattgtccactgagccattcagcaattttggtatggggataagcctaggggaagggtatgattccacattcaggttccagtttcaaactcaagaatttcatttcacctacagtgggaagaaatcagagcgagagggacaggaattag

SEQ ID NO: 136396 - DNA, 1047 bp, Homo sapiens
atttgtttttatttccttcaagtgttttaaaatgttttgttcacaaaatgtgaagaggctatatttacttgttcctgtatgttagtgttgaaggtgatagtatgatcttatgattaacaatccaattagggtccattaataatagatttttaaaaaaggcgtgctgcttttcgagaatatgataggttgagtacctagcaagacttctaatttctttttattaaaagtactattttaggattgagaatttttggcgttgacactgaaaccaggaataaggaagcctgcagcagtcttagcagtttgacaccaccagtaggtgtttctgttgacaaatgcagagaagagaacatttgggaaggaaatctttttttcggggcgggggttgggggggaggtgagggtggttgaggggggaaggagccagaagagagaagctaatgctgccagcactgtatgctgagcatttcacaagtacaaggaaacctaattagggaaaaattccgtttggctctattaaataatagaactacaaaagaggcatactaaataaagttaaccattccaagagtgttagatattatctgccatttcagagtagttgggggttcctcaattggagagggtatcaaatctctttgaattgtcttgcctttttaacatagtcaatgcagcgattaatttgctagatgtatatatatcaaacagttgagtattccagttttgttgtttagcatatttcctaagcctaaattttttaaaatcaaaatccgatatattttttttaaatttgaaatagaattctttgtccagagagtaattccttttttcctggctcagtcttaaaatttattcatgatttaggggtttgtgattggtatttttttacccctttttctcaggtttttgatttttacttatgcaagttccctaagtctgcctttgtttatattgtaattttcttggaattatttaaatcagagtgtggcatctattgtgtcccctggggttttaaaaggaaaggctcccattgaaagaaattgcaggg

SEQ ID NO: 136397 - DNA, 1045 bp, Homo sapiens
agagaaataaagtactttgctcagattacccagctagtcatcagaaacagcaaaattgccatccaaactggtctgacttgaagccgtgctcttcaaaaccatgctttctgcttctctttaggaaactgatttcccaagcatatttatttttgacaccgggtctcactctgttgcccaggctgaagtgcagtggtgtgatcacagcttgctgcacccttaacttggcagactcagtggatcctcccatctcagcctcctagtagctggagactacaggcacgtgctcccataccaggccaatttttctttatttttaatagaggcggggtctcatgatgttgctcaggctggtcttgaactcctggcgtcaagcgatcctcctgctttggcctcccaaagtgcttggactacaggcatgagccaccgccaggcccaccccaagggtattttgagttcctactgtatattatgcctcgggtgtactgaaggtatatgtatgcttcttggagttcatgggctacattggcaaggctgctggacctttagtcacatgggggactgaactcagatccatcaggactgctagataggacaattggaagtgcagacttttctaaccagagggtcagacttttctaacagaggttctgtttcttcataaatgaaggctgtacataatcatgccaaaaatgaggtagttgtttctaattagctacttggtatttcatgtttctggatattgcattataacttttgatggactttgattacatttgctacactaataaaggcttcgaagatactccttgaattcaattttgtggcttagatatacccttgaagtaaaatggcagccattataatttgcagatgggcacctcttgtgtaattatgaccagtgaaataaaatctggaggtaaagtctatagagatatattattgtgtgtgcgtgtttttttgagatggagtctcgctctgttgcctaggctggagtgcaatggcgtgatctcggctcactgcaacctccgtctcctgggttcaaacg

SEQ ID NO: 136398 - DNA, 1030 bp, Homo sapiens
tgggcatggtggctcacacctgtaatcccagcactttgggaggctgaggcaggcagatcacttgagcccaggagtttgagaccagcctgggcaacatggcaaaaccccatttctacaaaaatgcaaaattagccaagtgtggtggtatgtgcctgtagtcccagctactcccagagagtaagctgggaggattgcttgagcccaggagctggaggctgcagtgagccgtgattatgccactgcactccagcctgggtgacagcgagactcttgactcaaaaaaaaaaaaaaaaaaaaaaaaagaactgaaagaaatctaaaacgaccagaaaatagagaaacaggcattgaagcacaagttggcagcaggggccaggtcttgaaaaggtttagtaggccattttgctgggtttttgaacttgtcctaaatctcctgggaaacggttgaagattttaaggaggggtgtgacatgaaatgaaatgctacaaaacccaagaattttagttcaatggaaccttggtaatttaccagaaaggtcataatctctgcaaagtaaaatattcttcccttgtttcattaaaatttttgtaactcctttcttgattgattgtcgtctgcggtactcctttcattgtttttgtagaaattccctttaattttctaaaggtaccttttcttttatccctcactgttctgttaaccttatataggaatgtcatttctatttataactgaattagaatattttttctaacagctttagctctcttccatatttaaacttaaaattctttgctgtttttttccctccagacacctttaatctgctcgaagtatttaatgttttaacgaaatgtttcattaagtttgctttattcttttgttcttccaaatacagtgtcttagatctagtttaatatttctcagcatttatgctatttcatgttttatgaaatcacatgtgagcacccagaatgtttttagaaaattttgttactattgtataggagcactactcttcatcaggag

SEQ ID NO: 136399 - DNA, 1032 bp, Homo sapiens
ctttcttggtgtaaagttgttagctcatgcctgtaaagaatacttttgcccactgttcctctccacatatacgaagaataactgcagcatcacctctttcaaatagttccttggaaatctacatagtgattcaggcttgaattgagttcgcttttgccatgagttattttctttcttttctttttttttgagacggagtcttgttctcttgcccatgctggagtgcagtggcgcaatctcggctcactgcaacctccgcctcccgagttcaagcgattctcctgcctcagcctcccgagtagctgggattacaggcatgtgcccccacgcccggctaagttttgtatttttagtaaagacggggtttcaccatgttggccaggctggtctcaaactcctgacctcatgatctgcctgccttggcctcccacagtgctgggattgcaggcttgagccaccatgcctggcctgaagaggtacactcaacaggcacttaaggggactgggaaaggaaatgactcttgagtgcttgtgaagagtcttaaaggaagtccagaatgtcaggtgcaggtaaagggtttacaggcagagggtgcattaaaagacaaggatctggctggccgcggtggctcatgcctgtaattccagcactttgggaggccgaggcaggtggatcacgaggtcaggagttcaagaccagcctggccaacatggtgaaacccccgtctctactaaaaatacaaaaattagccgggcgtggtggtgtgtgtctgtagtcccagctactcaggaggctgaggcagtagaatctcttgaaccctggaggcggaggttgcagtgagccaagattgcaccactgccctccagcctgggcgacagagcgaacctccgtctcaaaaaaaaaaaaaaaaaaaagacaaggatctaaggatgggcatataaagctgggagaattgcaagaagtaatgtttatttatgtattacatgctttgctttgatgcttgtaccctagctatatcccaggatcttttc

SEQ ID NO: 136400 - DNA, 1032 bp, Homo sapiens
gctggtcttgaactcctgacctcatgacccacccgccttggcctcccaaagtgctgggattacaggcgtgagccactgcgcccggcctgagagcctgttttctttgggttttgccatctattttaacttgcttcagtgctccttggaattcctcactgatctatgtgctgagagcatctcctagattctcagggctgctctggattaattttttatttctttcgcttatttcactgagttttggtgtgggaggaaaggtaaatgtgtgtttggtcagccattttaaagtagagcttcagtgccctgtcttcgtgggtttcccccttttctctattgcagacatcatggccgagaatgtcttttaaagtgaatcattgtgtacacctttgatcattttattaagatactggccttatatcctgcccttcccccctgccgccccccagaatcactgggtggtgatggtagatgattcacatgggaatgtgctacacttgtgaaagatgtagaggaaatactgctgattctcctgaaggaaaagtctgttaatttttctctgttggccattctggccgcatggtttctccttattgtttttttgttggattttaaaaattactagtaagattgaacatttataagattcatttgttgcccatttatattttttcctgcattttcttttcatgttaataaaagttttttccccttaatacgattcccttaattctttttttttttttttggagacggaggctcactctgtctccaggctggagtgcagtggcgcaatcttggctcactgcaacctccacctcccatgttcaagcgattcccctgcctcggccttccgagtagctgggactaccggcgcatgccaccacgcgcagctaatttttgtatttttagtagagtcggggtttcaccatgttggccaggatggtctcgatctcttgacctcgtgatctgcccgcctcggcctcccaaagtgctgggattacaggcatgagccactgtgcccggtccccttaa

SEQ ID NO: 136401 - DNA, 1343 bp, Homo sapiens
tcaaaagaccttaaaagaatataaaaactaagcatcttatctctccctctattgtcaatcttgatttactttcaagacacacggtctttgaagaaacttgttcatgcctttgtaaatggattgtgttgagtactgcttcctgttgcttactgttatgggaatgagtgtactttgcctgtcagtgatattactagctactatttgagggcttgcagtgtgtaacagaataaaggacaatgcccttttgaaattctagttcagcataagtcagcaagtttcaaactgagttcttgatatttgcaaggttctgtgctaggcatctccatgtccaaagaccaatgagaatgaatctcctaacctcttgaccttgtctaatggggataggaggcacataccatgatacaagaccaactataattgtcactagaattggaaataaagtgctgccgggcttccatatcacagcatatcacattttatttgggttgcagagaggggaaggtatccttgtaaagtaagcttatccaacccgcggtctgtgggctgcatgtggcccaggatggctttgaatgtggcccagcacaaattcgtaaactttcttaagacatgagattttttttgcggtttttttttttttttcttttttagcttattggttatcgttagtgttagaatatttcctgtgtggcccaagacaattcttccaatgtggcccagggaagccaaaagattcgacacccctgctgtaaagcttcatggaagggttgtggtctaagaggtccaccttgaaaggatttcagtcgcagctgcaatatatgccaggtgaagggaattgcttgatggaatcatgtagcaggaacatatagtctataccaagtggttctcagagtgtggtccccagaccagcagcatcagcatcatctggaaacttgttagaaatgcaaactcttgggctccactccagacctactgattcagaaactcagaaatcccagaaacctgggttttaactagttctctaggtgattgtgatgtgttaaagtttgaaaaccattggtctagacttaattggtcagagaatagttgaagtaaggtttgagaagggaagttatgagaacaagaaggcaggggccttactgcagagaccttgattgagtactagggtgtgagtatatggggctggggaaccgttagggtgaaggaaaggacatccttggagtttactttaggaagagtgagccaacaaactttttttgtaagatgaattaaaactaaaagatactggaggccgggcgtggtggctcacgcctataatctcagcattttgggaggcctaggtgggc

SEQ ID NO: 136402 - DNA, 1029 bp, Homo sapiens
accccgtctctactaaaaatacaaaaattaaccaggcatggtggtgtgcgcctgtaatcccagctactcaggaggctgaggcaggagaatcgcttgaacccaggaggcggaggttgcagtgagccaagattgcgccactgcactccagcctgggtgacggagcaagactctgtctcaaaaataaaaaataaatgaaaaaaataaaagataccggaagctgggagtagcagccttggaaagtgaaaggagcaacacagctgggatgagtgagccttgacagctggctggtcaagtgtcaggaaagaggccacagcctcagaagcagctatggttctgaacctgggtgttgagaggatggtggtgcctttagaagcagtgcaggcagaagacgcaaaggccacatggtgcaggaaaatgggacaagggggaagaggatgttttctacaaataattgcttcttcccctgaatgtacaagtttagtgtaagaaattcaggtacttgaggggacagtgaagaagaatgcagaatcgcctcaaatcccactttacagagattagcaaaacattattctctttaaatattttgagtatacatttgtttctttaaactcagttttgtatgcatggaattatacaattccgtaacaaattttctcagacaaattgaatttgaatacgttagtgttccacacatgaatgatcagtgtgcgtttggaaattggtggattttatatttgggaaacagaatgtttatacaagcagctaattggtaaagattgcaatttcattatccatggtcataaaaacatcctgtccacattagttgttacagaggaaatctggggcaaaacagtttaagatgcttggtgtgctgttagtctggggagaagaactgcaactaagaagaaaaaagatgaaacatttgtggcttttattagaatagcaagtttattacggtgtcttacaagaactaattaatattgggcataaaatagtctcattacataggtcaataccaagttccaaagt

SEQ ID NO: 136403 - DNA, 1096 bp, Homo sapiens
gcagcacaaacaattgaggaagtgcaaagattttcgcttgatttttcttcagtttcttctatattttaaataggacacaaatatctctgtaaataaaaataacttccaatacatttggaaaacatcccagacttcctgtccatgcctcgcaaagttgctgctgtctagtcattattactatgttttttccctttgacataagtgaccctcacaggaatagcttcatcaccagctgtttggccagtggtattccacttactttgtttttcctgtttctctgaaatatgctgaaagataatcactccgtgccttcccttgtttagaatgaatttactcaattgctctggaagcttaccttggtaaatgatttggaaccgtaatgaaaaaagagggtaggctttatatattttatattggtgccttaggaattgacatttatttattgaggatttttgtgctcattttcaatttgaaagggtcctagtgtttagaattaaattgtgggacttgaaagctaaaaaggaacttggagatcgtccaactgaggagccttattttttaaatgaggaaacaaaagttgtcaagatcaaccataaatctgatagtttggcttggtgaaagaaacctaggtttcagaaaatctctcatgtagtttgcagtttatagccacaaggaccaggagtctgaagacttgataagagggtctgtttttcaaaatattaacaaagtttagcctggaagctccctttgtgaattttccatgtcattgacagtgtttgaaatctcgtcatgtcttcaggatcaataacctctaccatgtacttttatactttttaattagcggattttcaaacttttaaaaacagtaactcctttttttcaatataatcttatattgaaccacaggatacaaaaaagatacgtgatatttaattaaaatagttttaagcacaattttaatttgttggataataaattaatgatgacatagctaaaatttatgaaatgctgattagagtactgtacatacatatttcacttctctctctagcttaaaatatttgaatgggtgtactgtaattcatttaactaggcc

SEQ ID NO: 136404 - DNA, 1113 bp, Homo sapiens
aacataagtatatactctaatgaacaattataagtgaatgtctatttaaccatcactcaagacatagaaatagtgccccaggaacccctcctgtgttgtgttgtgttgtgttgtcttgtctagcctttccctttccctttctctttccctttcttccttcctttctttcctttctttctctgtcaccccggcagtgcacagtgcacagtgcacaatcacggctcaccgcagctgtgatcacctaggctcaaggaatcctcccacttcagcctcccaagtagctgggactagaggtgttcgccaccaacgcccagctaattaaaaaaaaaaaaaaaaagttgttgtagagacaaggtctcattatgttgcccaggctggtctcaaactcctgggtttaagtgatccttccgcctcagccttccaaagtgccgcctcagccttccaaaatgccgggctgccatatgtcttttctcaatctcagtccctccttagaggtaattaatatcctgatttttttacaataaacacttccttgatcacttttttatacagttaccacttacatgtacatacttaatatagtttatagttcagctttgcctgtttttaaactgtatataaaagaaacaatgctgttgtatcagttttctgttgcataataacttaccacatgcttagccatgttaagacaccatatattattagctcacagttctgtaggttcccagcctgatctttttattacttgtgttttctgtttcatgaatttttgctcttactcatttctttcttcacattttcattgggctcattttgtgtttcttttgtttagcctcttgagtttgatgcttagttcatgtttccagtttttagtattttctgatatatgcatataagattctcaatttcctccttaagcattgttttctttctatagatttgtatttttgttattgttaagtgtattatgttttcttccttgattgacatatggattattttgggagtgtatttatttccaaacataagaattattttctaactacttcttttgtgattgatcaactttagttgtggaaagagaccatccttttacttcagtccttgtaattt

SEQ ID NO: 136405 - DNA, 1043 bp, Homo sapiens
aaaaaagttcacctatgtgaacagcaaagctgttattaagttttaaagttggcaaatcctttcaaatacatagaaacaattaaaataaagagtttaatcattggatgcttgtttcaaggtctgaaattcaaaccatacaaaacaaataggtctttgttccttcactagtcaactcctcttccatttcttcatcgatgttatgtaaaaatttcattttcagtgtcttgcttaccatctgttctggaatagcctattttatttttcaaaagtattagaattagagaccaatgcaataaagctgctgactggagaaggctagcacatacggtgtaacaaggttagaatgctccagattctgggcctaagtttttctggatcataactagtttttctcattatagccataggtgatcatcttctttgggattggctcaaaattaccagactgttatatatatatatatatatcagaatatgttactttgttatcagaactaccattgctgtatgtttctttctttggaaagcacctcacatgtatttttggctaggatatacatataaagtatataacaatctgtcaccaggaacggtgactcatgcctataatcccagcactttgggaggctgaggtggtggatcacaaggtcaagagatccagaccatcttggccaacatggtgaaaccctgtctctactaaaaatacaaaaattagctgggtgtggtggcgggcgcctgtagtcccagctactcaggaggctgaggcaggagaatcgcttgaacctaggaggtggaggttgcagtgagtgagcttgtgccactgcactccagcctgatgagagagcgagactgtctcaaaacacacacacacacacacacacacacacacacacacaggttgcagtgagtgagcttgtgccactgcactccagcctgatgagagagcgagactgtctcaaaacacgcacacacacacacacacacacacacacacacacacacacacacacacacccctgtcaagcaaactctgcattcttgta

SEQ ID NO: 136406 - DNA, 1004 bp, Homo sapiens
gcaggcagatcacctgaggtccaagagttcaagaccagcctggccaacatggtgaaaccccatctctactaaaaatacaaaaaaatttgctgggcatggtggcggacacctgtaatcccagctactcaggaggccgaggcagaattgcttgaacccgggaggcggaggttgcagtgagcggagattgggccactgcactccagcctgcgcgacagagcaagactccgtctcagaaaacaacagagtagtacgtcgtgatctatttctacataaaaagtaatccaacactgatttactgtgtaattagaagctgtagttcatattttacaatttaaaggtgtatttcatatattaaagcattttaatttaaaaaaaatcaacttttttttttgtttttaaagttacttcctatacttaaaacactgtgttctaggcatgacatcataaagtaaaattcaaccagacatctaaggaaaatctgttgaatgcctatcaaatatcaggcacttagctaggcactgactacaaaaaaaaataagatgtaatttttacttttaaggaatttaacatggataaattaacaaatataaagtcatgttttcttttcttttcttatttttttttttttttttttttttttttttttttttgtgacagagtctcgctctgtcgccaggctggagtgcagtgggacaatctcagctcactgcaacctctgcctcccgggttcaagtgattctcctgcctcagcctcccgagtagctgggactacaggtgcccgctaccatgcctggctaattttttttatttttagtagagatggcgttttaccatgttggccaggatgatctcgatctcttgacctcatgatccaccctcggcctcccagagtgctgggattataggcgtgagccatcgccccagccctaaagtcatgttttctgttgtcaggaagtttaacatatagtttgggaggtgaatttgagataagatggtagttgaca

SEQ ID NO: 136407 - DNA, 1049 bp, Homo sapiens
ctattagagcccttaacatattaatcacagttattttaaattccctatctgataatccccaagtctgtgccatatctgagtctggttctgatgcttactttgtctctttagactatgctttttcttgctttttggcctgccttgtaatttttttaaagctggatatgatatattaggcaataggaactgaataaataggcctttagtgtaaggttatatgttaatctgtctagaagctaggtcatgtttaatgatgtaggtatagatgccagaggcttcagtttcctctagtgtctttgttattttatttttcctagtctgttgtctgtgggttctcctaagaactcctttataaatagtgagtctgtgtcttgcaactctttcagttgtaattctctgttaatgtactggagctctgttgacatgatgggaagagtatggcgaagggaagaaagtgttctataatctcattcttctgtaagacctgagtctttggctacaaccttcagaagtgtttccagccaccccttcccctccttttcttctgttagatgaaacaagaaggctagagggactgtctttggctgatttcctttctccctggacaccaaggctctggtaaattttctcttggactgttgacctttgttatgaaaaacattctggccttatttcaaaatggttactttcttcctctccctacctaaaagaagaggagatttttattagatcttacccctgggtgtatttcaaattaattttccttgtgtcttacacaaaaggggaggagttttttcttgggtcttcatagtcagaacctggtgagatttcctggaggtaaaactgcaagaacttagagggcctcctaagatttagtccccaggagttctcattcacaagctagtctcagttagcctttgtcaaaattatcatttaagttttcttactagtgtatgattccagtgccttctgctccaggtactgctgatcttggatgtgattctttgtatttgcctgtttctctagatttcaggcgattggttcaccct

SEQ ID NO: 136408 - DNA, 1564 bp, Homo sapiens
ttttttaactcatgtgtgttctaagcattttacttgtatcttctcatttaatcctaatagcaacctcaggaataagtgatattattatatctgattttctccggaggaaattgaggcacagagaagttaaggaacttccctaaggccactcaggtagtaggtggtagagccaggattcaaatgcaggcagtctagctcagagctgaagttcttcttacccttctttcagcgacgtgacaacctttgagttttactttgcttttctattatttgcttgaaattaagattgatgtatctaaaataagtgttctaggcttctaaaaagtgtcacacaattaaatgttactaaagtacgtttctaattagaaaagtttttgttttctttcttattaaaccacatagatttggcaagaagagtataaaaaataaccagtaataggttacatttacaactgtttggagtatagtcctttaataatcagatttttttgttcgtttttgtaagtaggaaacaatgattttgttagaaatctctgcttttggccaagtgcagtggctcacacctgtaatcccagcactgtgggaggccaaggcgggaggattgcttgagcctatgagttagagaccagcctggtcaacatagggagaccctgtctctacaaacagtacaaaaattagccttgtgtggtggcacacagatagtagcctgtagtcccagctactcagaggataaggtgggaggatcacctgagcctggggatgtcgaggctgcagtgagccatgatcgagccactgcactcccgcctgggtgacagagtgcaactctgtctcaaataataataataataaagaaaaataaaaggaaatctctgcttttttgtttggttgcttagggctcaataaaaaatttaaccagattatttctgattatgtatatctattatatatcacattttgttatacatttgtgatcatttctattgtttttacatgtctttgtgtttaaatacaggtagtagaataactagaaggatgtgactcacacgtcattatgtaaatattatccatgccagtacatttaaattctatagggacttaattgtaaagcagttataatatagccgtgttcctctgttgagaaaagattcatactgccctttaccttgctttttcagtgaaaatgtttaagttttttcgttcatttgaaatgtagaatcaaagtttcatttacatgcatattctatgtacttggtactataatcttagagtttgttctattctttgtaaacacagaatgtgaatataaattttctgccatgttttgttaggaataatgtatctctccattaatttgcatgttttcataccattgactcttaaatttccatgaacactagcccacaatgtgatttatctgaggcagattttttttcaaattcatattgatttatcttccatgccacttgaatacattttgttgatataataagattctttgctagttctagctcaagagaaaccacaggagtgaactttagaacttccgattagttcattaaataga

SEQ ID NO: 136409 - DNA, 1023 bp, Homo sapiens
tgccacattttcttaatccagtctatcattgttggacatttgggttggttccaagtctttgctattgtgaatagtgctgcaataaacatacgtgtgcatgtgtctttatagcagcatgatttatagtcctttgggtatatgcccagtaatggatggctgggtcaaatggtatttctagttctagatccctaaggaatcgccacactaacttccacaatggttgaactagtttacagtcccaccaacagtgtaaaagtgttcctatttctccacatcctctccagcacctgttgtttcctgactttttaacaattgccaaaaatgaccttttctaacaaaccaataaagttaaggcatctgcttagtctcccaaaagaaagccaggaagatatgacctctacagagagtgaataagctaaaacaaggcaaaaaatgcagaagttggctgagataaggacaagtgaaagaagcctaaaatggataaaacaaaattgtttagcactttcgaactgattaatgttcgtttactaaatgtttattgaacacctactatgtgcctgctattctaggtgctgatgatgcaattgtgaactttgcatactaagtacaaaaacttagtacaagactaagcaattatgaaagatccaacctagaagttgtaaggtttgtggtggaaaataatagaaaaataggagtaggaacaacgtttaaggttgctataagaagactttcctaatttcattgatttccaggtattattgattcaaaaaatacacacacacacacacacacacactcctctaaatatattccaaataatttaaaatttttatttcaaagaaaaggaaaagtcctaacagtatttaggcagaaaaaaagaagtgatctatattggaacaaaatccaaataggcctcatacttcttttctactacaaataccagagactgtcaggtcattgttccccatttgatgccttatgtgatagtattataatttctttatgttagaaaatggcagccct

SEQ ID NO: 136410 - DNA, 1535 bp, Homo sapiens
ctttggaccagcaagaattcaaaatattgtctgtccagcctttactttaggaaaacctattgtctagaatttatttttgacatacatttggaccttctttttgcttctttagacttttccatctttccttaaatgtaaggtgatggagtgaggggagagcctctctgcttgtcactgggcctctgtgcatggcaaggaggctgactccagggagctatacactagtctacatttaagatgaaacttaggttgtgtctctgcttttatataaaataaaattacttgcatttcgtattctgctgaatgttttctatagagaactattttcctcttggaatggacatattcttcttaattattagaaaacatttaattgatcatctgttctgtcttctaatttattttattcttctgtttacccagacactggaaagctctatactgatctctggatcaggagtactctggtctcttattttatataatggtacaaaaccagagttcgtaatctggagtccttaaattcaagagcctgatttctgtgtgaaagaggccttgaaacaaaaagtccaacccttgattaaacaaataatttgattaactgagcttgagcattctggctagtcatgattttaccacacttccttttcatgttcaacatggacctccttcagacttcagggattcttctaggatttggtgatcattttgcatcttctgtgatttaataaatttctactgtgcttttacctgttcttcatctctaaagattggagggtcctcatctttcttggtgtatgtaacagtagcactagcattcaaactccctcagccacattgtctgtctattgatgtcccttcttcaataagagcaaccagactcaaatatggtacccccgtggttttgatcaaggatgggttgatttttctttatcagtttatctgtgtaaaggtccatttggggtggggggctctttggctatacaaaaatgtcaggtttgtgatttcacaaagtaggttacagctattcctggatttcctttctaagcccacagttctttaaaaatagagttacaatagagtttctgctcatctttagatttttctcttttcatcagttatctttgaatctcctttgctcctgtgatctttcttcttaagaattgttctctttagcaaatcgctcttgatttttaggtgtgttaacttgccttactggtaagtttagaagtaggacagtttttgggttgtttttacttaacatcctttttccaccctgccattttgtcctcactcagtggggtttctatatatctgcacataactttgtcagagttgatcctgcattcagctaaaccccctcagtggtaactgatgacaagatgggtcagcatgcacataagcagttatcacatagaagtatggactcgggaagagtccttctgaataatccagtataactcagccccagtatacagatgatggacctcaggctcaaagttgcatagcgtgtatgtgaataattgcaactaaaa

SEQ ID NO: 136411 - DNA, 1030 bp, Homo sapiens
aggcatgccagtatcttttttatctcctgctttttgtctgtctttcacatctgtctgagttacctcaggcaagtttgttgtttctccttttatttttgcttttgtaagccagaaatttgccagctatgaccagtaattggggtgccaacagcatatgtggttcagcaggttagctcaacatttttgaacatttgtcatactaggtgttggaaatatgacaataaataggacttgtccccagtctagaagaaagaaaaatctattatactcagaaataaagttagtcataattaatgaattgcattttcactgaaaatcaatctaaactccttgccgtagcctatgagaccttgcctgacctcatctcgtacctatctccattccccccattctccagattctcagcacacttgccttttttgttctttggcttccataaacattccagggtttttccagtttcatcaacttgggacccatggctgcttctcctggcaaggtgcttccctcgtgtggtcccttctcattctgtcaatctcaaagagtgcctctttctctggccacccaacgtaccaccctcacctccatcctagtctttctctcccacagcatcctttttctatcatagaacttaccacagtatggaattattttgtctgtttctttacttgttaattgttaactatctagtcctctcacactggaatatgtttctcaagggcagaaatcaactgttttatcacatcacagatgtgtttccagcatttaacacagtatctaccatatccagtgagtattcactacatatctgagaagtgattaaccagtctgtggcatcagcattgaaactcaactgtatttcttttctctccatctctcatgcttcttttacccttttacctttacctaacctttgaccaccacccccaaatagatcccccgatctttctcttttcactttagccttctcacatttctcaaaccacacaattctcttttttgtttagaaacctctacaaggttactgata

SEQ ID NO: 136412 - DNA, 1129 bp, Homo sapiens
acatagacaacaaaagtaatatacaagtatgaatttgactgggattggcatttttgcttatctgctcccttctgcaacactcacaagcacgtgcacacacatgtccttccccaaatgttaacattccctttgtgtatgtctcacagtttccagctgttaaccatcctcagtccttggaaagaagataccttggaattttgaatagtgttctacttgacctaatgaaggtaaggccaattgatattatctctataaaatgtcttttggtttgtggattcttttgtgtctacatgtgaccatagcctgcttttatgaatgaaattttaggagatgtggaatggcaaataatggggaactatgtcatattaaaaggcatgtaacttatttaaaattacaatgggatctggtattgtcacagtccatctagacagaatcatgagacccctaaatgacattcttaaaatggacagaataataaaaatctgttagcatgcaagagctgttcaagcataaggttttaaaacaaatcttaaaatcaatgttgaaagaagaaattcaacaattttttctgacatggtatttgaagcctcccatcgcctacacagatttgatcagtgaatctaatttttctctttttctaacttggtctcttctctcccagactctttctggctctactttagacgtatcaggatcattgctaatgctgtggcctgagtgttcttccttatgctaccctccctgtccagaagtcttcctgctctatactctaaaagcattctcaaatttctttattcaagtttatttttttttctccagtagacagtcggctccttgagtgggaactgtttttcatatttctccagctttcactgcagccagaagtgcataagcaagtgttggttgtttgatagtagaccttcaaagaacacttattaatggatcaattttattttatgcccagtcagtcaactgtcaaaatcagtagaggttacactgtgcatagagcctttaaaaggcatacttagcacagtcggaaatttctgagtggcattctcagaactttgccgtgctttaaactatgttaatctgtgttccagggaacatagtgtacataggtgtgggggtg

SEQ ID NO: 136413 - DNA, 1618 bp, Homo sapiens
actgaacttaaaagtttatgaaacttttaaaaaaatgtaaaagaagaaactttaaaaccaaaaaattagagttgaggctctttgctgctacagaatgatttttttttttttttttttttttttgagacagagtttcactcttgtgcagactggagtgcaatggtgtgatctcagctcactgcaacctccacctcccaggttcaggcaattctcctacctcagcctcctgagtagctgggattacgggcatgagccaccacgcccagctaattttgtatttttagtagagacgggttttcaccgtgctggtcaggctggtctcgaactcctgacgtcagatgatcctcctgcctcggcctcccaaagtgctgggattacaggcgtgagccaccacacctggccccgaattatttcttaggatcttatgtcaagtgggaagaaagctaaattcaggcaattatgtgtatactactatgtgggtaaaataaaaggaacaggtagagatatgtatagggaatatctatggaaggatgcctaagaaactggtaacctaggctgcctccagaaaagggaactgggtatctgggggataagagaaagattaagaatgtatattctttcaagtgaatatctacttaattaaaagtgtactttaaattttttaattatattgtaaaagtgattttgattaatgataagtgcaggatacaaaactgtgtatattttgtaaaagaaaatatgtatataggatattcaaaaaagggctgggatcatatatacaaagaggaaaatgatgatgagattataggtgatttagatagtctttttttttttatttcctgaactgtgtttacttgatattctgcaatgactgtgtatttcttttataaggaaaaaaataaggtttttattagaacttaaatttgactttgtaatgttcttaacgatcctaaattttatttcctaagaatttactgaagttggacccagctgacagatacttgacagaacagtgtttgaatcaccctacatttcaaacccagagacttctggatcgttctccttcaaggtcagcaaaaagaaaaccttaccatgtggaaagcagcacattgtctaataggtaaatattcccttttaaggaaatacagatgcagtgttggtcttacaagtaggtggaggaggtggctgcttaaatgatgcaattagagaaaagaaggaaagccctctttattcaaaaatatcttccttatgcttattgcatgattcagaaccacaattaaggagttgtgtgggtcttaaagactttcttatctttaactagtatatgatggaaacctatgcattccctgggaaaggtagcattgggttagcaactaagggggtttacagcctcaagagctagaatattctgtgtgaatgaaacccatcagtgatacccggaggaagaaagctgggtgaaggcaaggggattcctggagagagaagaggatgccaaacacagatggtggatggaaatgtacctagtgtaatctttgtgactggaccaaataggtctggctctacagagaggtcttgtgtttttgttgctcttgtcttctaatcattgagttgagaaatt

SEQ ID NO: 136414 - DNA, 1041 bp, Homo sapiens
catagtaacctttaagtctaaatgttgtcttctgacattcaagcagacaaaagagttataaagagtttatagctcagctctcttcttagcagtcattctatcacaaacactcatatgagtaccaatataatgagagtatgttttaccagattatcatttagaaactgttttgacagcaagttagctgagcatttagcagtgccagaataatttcatcaaggccagtgctttgttacagagtgagttggtctaagaaacttaattgctgttgataggttacttgttattcgaaggcacatgcttgagagaattaatgtttttagtcttccaggtgttttgagtatttgttctttctttttaacaatactttttgtgtgtcagctattgagggaaactgatatacttcttttgtttttaacatagaaaccaagccggcaaaagtactgctttgcagtctcaccacagatctaacagcaaggacatccagaacctgagtgtaggcctgccccgggctgacgaaggtctccctgccaatgaaagcttcctaaatggaaaccttgctggagctagtcttagtccactgcacaccaaaacctaccaagcaagcagccagcctgggtctaccagcaaagatctcaccaacaacaacataccacaccttcttagcccaaaagaagccaagtcaaaaacagagtttgattttaatattgacccaaagccttcagaaggcccagggacaaagtacctcaagtcaaacagcagatctcagcagaaccgccactcattcatggaaagctctcaaagcaaagctgggacactgcagcccaatgaaaagcagagtcggcatagctatattgacacaattccccagtcctctaggagtccctcctacaggaccaaggccaaaagccatggggcactgagtgactccaagtctgtgagcaacctttctgaagccagggcccaaattgcggagcccagtaccagtaggtacttcccatctagctgcttagacttgaattctcccaccagcccaacccc

SEQ ID NO: 136415 - DNA, 1877 bp, Homo sapiens
tggttggcatgtgtcctctgtgaccaggagtgccacagagggcccttcctactctgaacagctgggtgccaaaagtgggccaaatgggcacccctataacagaacaaatcgctcacgaatgccaaatctgaatgatttaaaagagacagccttgtaatttgtgctggtaggggggaggggtggacagacaagccagtggggaggggtgggaaagggtgggctgggcttggggcatgggccgggccaagtggtgagccaatattttcagctttatgaaggtgtgtgcaatattgcatgtgttggggccgttgagctcctcgcggccacaaatgctagtcagggatcttagagccacaggagttccttagggatcgccactccccacaggtcttgtgtgagaatagatagagtgtgccattgaggaagaagaaattcttgccagtttctcccctttacattccagctttagtgcaatctctgttgaacttgggaatgccaggatgtgtcctggcactgcaagggataggaaagtcgtgttgaccgatgcccttactacatatttttttctgcctagagtaaatgtggggtttattgtaatccaagagtatccctttgaagggttagcagatgaactgtatgtcttaaattgttttctaaacttccatatttgataggatttgtaacatttatttataattaatattgtactgttaaaatcatatcttttatgttataatgtaaagttattttgagctgtttgaaacattgtgaagcagtgggacagctacagtagtttctataaaaactaaacagtaacatttatatattgcatcaggagtattttattctatatataatatatatatatggtaaatatctgttttataaatatattcatttaaagaaagtatcgttatgacactatctgccatatttttatacatttgtgatatgaagtgagtattatacttctactaaagggagttgaattgtggctacacgtgactgtaacagtatgaaccttgctcaactttgaggccccagcagtagcctctagacatgatccttggtagcagacgagatgcagcatctctttccaaacctgcaggggaagaaagtcagataggccagtgagaattccagcaggcctggtttccgtcctcacacacttggctcctgtttgtgtccagggacgttacttgcacacaggggagaatagattgaggcgttactcgtgggtctttgtagagagaatgtgctcttccacttagcattagtgtagagcgtagaccaaagatttgccagtgaacattccttgttgtgagatcataagaggtacctgtctgcagatcttgcaaaccatctctatgctcctgaatattgtccactgtcccggagactcttggctgatggggtgtgagatatatgtgtggcatttctatttctgaatgccttttttgctattgctctctccaataccatatttaaaaggctcctggagcaattccagatagataaaaaattactctatccatttttttcttcctggggctgtccacttatgacaagattttcatgcacacctgttacgcacacaacccccatcagaacaggacctatcttcccctcatctgatctctttcagctcccaagttactcccaagtatcatcaaaccctttggccatcaagtgttatcctcccatgcctctgggtcatccttgagggaagtcacctcagcaccatcatctatcagtagtagtagatttttggaattagtctctgagcaataatacttttaaaggtccctcccacccctcaaagagataacttctcagtatttattacttgtcctcaaattctgagtgtcagcccctgc

SEQ ID NO: 136416 - DNA, 1047 bp, Homo sapiens
acagccccccaaacaaacagtggtccagccccaagcactactagtgctgaggttgagaaaccctgccctacaccatcccaagcccaccagtctgcagagcttggctctggccttgttctgtccaggctacagtactgcaggtgtgatttcttcaacatcacattctcttaagagtcttcaaccactatgcctgaatccttggaatcctattgttcgtttccattgtcttgggcctgctaaaaggtgcatactttggaaggagaccagagttactttataggtgttggagaacttaaattctaggttagcatccttagaaaatctttcatagagccatgaggcttatatttagaagcaagcaacagcctggcagattggcatgatttttaccaactgctcaaaggcatccgtggctttcagctgtgtctcccgaaagaaaatgtctttgttttttattcaagtcatttaatagctctttacaaatattagcatatggcagaccaattagaagcaaaaaagtccgtattggtggttgtgatgtggctgttatagaagtatttgtgctgtatgctttggttaaatctgttttaaaacatgctttaagattcaccttacgcagttgtactttaattctaagctcagagctatgctgtcagtctctagtcacgccatgtattataaagtatgttgtggttgtagagttagccagtttagcatgttcctaatctgagaattagtggactatactaggaaatgctatcccattttccctttccagcccctcttagttaagatcatagtatcctcacttcttaaactagtctttagagtaaataaggaaaaaagccatttattttcttctagccatgtattattgagaatgactcatagtacaactttttttcaaaggccagaggattactttgcaagtgtgtagaaagatctgtctatttctgttcacctgggacctggtggtgactgaactctttcagcaagggcaatggctcaatgtgattcggtgctggagctcagctgggactcagtaaa

SEQ ID NO: 136417 - DNA, 1954 bp, Homo sapiens
attttgccagaaaaaaattgtaatagtcggcacgctggatttgtagggccagcaaaattgcggcagtgaaactagtttcacttctaaagcccttcatttcccacaaggttaagctctcgaaaccccatttgatccttggttcctatttcgatcctcctttggaatctgaaaatcggtctccatgttgtatgcagattagaagttgccttgtttgttactcttccaacacagggtatcagggagaaagaggccttatctgttcctccatcccccctgttttgacagactgctaagaattcctcaggacttcctttggttggggattttactttcccaaaagtctgatctgatttctttcaggggtagacaagcttgtcctagtgctctgcttcaggtcttatcagaagaaacccaggaatagaaaaggtagatgccttgacttttgtccctgttgtggggactaaagtgttttttgccagaattgtcaaaagctccggttcaaactctgtagagtttcatggaaaaacaaaacaaaacaaaaaagatgcttatcgtcccggagaatgtgtaagtaagttctccagcacggcttaggttttccaaaatggaaagcaaagcttgcagacaacctgttttctctagagacacacaatgattctggccctcagtctgtttccctccccttgtttactctttggtcaccgatcgagtcaggctagaggggtaatacggtgattaaaagaagtaaattctcactgtaaacttggattgattaacagaaacaattaaaccaaacaaaatcattgccccaaatttctatctccaagaattgctttgtgccattttgaattcaggtagttattctgtatatacttagctaactattcagagcttcttcaatctctagtaagcttgaaggtggtgtctgggaagacacagggcagggtgacatttagactctgttcattcttaaaaatagggataagccagaatgatgtgacatctagtatgtggtagatgaagaatcagtggaaattcttaattgcacagactttataatccattatataaagtgtaattccatactttttactgtggcaagggtgtgatgtgattgttaatctttttaatttttgaatccaaactgaatttaaagtgttgaatacttaaatcctcacaagtgaattatgaaccatttgtaaagtgtttctataactctttgtatcatgtgttggtacatcttatcaagttttttctggcatgtaattccattctaaacttatgtaaaatttctattgttgctgtaaatattacacaaatatctattccgtgataaccttcattatcagcatgaaatggttaatttttactgagcacaatgtatttttgaatggatcttcccaaatgtctttaataaaatgcagattttgcactgactgatgtgactgccaggccgtcccaatcttgagcactgtggtccttcgtgtttgaactgcgaacagctccattttagttccttcttgggaagaaagaatgcattcgaattcaaatgagggatgatgggcctttgaggttgtaatcagtttgagacagaaattaatgtaaaactaggcaaatcctgtaacttaatgatgttgatctttgttttcctatttataaagcttttttccccttacggcattttgaaaactttggtttgttttatacttgagtgttgtcacctttgcacgtcgctagacactcacgtggtagtttgaggaggatgggaagagaggccaatcttgtgctaagtgctatggagaaagcaaagatgcacagcttaataagggttttttgattctagaggagaggtgggcaagcttttcctgtaaagggccagatggtaaatattgggggctctgtggcccatcagttccctgtcaacattactcagctctgcctttgtattgcagag

SEQ ID NO: 136418 - DNA, 1081 bp, Homo sapiens
actgcaaccacgtgcttggagccgggagcaggtttctccctttaggagatttgcagggtggggtctgtagcactggtaggcagtgggagactgacactttgagccacacccggggctgtgtagtcagggtccccacaaccagagcgccagcaccctcatcactcagtgcacacgttcaggatgcagcaagttccaatgttgtcacctcatttggaacctcaccacaatctttggaggccagctgggggcaggggggcgggggttgtggacgaggtgcccctgctgcggatcctctgagagctttgtaatgaagagtgatttcacccactcagacccaacatgtaagtggccccggggatccccaacgtttttcctgcagggatctttttatcaccccactttccctgctttgaacgagtttttctccaaagctgcaagtgataagtaaattaatttgttctcctataatttattaattggcaatgaacataatggccaaatgaagtttctgttcagcatgggagaaagggtgctcccaagccaaggagctgggattcctgccaagagcaaagaaatgtgacattttccttggcccgagatatcttattaggagctccaagtacattctccggaaggctttctaaaatgacaacaccagataggctcctgttaggatggctgtcctccccacaggcccagggaccccaggaagggagtcatcaggggctgcgatcccgctatggcagtccagcccctctaggtcaatgactgggtaagggcctgtattagtctgttctcacactgctaataaagaactagctaagactgggtaatttataaaggaaagaggtttaatggactcacagttccacgtggctggggaggcctcacaatcatggcagaagatgaaggaagagcagaggcatattacacggtggcaggcaagagtgcgtgtgcaggagaacgccccctttatcaaaccaccagatctcgtgagacttattcactatcacgagaacagcacaggaaagactagcccccatgattcaattacctccccctgggtccctcccacaacaca

SEQ ID NO: 136419 - DNA, 1764 bp, Homo sapiens
aagcccctaggctcccgtggtgagtgttccctgcgctggcctagcagggtgttggtgtcttgagcccgaatcctgtgcagcattggcccaacccttgcaggtggccgccacccctttcccctgcagctggcatagccaaggtgccaggctctgcaaagggtaagctgcatctgaattgggcacgaggggatggttgtgccttccacatctccttttgtgaaagatcttcccagatgcaaacccaggatggacttgccaaagagaaatcccagtaactggctctaatctctgtgccaccagctgccattgtctcgaagttcatttgcaaacaacagaaaccaactgtggctgggttaagtgggaagtttattaaacaatattggataggtcacatggtcaccaggctaagcggctccctagccaggaccaagatcccatgtcattctccagtactcccaggttcataccccaggacttacaccacagacacccccaatgctgggcactgtcactgggaccactgcctctgctcttttggaaactaaatgtagaggcttctacttgtcaccaaaagggattttaaacagccactagctgccacttcaaggtctcaggcaagcatactgcctcggctgagggagaggttagaaaaaacagcatccagccaggcgtagtggcttgtgcctgtaatcctggcgctttgggaggcctaggcaggaggtctcgagcccaggagctagagaccagcctaggcaacaatgtgaaaccctccctacaaaaaataaaatcagcaaggcacagtggtatacacctgttttcccagctactcaagaggctgaggtgggaggatcacttaagcctgggaagtcaaggctgcagtgaaccgtgattgcaccactgcactccagcctgggtgacagaacaagaccctgtctcaaagaaaagaaaaaagccgcatcttgagaattctgccttccaaagtggaggtccccacttcataacatggggatcccctgaacacaggaaggaggttcaaatgccaaacatctgaaactcagtgtccgctccagctggaatgcttgcttttctttcctctgcccataaaagaaggacctgtgccctcgccagggtctgccctggagagctgacgcaagaggcacatttgcccctgaggaaggctgtgtgtcaggagtgaagaggggcgtgcaggcaacccctcctcaccccaggtgcatggaagccatcctggtacccacctctgggatggaggtaggacaattaattacatgttctgtctttgggtagaaatgctactgagccataggggctggatcaccactgctgcccagtatggcccaccagaccaccttccaccatcctgcaaagccctgcagaattgccagtgcgccctgcagtttttgtgaccaccagcccagtcccattcgattttcatagcccttgagtgacagcccatctgggacaagactcaaatgattgtcacatcttttcttctaactctttagccagctgggggatttaaaaataatgaattggaaccgttcgtggtataagcctctctcttgacagtgtgaataatttcctccagctgtcaccagggatcgtttgagttcctgtaagtactggagtctctcctgggctcaagagaggcacagccatctaggccaggcggccctctctgcctctccccaacctcccctccttctggaagtgcaggcaacagctccctgctcccctttccctcat

SEQ ID NO: 136420 - DNA, 1045 bp, Homo sapiens
aagccacaggaatctgccacttcttttatgacagcgctccgagtggggcttatgggacgatgacctacctaacaagagcagtggcttcttatttgcaggaattgttgcccaattcgggctgccagatgcaatagggtctcacctggaaacatgatcacactctcaatctgtcacgtgccccctagccttactgggaaccttctgtcccccaagatcccctgtgctatcaggaaagcatgtcccatcagaaacactctcggggggcaatggtagcactcaccctgaaactgatgtatgttaaagccacagagatagagctgaggagtcctgtgttcccccgcaaggagcaccccgggatcattttctaggttcatttctctggaacatttgctgtagcatctggtctcacggactctgaggaggaattggaaattggtctcttttgagtgcagagggaactgagacgccagcttaaattggctcttgcagagagttacagaaatagtttcgatgagctagtgacacatcctaaagatgcaaagatcctcctggcggcagtagccttgacaagggccacctcttcacaggatgcagtctgtctgtgcaccaaactcttcaccaaatagaacacttgtgtctctctgtggaatgggggttttcttgtgccttgcttgctttcatagccttccattttattggcatggctgccttgatgtaacataattctctgtccccaagatttagaaaattcctcttcgttcaccttggctcatggtcttccagggtttttatcctggctgtctatgaactagggttttctcctgccttaggaaaaatactgcatcttctggaatctagaaaaaaaaaaaaaaaaagacaaggctcctcttatagccaggcaagcagttgtttagggctagacctgttgtccccgctcgcgtggggtgaacgccccgcagtggatactgtcctcctgtgctctgggcgaggcgtcatagggtgagcacaagtcagcagtgccatggaagtgaacaggcatgtcccc

SEQ ID NO: 136421 - DNA, 2287 bp, Homo sapiens
cttgctcaaggttctttctgtaacaggggcccctgtgcttcatgggccccaaggtattcctcacggccaccgcagagggatgtgaggaggtcggagcaggccctgcccgagcagctggactcctgggacccaggcaggatcctgcaggggctcatggtgcttgctccacttcccgcctctcttaagggggtgggagtgtccactgctgttctgccctcagcccactggggacgctccaggccggggtgctgggatttagaaggtggccagttagactagaacaagctgttcctagaaaatttccccactcttcctggggcatcacatgcttccgctcggactcactggcgcaataccaagatatttctattatgaaaaagcattttgtgttgagctggcactcgatatttatatacatgggtgtgcatgtgcatgtctgtgcatgtgctggaggcttttgtgattggtgcttattatagaaatctcaaaaatagatgcctgcaaaggcacagaagcatcccttccccagcaggagccatgaaaatccccctttattatggcaccaaaggggcctcgcagccgcccgggcccagttgccaagtacaatgcggagcctcccgggaggactcggcagccccctagggcattgttcgggggagatctgaaagatgcctgctgggttccctagaattgttccatcgaaaacacagcctgtgggcagtgagaacaagctctctaaaaataactctgacagtctggcgtgtcccagccctcatatgggtttccagggcagagggtgctgtgtgtgcatgcacgcctgtgtgtgcatgcatgtgcttatcccattctggaatctgactgaaatgcgctctattctgcctccagtgccacggtctctccatcgatggttatgtcctcccatcctcgacgacccgagaggtacgatgagaaaaacgcagaggcgggcccctctgtgggttcacaataagggcttcattgcatggactctgacctcttgtgctccttttgggctcattctaattgacaggccatttgtagctctgagctgtctagccccttcaccctcatatttggcaaaaatgtctttccagcatttattggcatcagcctttttcttcacctgagactcagcatttctgggctagcaagctctttgcatttgccagacaccccttagaaccctggtgaaagaaaggagccaatctccatgccaccctggcctgccccatgggcagccttctcggcccttttctccaactaaaaacagtaatcgtccctaggtgatttgtcattctttttaacatggatttttttttagttttaccccacccaaagcaccatgcttcatgctggaaggaataatgaagaggaaagagaaaccagaaatggtccctgctccctggaagctgtagtcgatggggggaagggtagataaatcaggcgaggacaggctggctcctggaggcatactccagcctcctgctctgagggccactgccagcaggatccagggagtggccagaaaaggggcagcagtggcgctgagccccgagcccaggcactgctacggtcacccttggttactcggtgattgattgatagggctgcatctgtcctctcactggtggttgcctgcctgtccctttggtagatgaccccgcatgagatcaagtttgctgtccatgtcgaatcggtgctgaaccgcgtgccgcagcccgagtaccggcagctgctggtggaagccatcatggtgctgacgctgctctcggacacggagatgaccagcatcgggggcatcatccacgtggaccagatcgtgcagatggccagtcagctgttcttgcaggaccaggtgggggtgccagggagctgggttggctggcatttatctctgttgaggctggagattctgtgtccaataggaaagaatatactcgaaccaagaaaatgtcatcacagatgatggggaaaaaatgtcaaccacttgcttagaaaatggtacagtggccacttgggaaatctcaagacctttggggatggataggcctgtctcaatgcaggttttcgtccaaacaccaccacttgcaacacatgtgaccatgggtgaaccccttaccctgtacacaaagtcaagttcaacagagtagtcctcattatagtcaggagctacaaactagggtgcgtgataacagagtgcagtgcccagagaggtagggcattccccctggcagcgctggcttcgtgccctcatgccctcagaattgga

SEQ ID NO: 136422 - DNA, 1034 bp, Homo sapiens
gagcggcagggccagtggctgcgcaggagaaggctggatggggccatcaacagggtccccgtgggattctaccagagggtgtggaagatcctccagaaggtaagccgagacgcgagctcctggggaagtgaaccgtccccttactgtcctggcaaggcatggtggcacctccaggcgagcaaacacacagccctgaggatggcttctctgcctcagcgctgttggcacctggggccgaggcattctctgctagggggcctgtgcgtggtaggatgtctacagcatccctggcctctacccgccagatgccagcagccatctcttctccccaccccacccccgtgtgacaactaaaagtgtctccaggcattatcaaacatcccgtgggaggcagatcaacccagttgagaaccacagcaagtaagacaaggtggcagtctaggttgtggttgtgtgggaccaacttggacgtattttaggaacatagaagaacagggaaaggctgggaggcttcagatgaaaaccctgtaaaaccacccagagcagcacctacaggcctggaacctggaatgacagttcaggaggggcctggagtaggccagccccccagcctcccgcacatccaggcaggagtagtgtccctgctgttcagcgatgtgactgagccccaccctcccagggtacctgccgtgttcagtcccaaggtgtacagaggtggagagcttccagtttagccccaggtcctgtgtgccctgaaggcacaatctccctcacaccctggggccccactcccctcagccagccggctgttgcgcttcccatctgcctggggccgttcacgtctccccagctgttgtccctgggaactgtggtgcctgtacctgagcacaggagcacctccctgagcgcctgttgtcaaggaggggggcagcattctctgtacccccccagtgtctcccttctgcatcagcccgagagagtttatgcagctccctgggctgcaccaggccctccctgtcttttcccttgaatgg

SEQ ID NO: 136423 - DNA, 1105 bp, Homo sapiens
ttctcaccaattcccagagcttctggaaacttcggggcattagttccatgcctctttatggagccaggatggtgagcccttgcccacatgtgccaactagcactctgcacctgccatgccccagatctcgtgcagggctcggattgagctcaccgcagagcagaggctgaatcttcctcctgaaactggagggcccggatcagctgagtcattgaggagtgcagctgtaattacttttatttgtgtctaattgttgccttaagtggcagtaatgagcccaatggaataacccagccgaactgccttttcaaaataagatctgttgaaatccaactgctgcagaaaggagagctccacctcctgccctgctagcacacttcaggatttcactttaaccctttacatttgactgtgcacatttgatgtgtggcactatcgagaaacaaaagtgccagatagtcccaggcaaagagatgtgtgagagtgaaggttatcccttctcgacctggaggtctcgaagctagaagccccgcagggcaagacagaaggctgggagctttgccgcagggaggggatgcgcccccactcacagaggcccgccccgccagcggtggggagcctctcagacagtgtccccctctggagcctgaatcagtccagccaatgttgaggtgggaaggagatggcgccctcttccctcacttcagcaaagtcagccccagttcagaggcagccattgccccaaattaagataaagcccagtgccaagaatagggaaagccggaaatgggattgcaaagggtgggtggatggaccctgatctgcgaggtcctcgccactaaacgcgggcttcactgtttgtcttcccccgtgtcatgtattgccttctctgtggttcctgtcctgtggaaacgtgtctgtcacttctctgtggcactgcagcaatgaagtgggcactatggagtttgtctccctgagccatggatgcctgctccgagggcccgttgtcaccctcaaagctctcccactgcagtggcacaggcgccacgtgcgggtgacagctgcccctcatgggcacttagcgcacactaggtatgcctcaggg

SEQ ID NO: 136424 - DNA, 1316 bp, Homo sapiens
gcaaaatccagagctgctttctaagacactcgagttcagtgtcatgatggtaagatgatggcatttattagatgtgaataatggggaaacgggtaacttaggaattgaatatggttattaactcttaccatcggtatcttcggactcatccctgtctcactcaatagcagggagtccaatgtgtttgctagtggatgggcattaaacgcccactgacgggcccttcggagccaggcttggggccacacattggagacagagaccacagacacccatccctgtctgggttgcttagtctggggtctaggtatgaatttttcagatcaagggcaacatgggtcactaagtttgtaaaggtaaatgtacgatctgattggcagtgtctcctccccactgcctgtctgtcgtctttgccagtatctctctcgcgctctgcctctcacccttccccttaactgcgcaggcctgcacagacctgctttcgcaccagaagcagctcaccgtgggcctgccgcccgagccccgggagaagatcatctctgcgtaagtcctcagccttggggacctcaggtttgcgggggagccatggggaaaacagcgcttcccagtgttcggaggaggggctttttaaagacactctgtcacatggatgcgtctagcacagaaaataagggtgttccatggagggcgaggaggcactgtctcaagacacctcatcacattcgtgacacaatgctcctttctaggccccttcccccagaggagctcacaaaactcatctacgaggccagtgggcaggacatcagcattgccgtcctcacgcaggtctggggctggtgtgggaggggtcgggccacagccttcctcagagtggaggggacccttcagccactcaccctgtctctgaaaccctatctccgtgtgtgtctgcctcaggagattgtggtttacctggccatgtatgtcagggcgcagcccagcctctttgtggagatgctgagactccggattggactgatcattcaggtgatggccacggagctggcacggagcctgaactgctcaggtgagatgcccgcagctcctgcagctcccgccgcaccccaccccaaccacccggccacggcctccactctcaggggaagaactgcttaggttatctcgaacccagcatccaagcctgtggcaagctcaggccttaccagcttctctcatttagatggaactcccatccatgcggcatagagctgaagttcataagtcagggagaatggggctctggtgatgtttaccattatagcctcaaaggcgatgtg

SEQ ID NO: 136425 - DNA, 1782 bp, Homo sapiens
ccaatgttttcaactcaaaattgtcaatataccaatctggcatatttggggatagcacatccttcacaccttcagctcaatgaatgatcaccaagccagtatacctggatcaatgaccaccttctgtgcccccctcccatctctttctccttttctggtccagagataactgctgtcatgattcctaacaccagaggttagttctactggtctgtgaaccttccataaataaaactcacatatattttaacctattcagtccagtctcttgcaaatgttgaccagcacagtgattcactgatcaaaaatagtaaaagcctataaataaagaggtacaaaaagtcattgaaaactggagcacagcacagcaatagagttccaagaccagattggtgtttcacttcttgatcttccgaaagttccatgcctagcccatctccctgctttctggctcttgtatgaacaggttcctgaaagtgactttcagtggcccagagatgaccatggtgacgtggactgtgagaagctggttgagcagctaaaagattgttcgaacctacaggaccaagcagacattctgtacattctttatgtcataaagtaagtgtctgagtccattcgggcagttataacaaaataccatgaacagattggcttaggaacaacagaaatgaatttctcacagttccggaggctgggaagttgaaactcaaggccgatttgatgtctgggaaggcctgttttctcatagatggcatcttctcattgcatcctgacatggtggaaggggcgagtgagctctctggcattgtttttataagggcactcatttccttcaggagggctctgccctctgacctgatgacctcccaaagtccccacctcctaatgtcatcattgtgggggttaagatttcaacataggaattgggggaaaacagacattcaagccgtagcagtaagtttatggtctttactaggctaagctttctcagttctccttaattttttccgtagtattcttggccttctagccagcccaggtcatgattatattcaccccagttacccaggatcaccaggaatgagacttccatccccttctctgcctactgatgctggtcccccagcatgagaaggctatgtgaggccaggaggccaccacgtcctgatgttaggcttctgtttcaaaggacatagggaagctttggtcgggcgtaaccctctcagtgagactcaggggcactgggagagcccaagtgctgtgcaaaatgcacagtgatccattcctctcccagtctaaactttctggaccatatttctgggtttttctacctcttggcaggggtcccagctgggacacaaatctctctggacagcacggggtcaccgttcaaaaccttcttggtgagctctatgggaaagccggcttgaaccaggagtggggtctgattcgctacatctcaggccttctcaggaagaaagtggaggtcctggctgaggtcagtgcgactgtgcaggctgcccatgtgtgctcactagctcgtgcccccttcctcttccacttccaatctcccagttatacctcttacttgtgaaggagccccattctttaacccacaggtggagcgggcccttctctcctgcctgcctgctgctccaggaaggcgagcagagggaaggaaatgcaagtggattggttttgttctttcttggctacggaaaaagtctcgccaggaaatcaaatgaaagtgctctgtggcctggcagcctcttagagctc

SEQ ID NO: 136426 - DNA, 1071 bp, Homo sapiens
tacagtggcgcgatctcggctcactgcaacctccacctcccaggttcaagcagttctgtctcagcctctcaagtacctgggattacagatgcctgccaccacaccctgctaatttttgtatttttagtagagaggggtttcaccatgttggccagggtggtctcaaactcctgagctcaggtgatccacctgccttggcctcccaaagtgctgggattgcaagcataaaccatggtgcccagcctatttctgagggttttttaaaagctgaactcaccctacatacccactggatccacttggggggggtgctcaattaaagaaaggcttttctttccctcgggctgtcattctggttatagcccttttgaggctgaagctctggcacctctgatactattgcattacatatgcctcaattgactctttaaacgtttctcagccttttcaactaaatcccaatctggtgctgataactctgagggagggatccattgctttctgctcccccggtgtaaccttttaagaatgttttcttctgtatgtgcaaatcgctcccagcgtgtggggttggacctgcagaacctcaggccccaggctgccaaacccagcgtccaggtttcagtggaactgtgcccagcctaaggtgatagggccactcagggcttctgctccagtctggggatggcttccccattgaattccttctagagggaacctgacctcttccatcatagcacccctgtccctgtgtgacagtgtttcgtggtagggactcataaataatggaacgagtgtgcccagagaatcactgcttctgggccagtcgttttgggggaaaaaacaaaacaaaaacatgggttggttctgtttaaaagtagtttgcgcaatatattttgtcaaactgttggttggttcagtaaaatagagtcgtatttgtgttgggttgggagtaagaagtcagtgtgattcatttggcttttaatatgctgtgcgcgttcacttcatacttgctattgaatttttgtttgaatgtcttggctgaccgcttatatggggcaatctgcagag

SEQ ID NO: 136427 - DNA, 1384 bp, Homo sapiens
accagttaaaccaagtagaaaatcaaaggaaggagtttccgtgagaagtagaatgtgccattgccggaagcattcagttttttgcatttatatcagcccatcttgttcactgggccccttgaggtggctgcttgctccaggtgggctcaccaagccccaccagcctggacccttagccctgagctccggaatgttgatggcccctcatcccaacatgaaccgacagcccacatcatccaagctctctcaggactgattttgttccagggttaagggccagactttggagaggaactagtcttccctcactctgcagatcagtctacggagcctgctagggctgtgttccttctaagtgtcctcagcctagatcccctgcaaataaatgtattccttttagtacgcgtgctgcggtatgtgggttggggcagggctggcagtgggggctgggttaccttccagcagctacatgttcatatcccgcttcaggtcgctcctttcccagtactgaggcattcgggaaaaccgaattggtaatgagaggtaatttggaacctggaagcagagcaagggaaaataagtgccttcaggggtattttacttattctatggtagagaagagccgtccagttctactagagggcacgttttactgactatagtaaatgccaggtgttaagagctacgcttttctttctttctgatgaacagtgctgactacacattgtaaaaaattactctgtgactttctgtcttctaaactccacactgacctttgggtttctgcttgtcattacaatgtcctcagcatgtttacactggtgtgctaggcactgattttgcacactctttgacactgattgcattttgtgttggctccttccagatgacagctgggaaggtttatcagtcacatcaataacatgtagagaccaccaggaaggatttctgcacacagggccaccacaggcccatgtggcacctgtgtgcaaattagataaaaggcctcatcagggtagccgcagccctgggccagggtggcatgcagcttggatgtgagccccactcatttcctcagccagatgtgcttgtgcagggcaccataaggccctctgtggacagctggagaccaatgaaagtgtccccgcaaacatggattgagcagccactccgtgccaggcaccaggctagctactggggcacaagggtggctacagcgccagctctgtccctgtgagcttgcaggttagcaggggccagacgagctggtccatgagatggagggcagtggcagcagcaaaagcatagcacctttgaggacctgtgggcagttcagaaggaccggtgtgcagagaggcagagggggatgcctccatgcggggca

SEQ ID NO: 136428 - DNA, 1040 bp, Homo sapiens
tactacagcctgggtgacagagtgagaccctgtctcaaaaaaataaaaatttctttaaaattttaaaaataaataaaaccagcttgtagacaaggagaactggttctgtggctcacacatttttcttaaagaccgactgtggcctcctcctcgggtttctttgccacactgactaatataatgatataaatcagatcctctgccaaacttggtggtagacatattgctatttctttgttagagttataggaagctttagtataataaactaccaaggagtcttgtgtatgtttctgacttactttctgaaatattaccatggcaaactgccaaaaacagcatctcattatagtaaaatcctactcatgccaacttcaaagctgtaaaaatcagtcaagcatgggaaaccccatgaggcacaatggtattatgtatgtattctgacatcaccttttaaaagtttgacttatttgattctaggaccctaatcgactgcattatgaccctgctgaactcaagctcttcgaaaacattgaatgtgagtggcctgtgttttggacatattttataatagatggagtcttcagtggtgatgctgttcaggtgagaaaatgctgggtgttacgttgataattattttcattccactggtatactgattattattagaacatagggttatgcaagaatttaggtcactgtttcggttatctgttcccacttagcaaactttcccaaaactgagtgaattaaagcaacacctattttatttatttgctcatgattctgcaatttgggcagagcccagcagggacaggttgtctctgctttacctgctgtcagctgggatggttccatggaagtggagaatctatttccaagatggcctcactcacatggccaattgatgctggctagcagctgatgctgggaactcagctgtgctattggtgggggccttggttctcctccacatggctagcttgggcttctcacaatattgtagtctctgggccattaattttacatgttggttgttt

SEQ ID NO: 136429 - DNA, 1111 bp, Homo sapiens
actttacacacaatttcaatggacttgccaatcccaaagttaccttcaggttaaaataatccctgttttgaggtgaaatgcagtaaccgtgatacactaaactgagaatattaaatactccagccagttgaaactatcggtaaaattatcaaagaatgtaagtttccctaagctgaaatctgcagattgattgtcctacttaggttccatgaaaaatgcttttgtcccttggagtccctatgtctccaatcatattcccaaaagaaagcagctgtctcagtcagggttcagtgggaaaaagggaacccctttaggtagttgaagtaggaagggaatgaatacagagaatgaagtgtttacaagaagagcgggttctaggctcagcctcctgggatgactcccaggacagtgcggtgctggtcgctagggctagggacgtggttgcctccatgaccctcgcgagagccacatctgctgtagcagcctccacatacttacggaactggagaatggacacccaaagctgtgatctatggattaagggcgtcagattaagagagtgctgcccctgccctcctttcgtagcatccaggaagctggggcagaaccctggagcctgcagcccaaaaccagcagcgacagtcctaagcacaggaagctgccccctccctttctgctaatctttgtggaggtgcatctgaccttagagcctcctctgcagccaaagcctaacttccaggagcctggggaatgtccttgcagctttccaatcttgcaagtaggagcaaaccaatccaagtatctgccttggtggcttttctaaatagtgagggtccttttaggtctctgtgtaatacagtaaatcagaatgaaggcatggtcgttcactgaactcttggtaataactcttgcagccctgatactctgatggaatgttttggcgttcccttccaagtaccgatcaaacctgaattgattttgcttattacttaaatatattaataactatactgacagcaaagaacacttggtataaaattcattactaaaagattcatgggaaagagggtgcagggctgacttgaattaaaaaggcaaaaaaatttctctg

SEQ ID NO: 136430 - DNA, 1046 bp, Homo sapiens
ttgtttaaaacagcatcccatatgtggattttttaatgaaaatatgaattatacattaggtacacatgtatcaagtcctctgggtgccagcattgtgagccaatccctagtaatcggtttgtaaataccacgtaggttcagtgttctgtgtctcagttgtgactttggctccagttacttgctgagcattttttccccaagaggtaatgctaaaaataagtactaaattattttaaatgcttttgctggctttgactagttatgacccatgtgctaaagtttctgtcttccattttacaacataatataagttcaaaggcattgactagagaggcagcattttattcaatcttaagaagataaaatattttgttctccatacatccagagtttcttacaaatgaataccttctagaaataagaaataagaaatttgagagtgttgtggcatgcacttttgtcccacttgaatattttcttctaaaattctgcacagaggtcgcatgaactgaaattgaggaagagcacagtatgagtctacaaagcctccgagaagatccacttatgtttcagtgtggctgcaggaacataaaggaagcatttttcccatagcacttcttatatacctctttctcccctctgattcccacctttttctcccccaggattatggaatgtgggagcgtggagataagactaatcagggcatcccggaattgaatgcaagctccgtaggaatggccaaggtgacagttgtcctgtttgttcttccttctgcatgtttttactgctttgatttggttcccttcatcaggagtttgtatttaatctgattagcatatttgtcaaaagtcagcatcaaggatgtgaaattcaagtggcacagttaccccagccacctgaaattctaggtaaagaaggtaggtttccaatgctgaaatctgcccatggcagaaagtaagagtgctccgtcctggttagctgctgccatcacccatgggtctaagctcttgctgttgtttaagaagctgcacgtgtgatgtcca

SEQ ID NO: 136431 - DNA, 1110 bp, Homo sapiens
attccttccttcttttattttgctactataactaatgttgcaataccaactttgaccccatcttcatttacttccttctgagagttagatatcactcaaaggcaactcatatatattgccaaattgttttcagtttctagttaaacttagttctgattgaaattctaatctggcttactagttaagctgccctcattgatgtaagagtccatttcctatcatatccatagcagcttccagaattcatactttaaaaatacctgtatttgttataactgactatatttttctgcagggtggaaggccagctcctggagctggggactccctgtctcccactgggaaaagtattcacccttctctttggctctctcaaagatagagacagtgtctctggttcttctggactaaaatccttgctctgttggaaccttccccgcatcaatccaacctgtaccagaggtcccaaatctctctcatccctttctactcataggcacacacaggaaagtggagcccttcctttccttctccttattttccttccttccctccttccttccctcttttcggagattagacactcactgttatgccttacttaagacttcatttttgatgcctttggaagaaaaatgaaaatgagggtaaaagggtttatttcctagtgtgatatttgtaatttgtgactggcagctctctgcaacatggcttcataacctcattgtttttctttgctaggcttacgtatcattttcactctcgatgaggtggccttcatacagaatcttgtcttttacatagaagctgcatataaagtcgctgtaagtatcaaccctggtagtcttttcagatgttccagtcaacaaaaagaataaaaatcatacagtgttttgagggccaggctgtttggggctcaccaaaaggttagcgagactagcgctatgagattgtgtcacctccacacacaaactgcatatttttgtcctggaatagagttgggggtttcaggtttttggaatgtactctgtgctctgtctgaatccattatgcttgttatatttttttatttattttgtttatttatttatttttaaacagagtctcgct

SEQ ID NO: 136432 - DNA, 1035 bp, Homo sapiens
ggccgtgatctctgccagccatgaacccccataactatgcagagcgggcttgccttctccctcaggtggccaaagtggagaagttcaaacacactcagagcaccaaggacagcctgcacgccaagtacaacaccgccacctgtggcacggtggtgggcgacgaccagtggggccacctccaggtggatgccacctctctcttcctcctgttcctggcccagatgaccgcctcaggtgagctggggttgctggagcccattgtataaggagtgacaatccggaaaaggggtgggaggaggacaggtagcggccagtgtgtcaggccatgtgctgcttcactgctttaataaaatacctcagacaaggccatttatacagaaccgaaatgctttttctcgcagttctggaggctgggaagtccatgaccaaggcactaccaggctcagttgtccagtaagggctccatcctccaaagaggaggactgctgtgccctcccatgggggagaccagaagggcaagagagccagaggctccacgaagtgtgttttgtaagagccttcatcccatgtaggatatgtaggatgggaggagtcctcagggcctaatcgcctcttatggccccacctcttaataccatcacattggccacacctcaattttggaggggacacattcaaaccgtagcaatcagtattataaatcagcagtttacacaaaagaaaagcatgcttctccatattctgtgcatttgtttctgcaatagggcagggagtgcagggaccctgcctgtaacctgcagagaggacagtcaccctccacctgggcaccagcagggtaaaggccgttgagctggctctcttagcttccctctgttgaacacagaacccctttactgtcactctctcctagttcctggagccacctaggtctggtctaactttgacacttagctgtctgcagaccatctcacccctgctcttagacttttctcctccaggatcagcagccctgtcctttcagctctcccactcact

SEQ ID NO: 136433 - DNA, 1043 bp, Homo sapiens
gagggaaagtggcttccctgggcacacacagctagagagcggagtggggccctgcctccaggtttcttgctcacaggttcaatgctttacctattagtgcggacacatgaagactgaagaagacctaaggtctgcaatatgcagctttgtgaaagccttgcagtcttttcctgtttgctgtttcttctgttttaccacttacaacagtgtggtctcgtctgaaagcaaaagaacataagagctggaatgtttctgagagattttctagtcacatatcctcattatacaagtgaggaaactaaggtgctgagaaggcatgtgatgtctcacccaagatcacactgttaggggcagagcaaggactggaactttggtctccctgctccaggtcccggtcctcatctaccctgttaggacaagcatctgttacccagggactgcatgaaggatggcactgagccattttgtgtctcttctctaatagaatcccgtcacggggctgctgtcagccagccatgagcagaaggatgcctgggtgcgggataacatctacagtatcctggccgtgtggggcctgggcatggcctaccgtaagaatgcagaccgcgatgaggacaaggccaaggcctacgagctggagcaggtaatagtgactgacagctgtatctcggctgctcagccaccttctccttgaactgaaaaacccacagagaagtagctgtgtgtgcagaactgtttgggtgtaggcctctcctctatttctgctatagaatattttggggaggtacttagattatctcaacctcacattggtctttctgtttgagtttggagattcccacataaaacaatgacaacatccaaaatcacaccaaatagaaaatgaaagcaaccacatttcttttttttttgagatggagtctcactctgtcacccaggctggggtgcagtggcgcgatctcagctcactgcaacctccgcctcccggtttcaagtgattgtcctgcctcagcctcccgagtagctgggattacaggcgactg

SEQ ID NO: 136434 - DNA, 1418 bp, Homo sapiens
ccctgcttgcttggagaatcatcatctttgtattgccaccagtcaagaagattgtttaagtgttgtttctcaagctgatgtgatgaagactttagttttttgtttttcattttacaatacaaaattataatgttgaatctgtgtttttaaattacacacacaccaccctagggagtcatgtatcctgtattctctggtcagcttccaccactgcaccctgactcccactgaaattcactaccctaacttctgcctccttaaacttcacctccgtcctgtgacattactgttctctatttgacccatctcagctctgagttgagcaatgagccatttcctgtacttgaagcagctccccggttttgtccacttttctacttttaaagcaaaaatgaggctttagcttctgcttgagtcattctcaaggttcatgttgtgtatatctgatttatttcttttgagtttcctaaagaaaggctgaacagaaggacatgcataataataaaatgagctttttttttttttttttttttgagatggagtcttgcgctgttacccgggctggagtgcagtgtggcaccgtctcagctcactgcaacctccgcctcccgggttcaagtgattatcctgcctcagcctcctgagtagctgggattacaggcacgcaccaccatgcctggctaatttttgcatttttagtagagacagggtttcaccatgttggtcaggctgttcgcaaactcctgacctcatgatccacccgcctcggcctcccaaagtgctgggattataggcgtgagccactgcacccagccaaaatgagcattcttaagtggtaaatttacttgtattagctatgtataatacaaatatatatagacagagaatgtctatacttttaaatacctttgaaaagatatttcagactgtaaatcagtaaaaatatagtgatttattatatattcatttatttatttattaggtacctaactaggccaggaccttgcgctagagtggtaaacaaaaaagataggctttgcctttaggaatcttgtagtatgaaaaccatgtttcagattgtgccagaaagacatcccatgtccatggatcagaagactcaatatggttgagatggtagtattcttcaaactggtctacagctgtggaattgagattgaggttctttttcttgcatgtgtatgtccacttgtcccaacactgttaaaaagactgtcctttcttggattgtctttagatctttgtcaaaaatcagtttgccctattcatgtggatctatttctagactctgttctgttctgtccatctatgtgtttattcctttacctcttgttaggttcatacacgtctaagattgttttatcttcatgatgaactgaccctcatggttcgctgtgtct

SEQ ID NO: 136435 - DNA, 1013 bp, Homo sapiens
atattccactaaacttagttctgccatattgttccttgtcgcttatatttgaatatcactgttaactagtgaaataaataccacacctgtctcacaatgggtagggagaacataattaatgttcataaaatacatctagagaagtggttcttgatcaaatgggttacagatccatttgagaatttgatagaggctgaatatccaatgctctccttagaaaaaacgctcgcacaaaaatttcaggagtctcgtagccttccgtgtccctgtccacaatgtgcaccccccacacacaccccagaaaggcgattcatggactcgtagcggatcctctggaggccccaggttaagagccctattgtagagtgacatgtggtgtcttcatgctccaaacccaaaccccgacctgaaacatttggaataaaagtcacgcttataattgaaaatatcaaataatgacatctgtaatacccctgttcagctgaaagttgactagcgcagcacccagtaatccaccagtacttaatatttcaggtatcggcaagagggaactgacagcccccctgagctgaatgtgttctgtatgtttccacaacaccaggctcaggacttacatctcagtaatcctccctccttactacacgaattagtgagagaggcaaagaattaaagtctcctaggagagtggtaaagtcgtttacacgtttgattgtagctaaagagcccagagcggtttgtgtgagtttcgaaagttttaagatgagcgtggggatctggaacgaagctgcaccaagtggatgcctgcaatgcttggcttctaacccagtttatttccctataggccatcattcatcatgtcagatggtgcaaatacctcggaccaggacagcttgcagcttgtgcattgtttgtaaacccagaggggagaatcgaataagcagcaatttagacaaaaatacattatttgaaagtgagaattgcacacctgtgatccctttaagtaaagcatgagg

SEQ ID NO: 136436 - DNA, 1069 bp, Homo sapiens
agcaaggagcagagacaaagacaaactagtccttaaaatgctgttatggagacaaaatgacaccaaacaagtccactctgtgaattggttatgctgtaaattaatctttgtctaaatggcctttgacaaaccgactgactcctagctgacctccttagacatacccagtatcccaagtgaagctgtttcatcgttttttgtttgtttgttttaaagacaggaggtctttctgtgttgcccaggatggactccaatttcctggctcaagcgatcctcctgcctccgcctcccaagtagctgggactacaggtgcttgcctggcttgcttcaccattttcagtaagaacgatcatgatgctgctcactgaagtcagcagacttcctttgtggggttaatgactgcagtgtgttttgaggaaaaacaaaacaaaacaaaaaaaaactactccaatattttgaggaaatacttctttaaatactggcctctgccctgacactccttgcctcctaatattggcaccacctctgtttccttacaatagagtctcagaacatgggatcaatcttagacccaaaggaggatgcttctcagaaacactctctgtcctgccgtacgtctgtctaaagtaagaaaaatagatgagagaattctgcttaaggaccacagcacagacacagtaggaaaaataagggggtgggacctaaaggatactggacattgtgcatccttttatgtatattttggttatataatctgttttgggggattgatttctgaggtctcacccctctcccaatctagaggatctcacatcttcctttgaatttagtactcggcatctttgtgggagctgaggaccttgaagaagagattgctcagagacctcttaccagggtgaggccagcttcccgtatttggggatcccacatgctaaccagcaatgcagaaatcccaaatcctgttctcacttttcagtagtcctacctgtttgacactgaggaagcagatacttggatgagatctgaattgggtcttgtacattgcctacaggccaaaggcaatgtgttg

SEQ ID NO: 136437 - DNA, 1022 bp, Homo sapiens
cttggctcaggtgatcctcccacctcagcctcctgagtagctgggactgcaggcttgtgccatcaagcacggctaatttttgtattttttgtagagacaggatttcgccacgttgcccaggctggtctcaaactcctgggctcaagtgatctgcctgcctcggcctcccagagtgctaggattacaggcctgagccactgcacctggccaaattctttttaaatcaaagaaaatgtgtacttttaagtttctgatacaagactacacacacaagacatgcttgacaaaggcttgatttcaagtagcggttggcaaactatcaccaatgggccaaatcgggctcactgcctgtttttgtgaataaagttttattggaacactaccatgcccctttgcttacatattctctatagctatttttctgctgcgtaaaacacgagtggttgcaacagagaccatatgacccacaaagcttaaatatttactatctgaccctttagaaagttttctcactcatgatttaaggaatgacctgtggccatgtacatagaggagattacagatgagaatgctagcagtaggaaaaacaaaattctcagtatgaatgaacagcaagaagacacgcatcactggaaacggagctgcagctaaaatttagaaaaagatgagatgatcgaatgaaaagtttagtaagtaatacagcaatggtttaaaggacatttacagcataactacccattataaaatctataaattctatatttgcataatatatatgttatagtgagttctatctataagcaagtatatttgcttatagacagaagaagaaatgaaatatttctcttttggtgtgggtaacactgctttggaacaatataaaaatctacagatctggtaatttggggtacctaaatttaatttgctcacaaaatcaaaactcatagctataggtgtcttcgctaaagcatgatgcctgtacatcaataaatcacactagcagaaagcatatcacatgcact

SEQ ID NO: 136438 - DNA, 1014 bp, Homo sapiens
ccctctagggccaggtgtggtggctcacgcctgtaatcccagtactttgggaggcttacttggaggatcagttgagcccaggagttccagaccagcctgggcaacatagtaagaccccgtctctacaaagaaaattaaaaaattagccaggcatggtggtatgtgccagtggccccagctacttgggaggctgaggtattaggatcacttgaacccaggagatcgaggttgcaatgaaccattatcggaccactgcactccagcctgggtgacagagcaagaccctgtctgaaaataataataataataataataattccctttagatttagcatccagtgatgatttttgtatgatctattctttaatatggttgaaaataataattttcgactctagtattccctccacatttggtccagagcccttccttctcccctatttattgattgattcatctatttatttttggtatcaaataattcatattttcaaaataggtctgcaattcattactatacttaattattttagtgcacaaattgtaaaggacttaattatgcattgtttccttctctcttttctgcctaatgaactcctctctccctgttctagatcattcccatcagcttacaatcctgctctaatgtctaatatcttcatcaattccatattctcctccactcattccccacccccatttctagtcactccttctcagaagatcttcttaaaaggatgctcatattttatcacaccacattgtcagtcctcagtatatccacattggcaaatacagccatcacttctttacttaccatgttttacttggcggcagcatttgacagtcattccctccttctttgaccactttcttgttgtggcctccagtatcctacgctctcttggttttcctatctttctggtagctcattctaagtctcctcatcctctcttctacctatgaaggttgatgtccctccaaggcactgggaactgttcttctctttctac

SEQ ID NO: 136439 - DNA, 1049 bp, Homo sapiens
gcagtggcggcagcggcgactcctcacaacccaggaggcacgacgcgggtgcccccaagtctccttcaggtgccccagcagacgccacgcctcagtcgcaccgcggcgtgacagagtcgtaataacgtcatgcgctgcgccgggccgcgggccaaccagaacggcgtccagggggtgccccgcccccgctaaaggcctgaggctgcccattgggtatcagcgccagagagggaggggctgagggctctttccgacgccacgccgcgggcgggtgaggaggcggggcttgatagcgcctgcgtgggaaggtggggcccccgcctccagggcgccgcgggaaaggagccttcctagattccgctctgctgactaccggggaggttgtgcaggccccgtcctaccgagcgcctactcctgccggtgctgcagctctgcagccctcgttcagtacatctcgttcagtacactagatgatgaagattagcagcatgctcagagccaaaagacagaacatctggtttctgtaaatggtctgccactaactttgtctttaaaagatcacgtagcagttggacagttctgccctgtctacttgaacgcggatcaaaaaatttgtttcccaatatatgtcgagaggacaatgggaaaaatcttttttctctagttattggttcacaggctcactgcgagttaacagcgtggctcagccgatgataaaagcacacacagagacaaaacaccaaagcaacaaggggctctattcagaggatcaaagggctcaggaacccattgtgttgtgtcctagtgggattgcacctggggttccgggttcagatttgggctccacattttaagggggataatgagtaaactgagtggaatccaggggacagtggtcagaacggtgaggggctgcgattgtgacttatgaagaacgattaaagaagttaggaagaaaacaggctaactagaattggctgggttatgatgtaacaactgacctccaaatttcagtgatttcaagaatttgaagtgacgcgagccatcgt

SEQ ID NO: 136440 - DNA, 1897 bp, Homo sapiens
tgtactgaacgagatgtactgaacgagggctgcagagctgcagcaccggcaggagtaggcgctcggtaggacggggcctgcacaacctccccggtagtcagcagagcggaatctaggaaggctcctttcccgcggcgccctggaggcgggggccccaccttcccacgcaggcgctatcaagccccgcctcctcacccgcccgcggcgtggcgtcggaaagagccctcagcccctccctctctggcgctgatacccaatgggcagcctcaggcctttagcgggggcggggcaccccctggacgccgttctggttggcccgcggcccggcgcagcgcatgacgttattacgactctgtcacgccgcggtgcgactgaggcgtggcgtctgctggggcacctgaaggagacttgggggcacccgcgtcgtgcctcctgggttgtgaggagtcgccgctgccgccactgcctgtgcttcatgaggaagatgctcgccgccgtctcccgcgtgctgtctggcgcttctcagaagccggtgagacctcccgggcgggccgggatggggcgcgagtggggctgaggcggggccggagggcagggcgggccaggccgggccacccagagcggggtggaaggcgccaggggagccggggagcctttacttcgcctccgcgccctgcattccgttcctggcctcgggagaagcggcacggaccgggatcacgccaaggtccgtgtgaacttcccccttctcgacacccacctcccgcccccgggcccagctgtgcgccaggcgaagtcggtgtgctcaagaggtgcctgttgggttacaggacacggaaagggtggcctcggcctccttcgagtctccaattgaccccactcatttcggatcttctaacttaatttctcttgaccgagaggctttgtaatagcgtagaatctggagacagggtggcttcgttcaaacagcaccctcaccattgactagccctgtgaccttgagcaagtttttaaacgtcccggggacccggtttcctaaaatgtttgctcgaagtggagttaatctctaaatggagataagagttatctctgaaatgttatcagttaactctaaaatggagataataagagtccccacctcttggggttgtcttgaggattcaacgagtgacacgtgtggaaacgattccaaatagcacctggcacataatcgataacatgtgtgttgaatagtgttatttattgagtctccagttcggtatacatttcttgaacacctgtgctcagttctgaggcgggttcacagaaggtcagcctcttcagaaacaaacttcctcctcttccctctccctcaacatctgagcttttcttggcagtgagttcaggagcgccgaagcagaactcagaggacgctgccctcccctccccttacctacacattcttagggtacaagtagctaaagcaaagagcaacgatgcttgaggggtggggggtagagtttagcactatttcatggcctcagcatttagaggtgcctaacacctgagctagcattctgacccccctaggcacagtgaggtcgtgttaattggtgtaactgcaggcctcgggattctggtatttcccccaggacttgataccgctctacttagtacaggcagagattgtcaaaaggtaagaggtatgcccctctaggaatcctgttgcctaaaataatgacaaaactgccgggtgcggtggctcaggcctgtaatcccagcattttgggaggctgaggcaggtggatcacctgaggtcagaagttcgagatcagcctggccaacatggtgaaaccccgtctctactaaaaatacaaaattagccggtcgtggtggcgggctcctgtaatcccagcta

SEQ ID NO: 136441 - DNA, 1019 bp, Homo sapiens
cacacttctgataggacttttagcttctttaactttgttcctttcactcatatcagtggttcttatttttgagatacacagtaatgaagccatgggagaaagtatctaagtagctttctggcagtcctaatctttgcaggcgcaagattacaggcgcatgccacagcactgggccccttcttgctctttattgtatagcattatcctgcctcattgtttcaactctaggattgagaaagaagttaccttttctctgttactgtcgcctggctggtttggactcctgccttccaaaaactgcagtttctgtagttgtatttggaaatttatttcacaatacaataaatttctggccccacaaaatatttattaactgccaagaataacacatctgtttgattgctaaatataaccattgatttgctgtttcaccttctctcagctttacttcttcccaaattcctaaatttccttcactttttctgagatacattagtggactgtctctgcctgtaagttaactgaaacactgattcctagtatttcagttgttttcctccagcactgtcattgtctgtgtttgttggctttgtccaataatggtctattgaggggtgaagatatacgtaattagctttctgcctattggcttgtacactccagggtatacttggcagatcagtcttaactcttctcaccaagatcagtccagtgctggattaggtaaggtatgaacacatcagatgtgctttttatggagaaatcatgttggtttacacgtcagtgtgtgagaatgtggcagaagggagctaaaatagtatgataatactactggataaattttgtggtctaacctaaaccttagccattacatagaatacttttgctgtgagcaggtttgctcagttgtaaaactggaaaggaatcatttctcaccccccgcctccaagctttttacctccaaacagtgacagccacccaaacatcaagagaacagtgtttcagagaacatttctact

SEQ ID NO: 136442 - DNA, 1011 bp, Homo sapiens
tgggcacctgtaatcccagctactcgggagactgagacaggagaaatcacttgaacccgggaagcggaggttgcagtgagccgagatcgcaccactgcactccagcctgggtgataaaagcaaaactccgtctcaaaacaaacaaacaaaagaatggcataaacagacacagctcacagatgatctagtctctttagccactaatttcattatattctcactataatttctttgaaaacaaaggatgggtttgttttttgcccctctttgcgctgcttgccttcagatgcgggataatcctgtttcattggccaaagcatggattcattttggaggccaaggaagatgcaaacacagtgcacagggtggaagagaagcctatgaatatgttggggcttattaaatttccataacttcattctgataactgattattatactttccaaaatagctgacaattaaaaagtactgatttgtttgtatatttttgtcttttaaggcaagcagagtgctggtagcatcccgtaattttgcaaatgatgctacatttgaaattaaggtaagaggtgttttactttgttaataattttttcacaggtacactctgatatacagttttacctttagaatagaacattttgatgttcatgcttagtcatcattttcttctaaatgttccaggatcagaagttcagagaagcttcacgaaaactagaatttattattagcagcttgctgttgttctgtggggggaagggggaggagctagaaaatgaaaataaaaataaaagcttattcaaaagtttggaatgtaattcagtgaaatatttgaataagaagagtcttagttgtttctttgaaggttctttcaacctataactcagttggcttctaggggctttcagtgaaaatcatcttagaaagatttccttcccccaagccccatctcattgcacagtgaggtttatggatttaaggaacagaggcgatatgaagcattactgatgtgc

SEQ ID NO: 136443 - DNA, 1031 bp, Homo sapiens
agtagaacctgtcattaataaccagagaaagtagctattttccaccaaaatacagagtggaaggcccaaaccagaagcaataaactggcaacccacacatgtgccacttccttcctttctcctgtatgatgacctaaaagaaaagcctacatcagatgtcaacattaaaacactggggaatttcacatgaaaatccagacttccgccttctcttagacatggaaaacaggaaacattacccctgatttccacatggcaccaactggctggaaccaagtcatggcattcctctgggtagggcatgctggtgccagttcagcatgagtccctgtcaccattttctgttttgtatacctagccttcttcactcatttattctacctggctggcccttgtaggtatttgactctaacccttgacctaagcccacaaaacaaaaaacaaactaatcctttctctccaaattatatacagtacaggcgatcatagtgccagaaagttttaaaatagtaaaactctaagaacaggtacagaaaactggcaatgttatgtgtgaatgaattctttagcctaagcttcatagcaggttttggcattctactttttaattctaaaatactggcttcagccaggcacagtggctcacgcctgtaatcctagcaccttgggaggccaaggtgggcggaccacttgagcccagaagtttgagactagcctgggcaacatagtgaaaccccgtatctccaaaaaatacaaaaattagctgggtgtgttggtgtgcacctgtggtcccacatactcgggaggctgaggtgggaggattgcttgagcccagtggacagaggctgcagtgagccaagatcacactgtactctaaccagaggctgcagtgagccaagatcaccactgtactctaacctgggcgacagagagagactgtctcaaaaaaataaataaataaaagaaaattacattaccagcctcaaactcttctgatacatatggcagggtaaagcccaataagtacaagc

SEQ ID NO: 136444 - DNA, 1062 bp, Homo sapiens
ctggattttcatgtgaaattccccagtgttttaatgttgacatctgatgtaggcttttcttttaggtcatcatacaggagaaaggaaggaagtggcacatgtgtgggttgccagtttattgcttctggtttgggccttccactctgtattttggtggaaaatagctactttctctggttattaatgacaggttctactagcccacatatttcactgtggtctaggaaacgtttttatttagaaacatgtatcatattgcctcatagtttctccttcctctaacacaggaagcttgctgtgtgggcctggaggccggcatcaaccccacagaccatctcatcacagcctaccgggctcacggctttactttcacccggggcctttccgtccgagaaattctcgcagagcttacaggtttgctgttgatttacagaaaggggaaatgagtggattaagtttttaaatatctgtcattaagatgctattatgagttaatatttgttaaaaattttaagtttctttttttaaccctctctcctttggtgctctggtacttctgttgtgctcttgagttaactgaccatttgtgaagttctctggcccctcaggtaaaagtttaaaacaggttggtgctataaaatcacagtaggtttggttatcattcaagcatgccagaagaagtctagcagtcatagaaagtaagttcggttgaagcactccatggtatgcaatgtaaattctagaaatcttcttaatattccccttttctttgtcccccgtgactatttgtttgttttggtggtttttttttttttttttttttgagactgtgtctcactccgttgtccaggctggtgtgcagtggtgtgatcacggctcactgcaacctccacctcccgggttcaagtgattctcatgcctccacctcctgagtagctgggactacaggcatgcaccaccacacctggctaatttttgtatttttagtagagatggggtttcaacatgttggccaggctggtctccaactcctgacctcaggtgatccacctgccttggcct

SEQ ID NO: 136445 - DNA, 1054 bp, Homo sapiens
tgaactatggttgtccctctatatatccaggggattggttctaggaccctcgagtatacaaaaatcctcaaatactcaagtcccaaagtcagccttccatatcttcgggtttgcatcctgagaatattctattttcaatacatgtgtggctgaaaaaaaatctgtgtataagtgtacctgtgcagttcaaaccctgttcaaggattgaatatatttagtgtactagtataggagaggtcctaagatgtttgtaactggccagaaaacccagaaaagtccagggtatcatctggatggaacatctgaaggaaactaagtgactagagagtaggaaaagctggaaaggttgaagcacatggaactagtgaaaggacaaggagaaacatgtgtttgcctggagggacaggtacttagacgactgaactggcctctgtgttctaatggttgagcctcagagtacatatttggggtgcggtttggtttgctttgtagagttggtttgttctgcacatgtgtatgttctgccatttccaggacgaaaaggaggttgtgctaaagggaaaggaggatcgatgcacatgtatgccaagaacttctacgggggcaatggcatcgtgggagcgcaggtagtcaaggacgaggattgtgtgctgctttagatttggccctggactttgtcttcaaaaactttcacagccccagacaacttttcctgaagtagtacagccatgtgctgcacagtgacgctttggtcaatgtcgcatatatgatgttggacccataagattataatggagctgaaaaattcctgtcgcctagtgatgttgtagtggcacaacacattaccttttctacgtttaggtacacaaatattttgcctacaggattcagtagagtcacatgctgtgcagggttgtagcctaggagcagtaggctctactatacagcctaggtgtgcagtgggctgtaccatctaggttcgtgcattacagtatggtgttcacatgacaaaatcgcctagtgatgcaattctgagaatatatccctgttgtta

SEQ ID NO: 136446 - DNA, 2545 bp, Homo sapiens
ctcagctcactgcaacctccacccccgggttcaagcaattctcctgcctcagcctcccgagtagctgggaatatagttacgtgccaccatgcccaaccattttttgtatttttagtagagacggggtttcaccatcttgtccaggatggtctcgatctgtggacctcgtgatctgcccaaagtgctgggattacaggcgtgagccaccacgcccggccaggttttattttttaactcttgaatgcagaaatgttagtgcttactggttaaaatagaacatagtatttatatattactttagtgctttattgaaaatatcggaggtgggataaacagagagatagggttggaaggagagtttgtagcagcagtgtaatttctgtgtcagattctggccaggagtgaaaatgcagggcattaattagtatctcccctcatggatttctgtggttcctttctcggttgtccttaatgttaggtgcccctgggcgctgggattgctctagcctgtaagtataatggaaaagatgaggtctgcctgactttatatggcgatggtgctgctaaccaggtaattatgtctcttaacttcccaaaaacagtcttattttcaaagtctttaatatttacagttgaatttctaaagaagtagcatattgcttattaggtgaaatagcaagtcctatggctagctcaaatttggttgacttatggccagattagagattgacctcttagcgttgtttcacaagagacttacgggggcacattcctgtgaaggagctcacctttgctctacatcagtgcttggcaaaggccctgtggtaaaggacctccccacaacctattgcaaaacaatacagacccattctcttggatgtccgggctggcagtgtcaaattcggataatagcgtctgagtcctaactcagtttctatgcttctcttgttaccgagtaatccccagtctgtggccagcactctgtgaagccctgttctagaggctgattcttaggtgctggttcactctggctatccagtgggcctgatagatttcatattgatcttttttccagtgtgttccttactgctagcatggccccaaagaaacaagtagtagttggtttgtcaccttccttagttgcaagagtatgatgcctgctacttctcctccaccacccaccccgctttccctcaccacccaaagctcggttttagaagaggaggctttctgtgctttatgaaagctttctgtgccaggcagagcagcagctgttagagatgatgaagcctggagaaagaagccaaatgaaaccccttttcgtaactacttccagggccagatattcgaagcttacaacatggcagctttgtggaaattaccttgtattttcatctgtgagaataatcgctatggaatgggaacgtctgttgagagagcggcagccagcactgattactacaagagaggcgatttcattcctgggctgagagtaaggacacctgtggtggggccggggccaaggccaaggccaagggtatgtccttgtgcagacccttgacgatcttagaaacattggagagtttcattctcatacaggagcaggtcatgtgaaagtaaaatggtttggggcagttggattcatgcttcgcccctcccctgtttattaccaggtggatggaatggatatcctgtgcgtccgagaggcaacaaggtttgctgctgcctattgtagatctgggaaggtaaggctctaaagccctctgggctagtgacatttatctctggaagttcaaagactgcctcccatgtgcctgctgaagctgttagtgggtacctgctaattgaggtgcatgagatggaagcagagtgaagggagcagggctcctttgggtagcttggtcttggtagctcacctgctgggaagcctacgtttctctcatttgggggaagtccgttctggtgcttcctctgctttggcctgtcttcatgacaactgatttgccttttccttaggttaattctgtccctcctccccaccccccattaatcatgagtcccttgaaggaacagattggggatccccacagtgtccagcatagaatgtcatgtatacaataggcatttaatatgtgtgtcttatacaaattaaacagtatggtagaagctcgtaatcttagtcttgctcagtcctaaggatctttcccttttcagtgtatggcagtgagggagatggtaagagggagactggcctaaagaggtttcacttcctttggcactagtataggcttaggaggtttgggtgttctccctaaatcagtgttctacagcccagaaacaaggtttctgaagttggcacttcagcgccataccatgtacgtttaggcagtgatgtgaatcagatgtggccagcaatgatggaaatgtcacaaagtggagagacagggaagtgagggtgggaatgtagtaacattaaataagagctaatgagtagaatgaactagagcaggaccaagactacagcttgggtacaatgggctgagca

SEQ ID NO: 136447 - DNA, 1508 bp, Homo sapiens
ttatcaccacacacaccatctctgctgtccccacccatgtagtatacaggagcccaaatgggtgggacaagtgacacttctttagaaccttacatctaaatcaaagcagcaagcaaaaacttggcccctgttgtcggaatgccagggaagccatgtgactcaccagtgtacggttttctagaaaagacagaagcagttattacagaatgttaggctgcgttctggtattttgaaagtataacaacaactctgccacgcctatagtgacataagcattggtatgcccctttgtttcagaaacacacttctgtatttcacctcattgggacaatccaaccccatatcatgtttcatcacgccgtccttgctctactggaactgctcttactgatcgattactacttttccctccccatagttaccgtacacgagaagaaattcaggaagtaagaagtaagagtgaccctattatgcttctcaaggacaggatggtgaacagcaatcttgccagtgtggaagaactaaaggtacagtcacttgttcatggtggtttgaaggttggctttaaaagttgccacccctgggtggccacagagtttgtgtgggttcctccaagcccagaaagtgatgtcctgggacataaatagttccatagttccaaagtcccttggggtgggggcttttcctttagtttcctctattcaaaattgtattactcttcagatttcagattttggtggactgtgaaccaccatcacagtggcaaagcccccacagtagtatggttcttttttcctaaaagtatactgtggatttttaattcataaaatagatacaccctagaaatctgtattccaaaatcttctgaattagcaactgttcgtacttgtagttaaagagttacaccagcaacaggtcctcagcagaactctagttggtacctaagctgctgttcattctaaaaccttttacactgttacctaatttttaggaaattgatgtggaagtgaggaaggagattgaggatgctgcccagtttgccacggccgatcctgagccacctttggaagagctgggctaccacatctactccagcgacccaccttttgaagttcgtggtgccaatcagtggatcaagtttaagtcagtcagttaaggggaggagaaggagaggttataccttcagggggctaccagacagtgttctcaacttggttaaggaggaagaaaacccagtcaatgaaattcaatgaaattcttggaaacttccattaagtgtgtagattgagcaggtagtaattgcatgcagtttgtacattagtgcattaaaagatgaattattgagtgcttaaagattatttttgacttaaaatagtatactttgaacaaatactctaattatgaaaaggaagaacaattccttgtatgcctgtttcccctgcccccagccacctttttgggaggagaccattatggcggggcccctcacagcattctaccaaccatag

SEQ ID NO: 136448 - DNA, 1124 bp, Homo sapiens
accatttctctacaagatacaatatttattatcaggcaagaggacagttccattttaaaataagacttttgtaatcattccaattttgtaatcatttcaaaggccacataacttagttttctctacttacacattcagtataaatatgaagctattttctgttcatatcaaacattaactacaaggcacattcgtatcagttttgtgtttctcaaattgaagtaccataccagttctgaggcagtgtcccagcttccatgtttgttaaataccccttgtttgtttcaccattccagcaagtgctgaagggtgtactttttttgagacagggtcgggctctgttgcccaggctggagtgcagtggtgtgatcatggctcactgcagcctccacacctcctgggctcaagcaatcctcccacctcagcctcctgcatagctgggactacaagtgaatttcctaatattccgggaggtcaaaaccaaggctcactgttttcacaatacacacagttctatgtttataaataacaggtttcaaaagaaactcaggacagtatttaaaacaagttcttaaactattaattgaacaatggcatttttaaatatgtaaacacagcggaattcgtgtatacactaacagaagctttaacaaaacatgtagcgtggtgggacactctgccacagcttagctgattggtatcaagccttgtctttggtttctgaggcctcctgagcccttctgtactgggagaccgcactccagagtctgcagaggagaccacccctgggaaacaaacacagctgtcttcagagtcagtgcttcaagccaacagagcttaaaactgcagtccctaatttaaaaacctaatgaaaataaaaacattctcctcacatatggaggtgacgctcgtgtcccagcagtagtaggacatggccttagaggtacgtacctgcagagagctggctatttcaaatgactcgggaacaagaaggcaggctgcagtttaaagaagggggtgggtccagcgtgcaggcacgcttgccatgtgcctccacccactcccagccaggcattaatggcaggagattggccagctcttctctgtcacattcctatttctga

SEQ ID NO: 136449 - DNA, 1086 bp, Homo sapiens
caacatggctgcattgtaaatgcagtatgctaagtgaaagagctagattcacagccagcaccgtagctcgtgcctgtaatcccagcactctgggaggctgaggctagcagatcaattgaacccaggagttcaggaccagcctggtcaacatggcaaaaccccatccgtacaaaaaatagaaaaaaaccagctgggcttggtggatgcatgcctgtagtcctagctacttaggaggctgacatgggaggatcacctgagcccaggaggttgaggctgcagtgagccgaggtcatgccactgcactctggcctgagtgacagtgaaaccctgtctcaaaaaaaaaaaaaaaaaaaaagattcaaaaggccacataccatgattccttttcctccagaaaaggcaaaactacagggacagaatcagaatggggaggtgacgggactgattgtaaagggcacatgaggacttttgggagtgacagtcatttctgtatctgtgctgccaccttcatagcacattggacacctaaaaagggtagtttactgcataagtaaataaatatgcctccatcaacctgacattcgttttgggccacttagaaacgagctccagagctacctcttggaatgtggactagataagctctgacctcaacactaaaacctatttccttgtaggatttccagtgcagttagggatgtgattcctaaggaaaggcatttgaaagatgtggggataagcatttaaagtggtagacctaacatgtcaaattccaaactaactgaaggtatcctagatgaggaggctttctagaaagtgaatctcagaattatgaattgtgtaatacgtattagcgtggttcagtgatacagggttaattcatctctttttcacatcacatttacattctggaatcatttattaatccaactggttacttttgaagagttttatggttagactaatatataacaaattgccaatcgttacaggtattacagagaacccagcaggcccctacgggcagagaacagataaagagcttatagactggttgcggctgcaaggagctgatgcaaagacaat

SEQ ID NO: 136450 - DNA, 3243 bp, Homo sapiens
aaaaaaaaaaaaaagccattatccagagagcattcaacaccattcaatttaactcaagcatctgttgtgcatacattagagatggaaaaaaaatggaaaatgggacaagtctaagagtcagcctagagagggaagcacatgtgtttcttcaggttctgtgactcagacttcagtctgcagaggggaaccttccttgtgttttcctccccttgacaacaaaggccagtgctcacagcttggatatatttttgcaatggactcaatgtgtgcccctcacccggcccaagttcatatgttgaaatcctaacccacaaggtgatggtgttaggagacggagctttgagaggtgaggtgagaggagtgtccttgtgaaaggagaccccagaggctccctcatcccttccaccatgtgaggacacaccgcgagaagatggccatctgtgaatggggaagcaggccctcactggccacggaatctgctggcacctcgatcttggacttcgagtctccagaactgtgagaaacacatttctgttgtttataagctgcctggtctctggttattttgttacagtagcctgaacgcactcaggcagttttgtctcaaaaacgtatcgtgaaccaaaagatgccgatgttaatcagaactcagccagaaggacgatgtgattatttaaacctggctccctaagtcagataaggcagctgaaactagaatagaatggtaagtttctttcctcctcacacagggactaaacgaaggggacagaagcccctgcttcttattttgtttttgtttttttttttttggagacagagtctcactctgtggcccaggctggagtgcagtggcacaatctcggctcactgcaacctccgcctcctgggttcaggcaattctcctgcctcagcctcccgagtatctgggactacaggcatgcgccaccatgcatgggtaatttttgtatttttagtagagacagggttacaccatattggccaggctggtctcgaactcctgacctcaagtgatccacctgcctcggcctcccaaagtgctgggattacaggtgtgagccaccgcacccagctggaagcccctgcttgtaatggggcagagcagggacagtgagtgagacatgctgctctgccggtggggaggatggctcctgccaacatccaccaagcacttcctacccagaatccaggactgtgccaaacactgcatgaattcagtcactgaagccctgcggcacttctaggaagcactggttgttctaaacccctgttttgaagctgaggtaactgaggcagaggagttaagtaacgcccagagtccacaggctgggctcttcccaagggaccgcctcctgaaacccagtcttgctcatgggctctctgggatcagatatgacttggcacaactgtgcctcaaacttcccccacatgccagctcaggcatagcatgccttgggggaaagggctgacagattggaaccacgtctagcttttgttggggctcagaaaacagtgcccccaaatggcctcagcagcagcctcagaagaaaaagttttcctctgaccttctcctgcctccctctctcagtccattctcctggaggcaccatagaatccctcttccccaaagcggggcacagaaaccagaactcctccccaaagccagccacaaaacctaaaaatacgactctaactttccctccgcctttctgtgtaaaaattggttataaagaaattcttggccgggtgcggcagctcaagcctgtaatcccagcactttgggaggctgaggtaggcagatcacctgaggtcagaagtttgagaccagcctaacatggagaagcctctctactaaaaatacaaaattagccaggcgtggtggcacatgcctgtaatccgagttacttgggaggctgaggcaggagaatcgctttaacctgggaggcagaggttgcggtgagccaagatggcaccattgtactccagcctgggcaacaagagcgaaactctgtctcaaaaaaaaaaaaaaaaaaaaattctttgggctgggcgcagtggctcaagcctataatcccagcactttgggaggtcaaggcgggaggatcacctgaggtcaggagttcaagaccagcctggccaatatggtgaaaccccgtctctactaaaaatacaaaaatcagccagttgtggtggcgtgcgcctgtaatcccagctactcgggaggggagactgaggcagaagaatagttcgaacccaggaggcagaggttgcagtgagcagagattgcaccactgcactctagcctgggcaacagagtcaaactccatctcaaaaaaaaaaaaaaaaagttcttcgacctactttgtttgactgtagttcataagacccccgattccagagggtcctgccccacacccaggagaaaggaatgctactcagagaggccaagaaggatctagacagacaggccttgctgggtttccccactcagtctatcagcattcgatcaggccctttttatccctgtttctccacagctctccatactttgttaagcctaagcataaaaatggacaatttcccctggatctttgggtcttcatgctgaagttaaatacatgttaaatacatttgcatgccttttctctcattaatcagcctcatgcaggtgattttcagcaaacctccaggggccaagggccttggcccccacacttttattgtttgcttacatacctagtacatgggatttgtttcttaactgtgtgttcctttaattcatttatatgatccatgctggtgaacttgggaatacagaactaagctttattgaaattactgaaggctgctgggggtggtggctcacacctgtcatcccagaactttgggaggccaaggcaggtggatcacctgaggtcaggagtttgagaccggcctggccaatatggtgaaaccccatctctactaaaaatacaaaaattagctgggtgtggtggtgtgcacctgtggtcccaggtactcgggaggctgaggcaggagaatcgcttgaacccgggaggtgaaggttgcagtgagccaagaatgtgccactgcactccagcctggatgatagagcgagcctccatctcaaaaaaaaaaaaaaaaaaaaaaaaagactgaaggtaattattgaagttgccatgagaagtcactgcaacagtagagagatgagaacacaggaactcc

SEQ ID NO: 136451 - DNA, 1880 bp, Homo sapiens
atggattacttttaaaaaccaaatcacgcagctgataatgtgacttcccagagcaaacaggaataattttattcatttcacaaatatttcttcccctttttttctttttttcagatggagtttctctcattgcccaggctagagtgcaatggcacgatctcagctcactgcaacccccacctcccggattcaatcgattctcctgcctcagcttcccaagcagctaagattacaggcgtgcgccaccatacctggctaattttgtagttttagaagagatggggtttcaccatgttggccaggctgtctcaaactcttgaccttaagtgatccactcacctcggcctctcaaagtgttgggattacaggcgtgagccaccacgcccatccacttcacaaatattaagcacctactatgtgccaggaagtgaacaaaacagaccagtgcattggaggaatatgatggtgatgccagggttccctggttgggaagctagtccactaatgcccgtctagggatcatgacaaatcacatggaagaaatgacaacaggacaaacttcctcggggtcgggattatgggatgtacatccactgatgaagtgctaaccaacccccaaaccctgctacttctgcaggggcaggctgctgagcctgcgagacccacacaccatgccaggggccccgtcttggtgaaaagagagaaagaattcacagatgctgctgcctttagtatgagtaatttctgtgtggtctggggcaaggtactatatatacctctctgattctgagtttttttttttttttttttaaaggaaggcattcctctagtccctcaattgaggctgagaatatgcgcccttgcctagttcgtggatgatgaagctgctttttcctaagacctgggtgagatggtcaacaataaagccaattaatcagcatcttggtggctcaggccactgtcccagcgcctgctcccagaggagggcccagaagctcctcacctgttggtctcctgtctgagctcacccagctggaggctcaggtgctgctggtggggctgggcctcctggccaggtccggtggctgggggatagccctcttccgcttcatccatgtccttatctaccccttcagtctcacaggtaggctcaaagtgggctcggagctctgcaaatcacacaagacatgacaatggtgagcaaaccaggccagtggggcctggggtcgcagacacccaggtcagcaaaccgggctgttcagaagctggcccagcccgtgccatgctccattaggggactgctgactttacaaatggagaagagactgttccatttggttctctgcagcgtaaagttgatcacgccagtttccacaggaagaaattgaggcttaaggatatgaagtgaaccaaggccagcgttcaaaaggtacaaccaggccaggagcaatggcttacacctgtaatccaagcactttgggaggctgaggcaggcagatcacttgaggtcaggagtttgaaaccagcccggccaacatggtgaaaccccatctctactaaaaaatatatacaaaaattagccaggtccaggcgcagtggctcacgcctgtaatcccatcactttgggaggctgaggcgggcagatcacaaggtcaagagatcaagaccatcctggccaacatggtgaaaccccgtctctactaaaaaaaattagctgggtgtggtggcgcgcacctgtagccccagctactccggaggctgaggcaggagaattgcttgaacctgggagatggaggttgcagtgaggcgagatcgcatcattgcactccagcctgggtgacagagcaagactctgtctcagaaaaaaaaaaaaagaaaag

SEQ ID NO: 136452 - DNA, 1083 bp, Homo sapiens
atcctgggtgcctgggcggttcacctgggcttgaggggctgccagggactcagctccaccccgtccctctctgagtctccccattcggtgtctggctgtccccctacagaaggtccccgcggtgtcgtcctggccctgcccacacagggagagcccatggccaccagcagcagcgagcacggctctgtctccccagactccgacgcccagcctgacgcactctttgagaggacccgggcgcccaggcaccaccttggccacctcctcaggtacacccgtattctgtctgtctgccgcgggcccgaaagggtgctggtagtcctccgccacagggcacctccctggtcccaaccagatggccactgaggggttttacttcccttctgcagggcagtagggcagctgagccgccccatcccggcaaggagggtgcttcgttcacttgctgtcccttcccctccctccctgtcctttcattccccacatgtgccctcccccacctctcctcttcccttctctctcccctctccttcgacacttcccctctctcctcttccccctctctctccccctcacccttgccccctctgtccctgcatcttccggccccctcctcctcctggcccctcctcctcccttcctccttttccttcctctctcttcctccttcccctgtccccctcaccttccctccctcacctctccttctgtgcttgcccccttccctccctccctccctcctccctgtctcctgggaggctcctttaccccgcctccccctccttctgctctccctcctgctgtgggggttgacagaacactgcatgtctgtccttcctccggcaatttcatcttcttgagcacagggactgcatcgcagttacctctcagcccttctccagggcgtcctaacatgacacactcccagggacagtgccccggcacgcacagagattgtcacacgtgtttgtccacagtgttccagacgagagctcagccttggaagaccggggcttggcctcgtccccggaggacagggaccagggcctcttcctgctacgcaaggacagtgagcgccgtgcc

SEQ ID NO: 136453 - DNA, 1150 bp, Homo sapiens
tgctatatacccacaaaagttaaaaataaatttgcagatttttaaaaatatggagccatggtgaacagcactctttctaaaggcaaggatttaataatgacattcatattagttatttactgctgtttaagaaatgatcccccaaatctatcaactcaaacaacaaatagttaggtcttacagcgtttctaagggttgaaatccagcagcaactaactagctgggtggacctggctcagggtctcccaggaagttgcagtccagatgtcagctggggctacagtcatctgaaggctggactggggctggaggatcagtttccaagctcactaaggatagagctagtggggggcttcagtttttcattacatgggatcctccataggactggtttgagacatggcttccctcagagagactgatccgagagaaagaggaatggcacactgccttttatgacctagtgtccaggtcacacaccatcactcccacttcttcctattcatcagaagcaagttgctaagtccagtccacattcaacgggagggaactacgcaagggtgtgactatcaggaggtagggatcattgggggtcattttggaggctgcctgccacaaatctgactcctggtgagcacttgatggcttaccaattgtctccacatagccttgtccatctgactcaaacgactctggaaggttaggcagaggaagcactatctaccattattcctactttacacaggaggcaactgaggttcagagaggctaaaggattcgcttaggctagaacccatatcttctaccttcaagttcagaactacacaccatgacatcactcatccatacactacatcaagaagaagcgctgctggaaaaaaaaagctgcctgaataagagtagcacgtgtaaggatttccaaagccatattggagcatctttccatgtaactggaaggtacagggcactaatggaaaactgggtgctccattttattcactactgtattcacaaggtaaccatccactctcagaacagctaacagagagagataaatgcacacaactatttcagatactcaagggaacactccctggcaggatgcatgttgggtgtgtacatcagctaacccaaaggctggattctgtca

SEQ ID NO: 136454 - DNA, 1651 bp, Homo sapiens
ctcagggaagctaattatgagataaattgttgggggttttatgtcttcaaataactccttgtcatatcagagcccctcttgctatgtattgccaagctaattggtggcttccaaagaggaggatacaagtcattttcaattagggtagtaaaatgctaaaagaaaatgaagtgctagtcatacacacatattcatatacacacattgacagatgtatacgtatatttataccagaaacaatgaatgaaaattcaatgcactctttctttgggagattctgatagtgtccctggtatagtattttcccattttcaggcacatgtacctccccttgtgttacaagtgagaagtcattttgtgatgtattaaaattctctttagatggtgaatgtgtctccactgtgggtgtccagtggctgacacgcgacaactctctcattgacaaaaagtctttcaaagctgacacattatttaccaaaaataagacccaagctgtccaccctacagctttggtgactgcagagatagagaacagtcacctgtcttttatagcttatttcagagctatattattttaagagctaattttttcttttttttttttttttttttttgagacagagtctcactctgccacccaggctggagtgcagtggcacaatcacagctcactgcagcctcaacctcctgggctcaagcgatcctcccacctcagcctcactagtagctgggaccataggcgcacaccaccacacccagctaataattactatataatatatgttatatacatatattatatataatcattatgtattatattatatataacatataatatataaatataatatgtaataataataattatttattttttgtagagatggggttctccctatgttgcgcaggctggtcttgaactcctgagctcaagtgagatcctcctgcctcaatctcccaaagtgcccagcctatgaaagctgtttttttttttttcttttaagaaatggggtctcactatgttgaccacgctggtcttgcactgctggcctcaagtgatcctcccatcttggccttttaaagtgctgggattacaggtgtcagccactataccaggccccagctgtttcataattccatcaagcaagatctttgtgatctttacgttactccttgggggactataaacctttacttattcaaaaatcagtacttctttccaaggatcaaagttcttgttattagtcaggtttaagcaggaatttccaatagccacaagtagcttttgaccatcattctacttattgatcttacaactgtgaaactagctggtaattgtataccaccctttgaacccagtccctctcaatgctcaagttattccattactgacacatggacaagaaaatccaattcctcaaaatcacttagaataccatattccccaggaagaattagcctctcttggaaacacaatcatatcaaaacacaaggtaccagaattcactacagtaacaggctatttttatgacagaccaataaaatgtcttaatcagttgtctgaggaatactgttattcagcattacccacgatttcagataatgtgctattaactttaaagagatgtgctgccatcttgctgattgg

SEQ ID NO: 136455 - DNA, 1032 bp, Homo sapiens
gtcgagtgctgaagaataatgtgtaaacacccatgtatctgggtgattgctgatatattggggatgagttttaagggatttctgccagctgtaagacccttcattcatccattcatgtatttgttgattttcagtgggatagcatgttatgatacgtgaattatgagacaggacctgaaatgaactatttccatttcttcatttcaccaataagaaaatcaagactgaggaagattaaatgactttcccaaggatgcttagaaacaagactaggatccgagtctcttgagttcctcatccagcatccagtctcttttctcatgatggataaggtgttgcagttgtatctatttggggaaatttctggcatgtcccatctccttcatttggtagcaatagctgttctagctttttgttgctgatcagtagttcctgggattttaagagctagaagggacctttagagactgttttgttcaactccctaaatttataggctgaacttatgatgataggtactttctctgtgtcagactctgggctggcactggggaccgaaaggtgattaggatagtgtccttttcccagggttctgctggttcggtggcaaatgcagatgctttgcctctgagtgaaagtgccaagtgccatgatagaggagtacacagagtgtttttagaacgcagaagaggaatgaattactctccttagtgagttgtggcaagtttgaaaaaatagatcaactttgagctgcactttgagggatgagtaagaatttgtttagcggaaaaggaggcctatgctgatggaaaaacagagctgttaaaacacaaagtatattcagagaacaacagattgtctgatatgacttgaatgtaggatgcagggcagtgagatgctcttgaaatgaggccaaaaaaaaattttttaaggcttagcctgaactgatctttgaaagtccttgtatgtgacattaaatagcatggtctctatgtggaatttatgtggggaagggatgtggtgaagtgtgtg

SEQ ID NO: 136456 - DNA, 7917 bp, Homo sapiens
tgaagctccgttagaattgtggtaacaaacctgcatgttgcacacatttaccctagaacttaaagcataaaaaaatatatatatatatgtatatatatgtgtgtatatatatgtgtatatatatgtgtgtatatatgtgtgtatatatatgtgtatatatatgtatatatatgtgtgtacatatatgtgtgtatatatgtgtgtgtgtgtgtgtatatatacatgatttgctggaaggactcacagaactcagaaaagctgttacactcttagttatggtttattacaatgaaaggatacagattaaaatcagcaaaggcagaaaggtacatagggtagagtccaggagagaccacgtgcaagcttccagttgtcctttcccagtggagtcatgtgaatagtgcttaattctcccagcaaaaatgtgtgacaacatgcatgaaatcttgccaaccagtaaagctcattgagccttaatgtccagggtttttattggggatgggtcatgtgggcatggagtcttcatgcagctgatattaatacctcagctccaacctctctagaggtcgaactgatacagtgtggcccagggccccgaagatgaatcatatcgttagcatagactatctgggatggcccaaggtcccagataaacagagatgctcttagctggcagtatatcccaagggcttagaggtgatctcccaatagccagtccagggccagatctttcttttgaatgtgtggagttgggacaacacaggcctgctgagtgcccaagcaagtcggttggagtctagctggcctatcttcccaggatagctccagcttttatccttaaagagcaaaataatactatgatgctttcagttgaaccattccgtttagtaccaaagaggttgtgaccaccactgcctggcaactatattccaaaaagttcagtttgcctgaaaagagcaaaggtgtggtcagagtcaagatgtcataacatcaaaatctacctagtcagattctaatatttcaaaaaataaaagacagtgagtttgactagtgattgccagaagtaagggagggggtgggatgggagggaggtaggcgtgatggtgggaaggcaacacaaggggtccctgtggggatggaaatttctctaacttgccttgtatcagtgacaacatcccggttgtgatacagtactatagttctttttttttcttttttttctttttttcttattatactttaagttttagggtacatgtgcacaacgtgcaggttacttacatatctatacatgtgccatgttggtgtgctgcacccattaactcatcatttaacattagatatatctcctaatgctaaccctcccccgcccccaccccataacaggccccggtgtgtggtgttccccttcctgtgtccatgtgttctcattgttcaattcccacctatgagtgagaacatgtggtgtttggttttttgtccttgtgatagtttgctgagaatgatggtttccagcttcatccatgtccctacaaaggacatgaactcgtccttttttatggctgtatagtattccatggtgtatatgtgccacattttcttaattcagtctatcgttgttggacatttggcttggttccaagtgtttgctattgtgaatagtgccactataaacatacctgtgcatgagtctttatagcagcatgatttataatcctttgggtatatacccagtaatgggatggctgggtcaaatggtattactagttctagatgtctgaggaattgccacactgacttctacaatggttgaattagtttacagtcccaccaacagtgtaaaagtgttcctatttctccacatcctctccagcacctgttgtttcctgactttttaatgatcgccattctaactggtgtgagatggtatctcattgtagttttggtttgcatttttctgatggccagtgatgatcattttttcatgtgtcttttggctgcataaatgtctttttttgagaagtgtctgttcatattctttgcccactttttgatgggattgtttgtttttttcttgtaaatttgttggagtttattgtagattctggatattagccatttgtcagatgagtagattgcaaaaattttctcccattctgtaggttgcatgttcactctgatggtagtttcttttgctgtgcagaagctctttagtttaattagatcccatttgtcaattttggcttttgttgccattgcttttggtgttttagacatgaagtccttgcccatgcctatgtcctgaatggtattgcctaggttttcttctagggtttttatggttttaggtctaacatgtaagtctttaatccatcttgaattaatttttgcataaggtgtaaggaagggatccagtttcagctttctccatatggctagccagttttcccagcaccatttattaaatagggactcctttccccattgcttgtttttgtcaggtttgtcacagatcagatagttgtagctatgcggcattatttctgagggctctgttctgttccattggtctatatctctgttttggtaccagtagcatgctgttttggttaccgtagccttgtagtatagtttgaagtcaggtagtgtgatgcctccagctttgttcttttggcttaggattgtcttggcaatgcaggctcttttttggttccatatgaactttaaagtagttttttccaattccatgaagaaagtcattggtagcttgatggggatggcattgaatctataaattaccttgggcagtatggccattttcacgatattgattcttcctacccaggagcatggaaagttcttccgtttccttgtatcctcttttatttcgttgagcagtggtttgtagttctccttgaagaggtccttcacatcccttgtaagttggattcctaggtattttattctctttgaagcaattgtgaatgggagttcactcatgatttggctctctgtttgtctgttagtggtgtataagaatgcttgtgatttttgcacattgattttgtatcctgagactttgctgaagttgcttatcagcttgagattttgggcgagacgatggggttttctagatatccaatcatgtcatctgcaaacagggacaatttgacttcctcttttcctaattgaataccctttatttccttctcctgcctgattaccctggccagaacttccaacactatgttgaataggagcggtgagagagggcatccctgtcttgtgccagttttcaaagggaatgcttccagtttttgcccattcagtatgatattggctgtgggtttgtcatagatacctcttattattttgagatacgtcccatcaatacctaatgtattgagagtttttagcatgaagcgttgttgaattttgtcaaaggccttttctgcatctattgagataatcatgtggtttttctctttggttctgtttatatgctggattacatttattgatttgcatgtgttgaaccagccttgcatcccagggatgaagcccacttgatcatggtggataagcttttgatatgctgctggattccgtttgccagtactttattgaggatttttgcattgatgttcatcaaggatattggtctaaaattctcttttttggttgtgtctctgccaggctttggtatcaggatgatgctggcctcataaaatgagttagggaggattccctctttttctattgattggaatagtttcagaaggaatggtaccagctcctcattgtacctctggtagaattcggctgtgaattcatctggtcctggactttttttggttggtaagctattattgcctcaatttcagagcctgttattggtctattcagagattcaacttcttcctggtttagtcttgggagggtgtatgtgtcgaggaatttatccatttcttctagattttctagtttatttgcgtagaggtgtttgtagtattctctgatggtagtttgtatttctgtgggatcagtggtgatatcccctttatcattttttattgcatctgtttgattcttctctcttttctttattagtcttgctagcagtctatcaattttgttgatcttttcaaaaaaccagctcctggattcattgatttttttgaagggttttttgtgtctctatttccttcagttctgctctgatcttagttatttcttgccttctgctagcttttgaatgtgtttgctcttgcttctctagttcttgtaattgtgatgttagggtgtcaattttggatcttcctgctttctcttgtgggcatttagtgctataaatttccctctacacactactttgaatgtgtcccagagattctggtatgttgtgtcttttttctcattggtttcaaagaacatctttatttctgccttcatttcgttatgtacccagtagtcattcaggagtaggttgttcagtttccatgtagttgagcggttttgagtgagtttcttaatcatgagtactagtttgattgcactgtggtctgagagagagtttgttataatttctgttctttcacatttgctaaggagtgctttacttccaactatgtggtcaattttgaaataagtgcagtgtggtgctgagaagaatgtatattctgttgatttggggtggagagttctgtagatgtctattaggtctgcttggtgcagagctgagttcaattcctggatatccttgttaactttctgtctcgtggatctgtctaatgttgacagtggggtgttaaagtctcccattattattgtgtgggagtctaagtctctttgtaggtctctaaggacttgctttatgaatgtgggtgttcctgtattgggtgcatatatatttaggatagttagctcttcttgttgaattgatccctttaccattatgtaatggccttctttgtctcttttgatctttgttggtttaaagtctgttttatcagagactaggattgcaacccctgcctttttttgttttccatttgcttggtagatcttcctccatccgtttattttgagcctatgtgtgtctctgcacgtgagatgggtttcctgaatacagcacactgatgggtcttgactctttatccaatttgccagtctgtgtcttttaattggggcatttagcccatttatatttaaggttaaaattgttatgtgtgaatttgattctgtcattatgatgttagctggttattttgctcattagttgatgcagtttcttcctagccttgatggtctttacaatttggcatgtttttgcagtggctggtactggttgttcctttccatgtttagtgcttccttcaggagctcttttagggcaggcctggtggtgagaaaatgtctcagcatttgcttgtctgtaaaggattttatttctccttcacttatgaagcttagtttggctggatatgaaattctgggttgaaaattcttttctttaagaatgttgaatattggcccccactctcttctggcttgtagagtttctgcagagagatcagctgttagtctgatgggcttccctttgtgggtaacctgacctctctctctggcttcccttaacattttttccttcatttcaactttggtgaatctgacaattatgtgtcttggagttgctcttctcgaggagtatctttgtggtgttctctgtatttcctgaatttgaatgttggcctgccttgctagtttggggaagttctcctagatactgtcctgcagagtgttttccagcttggttccattctctctgtcactttcaggtacaccaatcagatgtagatttggtcttttcacatagtcccatatttcttggtggctttgttcgtttatttttattctttttttctctaaacttctcacttcatttcattcatttgatcttccatcactgataccctttcttccagttgatcgaatcggctaccgaggcttgtgcattcatcacatagttcttgtgccttggttttcagctccatcaggtcctttaaggacttctctgcattggttattctagttagccgtttgtctaattttttttcaaggtttttaacttctttgccatgggttcgaacttcctcctttagctcggagtagtttgattgtctgaagtcttcttctcttaactcgtcaaagtcattctccgtccagctttgttccattgctggtgaggagctgcgttcctttggaggaggagaggtgctctgatttttagagtttccagtttttctgctctgtttcttccccatctttgtggttttatctacctttggtctttgatgaaggtgacgtacagatggggttttggtgtggatgtcctttctgtttgttagttttccttctaacactcaggaccctcagctgcaggtctgttggagtttgctggaggtccactccagaccctgtttgcctgggtatcagcagcagaggctgcagaacagcggatattggtgaacagcagatgttgttgcctgatcattcctctggaagttttgtctcagaggagtacccagccgtgtgaggtgtcagtctgcccctactggggggtgcctcccagttaggctacttgggggtcagggacccacttgaggaggcagtctgtccattctcagatctcgagctgcgtgctgggagaaccactactctcttcaaagctgtcagaccgggacatttaagtctgcagaggattctgatgccttttgtctggctgtgccctgcccccagaggtggagtctagagaggcaggcaggcctccttgagctgaggtgggctccacccagttcgagcttcccggaggctttgtttacctactcaagcctcggcagtggtgggcgcccctcccccagcctcactgccgccttgcagtttgatctcagactgctgtgctagcaatgagtgaggctctgggcgtaggaccctctgagccaggcgcgggatataatctcctggtgtgccatttgctaagaccattggaaaagcgcagtattagggtgggagcgacccgattttccaggtgccgtctgtcaccccttgctttgactaggaaagggaattccctgaccccttgtgcttcccgggtgaggcagtgcctcgccctgctttagctcacgcttggtgcgctgcaccccctgtcctgcacccactttccaacactccccagtgagatgtacctggtacctcagttggaaatgcagaaatcacccgtcttctgcatcgctcatgctgggggctgtcgactggagttgttcgtattcagccatcttggctctaccaaaaactgtactatagttttgtaagatgctaccattggagtaaacctggtcaaagatatatgggttctctctgtattggttcttagcacttcatgtaaatctaaaattacctcaaaataacatgtttaattaaaaagaaaatgagtttgaaattttgtcattttgtaattgctttgaactttgaactacagctgacccttgaacaatgtgggagttaggggctcagttgaaaattcaccaaaaacttaactacgaatagcctactgttgactggaagccttaccaataacataaacaatattttgtattttatattttgcaaaaagtgcaggattttcgcaaccactgacaactgcagtgacggcttcatgaatttccttttctgtttctcctacgatttttaggctggcttcatttatcttgaaatggcagcagccgtaactgcagaactcaatctgcaatacatatcaagcaattcaactttttctggtaatgtcatgacttttctcggcttcttgggagcatttccagtatcactagtggcactctctatgggtcccatggtgttatt

SEQ ID NO: 136457 - DNA, 1035 bp, Homo sapiens
gtgatcttttgggagtaggattagaattgattttaaatttcttttgtgtacttcatgatgatttccctattttatatagtccctgaggcttttataataaaaatcctatgagcaaaaaaaaattaaaactccctagtgtaagttactgtgttgctattatgactttttttttttttttttttttttttggagacagattctcgctctgtcacccaggctggagtgcagtggcacgatcttggctcactgcaggttccacctcccgggttcaagctaattctcctgcctcagcctcccgagtagctgggattacaggcacacaccaccacacccagctaatttttgtagtttttttgcagagatggggtttcaccgttttggccaggctggccttaaactcctggcctcaagtggtccacgtgcctcggcctcccaaagtgctgggattacaggcatgagccacggtgcctggcctattaagacatttttaaagttactagagagctgcatgtggctgttggtaaaggtggtggtgggaggcgaggggaatgggcaacaacaaatttagagaaagaaaacttttcatgagaaagttggtttataccattatttaaacattttttgttgtaatataataatactttggtggttctgtaattataggtatcgcaaagggtttgaactccagtcatccctctattcgggaattaatcttgcagttttgctgattgttgctggacaacaatttgaaacttccttggaactaaggaaaataggtaaagctgcttattattgcagatgttgttgctttgattatacaagtttggcattaaaagttatgttgaaataactagcattatatcattatatttctattctttttttgagacagagtcttgctcggttgcccaggctggagtgtagtggtgtgatcttggctcactgcaacctccgcctcccgagttcaagcaattctcctgcctcagcctcctgagtagctgggattacaggtgcccaccaccacgcccagctaat

SEQ ID NO: 136458 - DNA, 1062 bp, Homo sapiens
tctgggaattttcagattccctttttgagagaaaaccatgagaaacagggttttctactggtcacactcttcccacaggtacacttgtttatgggccaagaaggaggcccagcacactccttccgagctcccacttccagagccttgtccaccaccaccagggcatcatcttcccagtgatctgttcattcattcacttattcattcatttatttaacaatgttcagtgatggcttactgtgtgccagaaacttttctaggtggtggggatacagacacaacggacgtgaatcctgcccttgggggccttgcattgctggtgagggaagttaaagaaagtgacacattaggatgtcatctgagggctatggggaaaggttaagcagggaaggggataaaggagggctcggaggggtggtctgcaattttaaatagggtagtcagtgaaggtgcctaaagatagaaaagtgataagggagtgaacttcacagataactggagaaagtgttcttggtggaggaaacagcaagggcagagactctgaggatgaagcatggcaggcacactccaggatggtcagcactaagcaaggggtgagtggagagcaacatgaaacaggaagagggtaagaccttcttgctctgagtgagaaggaacatcaaatggagggtttgagcagaggagtgacaagattggacatgcattttaacaagagtactcactgttatgcaaagaatatattttagggagtgtatcagctatcacttgctgcgtaacaaccccaaaacttagcagcttcgaacagcaatgattatgatttttcatgattctgtggctttgccaggcacttcttctgctggcttcacctgggctggcttctaaaactgaagtcagctgtagggtcaggtgtggctggaagatccaaatgaccccgtacacatttggcagctggtgttggctactgatactgtaccttagctctccaccatgtggttctaatcctggtagaccagctttcttacctggtatgcagaactctaagagagtgaacaagggagcagc

SEQ ID NO: 136459 - DNA, 2912 bp, Homo sapiens
ctggaatgcagtggcacaatcttggctcactgcaacctccgcctctcaggttcaatcaattctcctgcctcagcctctcgagtagctgggattccaggcgcccgccaccatgcccagctatattttgtatttttagtagagacagggtttcaccatgttggccaggctagtctcgaactcctgacttcaagtgatccacccacctccgcctctcaaagtgctgagattacaggtgtgagccaccacgcccagcctctgctgatgttgttaactctcctacactcagctgtttcctggctgctggcctcatttacttttgttgcctttggatgcttcatgccctttgatagcagggattccttctctgttcttctctctctcatccatcttattttctggtctttttccctcctattaaaggctacaagtaacttcactaaatgccctttgtaaggaagggcctgtctttaagtgcggaggctgtctcctgtttataacaattcagaaaaatcagtgaagagctgtgtttcctctcttgctcactttgggacctcttgccaacaggactatgatgcgatggtgaagctggtggaaacactggagatgctgcctacgtgtgatttggccgatcagcataacattaaattccactatgcgtttgcactgaataggtaagaacgataatgtacgtacaggttttgaaacatgccacccattgaattgtgcttccttctttcattcaacatcgggtatgagccaggtcacgtgctaaatgccaaggttatgaagatggacaaggtccagtctttgtcctcagggactttgtatttggcatacacattctagctgtgagattgaacacatcaatccatcctaatagcttatgacggcatcaaaacaggcacccccggcttcacatatcttgtaacacatacgaggtcacatctcttttttaaatcggtaaaatttgcagtcagtgaaatgcacagatcttaagtatatgatttgtgtttgataattggctatacacatggaaacaacactcccatcaaaaaagaaaacatttccatcaccccagaagttcccttgtgctcctttgcaggcaatccttaacccctccataggtgaccactgttacagcctctgtctccatagatgagtttggcttgtccttgacttcacataaacggaatcacacagtgtgtactcttttgtgtcattcatcgtcgtgttcgcgagattcatctatgcggttgtgtgtattagtggtttgttcgttctcattgccgtcgcgtagtccttggtataggtatgccacaatcatctgttttactgctgatgggcctctaggttgtttgcggtttggggatactgagaacagcgctgctatggacattgctgtacatgctttttctacacatatggatacatttctcgggtatatagcatgtgcttgtagtagacatcggcaaacagtggtaggattctgattcctttttgggagaaagcttcatggtctctgtggaaatgcacctgctctctccccagcagcctttaaacccagcatcccaaggatgcattgttgtgaatgacggccagtcttcattaagcctgataaagtcttgtaactttgttcccccgacatagtaagctccattcttatttatatttacctgtgcttgattaataaccattaaatgagccatcacgcctgaggttcttgggagagtgcctggcacactgtaagtgctgtaaaaaattggtttgttaaataaaaactataagggccttttaagttactcatcactaagtctttttcccagacatagtagaggtaaccgttgtcagacagagaatgaaataatagattgccattttctcaaaataacaaaagagtaaaacaagatttgaaatggaaaattggggccggccgcagtggctcatgcttgtaatcccagcactttgggaggccgaggcgggcagatcacttgagctcaggagttcaagaccagcctgggcaacatggcaaaaccccgtctctacaaaaaaaaaaaaaaaaaaaaaaaaaaattagccaggcatgatggcttgtgcttgtagtctctcagctactcaggaggctaaggtaggcggcttgcttgatcctgggaagttgatgctgtagtgagccatgattgcaccattgcactccagcctgggtggcagaatggagaccctgtttcaaaaaaaaaaaaaagaaaaaagaaaaaaagacatagaaaattggtatttaggagaaacaggtatagcaggatgaggtgatcctgagatgaatacgtttcccgtttggaagcagaatggctgggattgcacaccagatagccacctttctctttgatgggtcttttccttctagtctgattatctcctgttagacagtggctctgtttaatagggccagacggggtctccaacactgagaacctcattttctccaacaaactaaggattttctatgggattgcaatacttgcttcatttacacatgtaatctgatcctgaatttcacatttttgctttaggcttaagttggccagccgtcaacatagtaggagtttgcattacacattgagcatctctaatctgaaaatctgaattgaaaagtgctcctaaatccaaaactttttgagcgccaacatgatgctcaaaggaaatgctcattggagcattttgtatttcaaattagggatgcttaactcgtaagtataatgtaaacattccaaaatctgaaatactgcaaatccaaagcacttctggtcccgagcattttggataagagatacctaactggtatatatagttttgagcgagtttatggcattactttgtatctgtaaaggggaaaatagtgatggacaagaaatgagttttcc

SEQ ID NO: 136460 - DNA, 1050 bp, Homo sapiens
actactaatgagagacacctgatagagaaattcattttcaagtcattctcatgtatgtttcatgggttttggagctccgtttggctttgttactagtggcgaaaataaatacacaaggaaggtaacttctcaccctctatatgtttgaaaatgccggagacagtgggtttggttggctgcaagttctgtgtgttgtccaagtacagatgggagtcacctttgaaagtatcttcaaggttgaatgaactgatttttacttgtcattcattggtctataaaatgtgaataagtagaaagcatcttctgtttgctggtgcagggaggctcaggtctgggccgaggtccctatgtgttagcctaagtcaggtcaatgagaaccattttgggcgcaagacagtcctgggtgcgtgcagatgtgactggaggattttgtgtttttctttctatagtgtttattacaaagaaaccttgttaaatgacatccggaaagccagagagaaataccaaggtgaggaactggcgaaggagctagctcggatcaagctccgcatggataatactgaggttctgacctcagacatcatcattaacttactcctgtcctaccgtgatatccaggtatgaaatccacctagccgaggctcacgtatgctacgttcttccttggcttgaggaacgtcttgtgaagtatttgtatactcagtatgtggtgaagtggctgggttttgttcttcttttttgttttcttttttgagatggagttttgctcttgttgcccaggctggagtgcaatggtgcgatctcggctcactgcaacctcagcctcccgggttcaagctgttctcctgcctcagcctcctgagtagctgtgattacaggcatgcgccaccatgcccagataactttatatttttagtagagacagggttttcaccatgttggtcaggctggtcttaaactcctgacctcaggtgatccacccgcctcggcctcccaaagtgctgggattgcaggcatgagccactgtgcccggccagaggtggccgtttt

SEQ ID NO: 136461 - DNA, 2217 bp, Homo sapiens
taggaagttgtcagtgatttttttttttttaacgatctctttcagctctgagatcctgtgtttcaagatgatttctgagcatggctttacactcgcgtggctgttggggctcttcatatatctcagcaaggtcattctgaccttacgctctcgtgctttaaaagccttcgtgcgttgagtggagctgcagctatcctcaggatgtactgtgctgtgttctctttagatttaggttaggtgaggtgaaatatgcagaagtgaataggtttagattggaatcttggcttagatgattcctacctgtgtagcactgaaatagtcagctcacctattggagcctcagtgctcaagaaaccataccttcagatgttattattgtgaaagtaaaagaaaaattattcttcttaaccaaaggatccagttattttgcttgcagccaatttaaaggatttattcctgtaagttgtgtcacaaggagaaggatttgtccttccaaaacaaatgaaaatcccaaacactggcagagctgacctgaaatgaaatgtagaggacctcctgtcacactgtggctcaaatagtggcaccctgaactgcggagtgttctattgtagtgttggtacaagggagacacttattaatggtctccttttctatcccgtcacctcttccctggatacagaccttcttctacagactttaatggaaaaggagattagaaacctaaacatgtgtgaccacatgccaacacagagagcaaatgggggacattttgtggcacattcctggaaaacctcatgcagtcatgccttgctaactgttgtctgattgcaaaacaaacacttgagtgaagttttatagaaagctctcccaataccatattttcaagtctgacaaggaggtagactggctagatctgccagatgatttaggtctttgcaagacatggattcaagtttgtttctcactcagtgtgtgtatgtatcagtaggcaaacaactcttgtgatttcatttagtttcaaagggcttgaaatacctattggtggattccaccctctgaactggcagtgtctgacaacagttagtaggaggggaagtggtgcttatagtttaaaacatctataacacagatggaaaggaagttttgagctcaagcgccagctctgatagatttataaagtctattttgagtcctgtgctggaatggcttggaagccatttccaagtgctcattgatcagcaacatcttccttggttacaggggcagaaatggctgcatgcttattacatatctgatgtccccaagccatactcaaaccagtgtttaatttacctaaaaggtactgttcttcttaggtttcttagtttattaaaattatttttcagaattacccttgaaaaataaggctgaagtataactttttacttatcgggctaacctaataacactttaatagcttcagtgcctttatagtccaccaaatgtgcaatggctggcatccaacttaatgactcattcaattagtgacagaattttaaacactggcagaatctgctaattttgttcattattgggatgatggcaattaacaaaaaaggaaatagaaaactaaagcaatgcattgatatttttctatcagaacccctgctgtgtgcgtcacttcattctttaaatgttaatggaggtcctcttgtgagcattggaccaggttatgtactgtatgtacacatatttggcattgttttgtaattattgaaagtaggcaccatttgttcttatcgtatctcatgttgtttttctctctttgaagactattattaaatttagcttactctctttttaatgaacagcctaattttacactctgcagttagtccatttcagctttgttttgtgtgtgtgtgtgtgtgtgtgtgtgtgtgtgtgtgtgtgtgtgtgttttagaccaagtctcactctgtcgcccaggctggagtgcagtcgtgcgatctcagttcactgcaacctctgcctcccgggttcgagcgattctcctgcctcgacctccgaagtagctgggattacaggcacccaccaccaagcccagttagtttttgtatttttagtagagacggggtttcaccacgttggccaggctggtcttgaactcctaagctcgggtgatcctcttgccttggcctccaaaagtgctgagattataggcctgagccactatgc

SEQ ID NO: 136462 - DNA, 1031 bp, Homo sapiens
ggtaggaagaatcaatatcgtgaaaatggccatactgcccaaggtaatttatagattcaatgccatccccatcaagctaccaatgactttcttcacagaattggaaaaaactactttaaagttcatatgatgtcacttcttaaagggcacactcttgggcatgcgcacagttattctgactcttgtatcctcacccaggaatgacagtagttgcagctaggctctctttgactgtctgtttccctgatctccctgttaagtttctgactaatcttctgtattggtcttacacaactggtactacactgagttgttagtctccctccttagctgattgttctattgcttttgacaataccttgaggcataattgttccacagtttgatacaattaaagttttgcaggaatagtccttaaaactaatccctaaggcttggtctgacctcaggaaggttcctcctagctgtctctttcccatttctctctgttaaacttctagctggtctaccctttacatattcctatcacagagctaccagccttctcttaattgccagccaccaaaatctccataatgttttgtacagcactcatgagcttaaacttccccatggcacattctgcatgaagtcactctccttgtgaagagctgcagttcttacagcctgcctttctcctggtcagagctctgtaccactgctgtggagatggcagtggaaacagcagtctgtttctcttggggtgacactctgctctgtgagtggggtgctggctgggggcaacagcctctagtcttctcagcttgcctctcttggcatagaaccttcattctgtgagggagctggggcagggacaatcaagtttcagcattcttggcctgttttttgtttgtttctttgtttttgttttgttttgagacggagtcttgctctgttgcccatgttggagtgcagtggtacgatctcggttcactgcaacctctgccttccgggtttaagcaattctcctgcctcaacctcccacgtaggtt

SEQ ID NO: 136463 - DNA, 1065 bp, Homo sapiens
cgctgcctcctgtcagatcagcagcggcattagattctcataggagcataaaccctattgtgaactatgcatgtgagggatctagtttgtgtgctccttatgagaaactcatgcctgatgatctctcactgtgtcccatcattcccagatgggaccgtctagttgtaggaaaacaatctcaggggtcctgttgattctacatcacagtgagttgtataattatttcattatatattataatgtaataataatagaaataaagtgcacaataaatgtaatgcacttgaatcatcctgaaaccatcctccctgcccctgcccacctggtccgtggaaaaatttttttccatgaaaccagtccctggtgccaaaaaggttggggaccactgttttaaagtgtttaaatacaaagaattacaaaggagacccttcatatcaaaatacagttatcaaaatattttaaagttatatataattatgtgcttctttactaatgtcttaaataatgagatcaaacagcagatcttaaaaactgtcataatatttggagtagtgatgggcataaaagttattctgagatctccgcaggaactgtaatgtgatatgaaaaagtctgtgactcctgttaccaacaaagtctcaagtctcaagtctactactagggtatgttacctacattccctaagtgagggaaatgttatgtttcagttgagggcaaatgatggcaatgatgtaatttttttctctttcaagttcacagacccccccccccaacctccaagaatgactggatctcaggtttagaactcctagtcccttctagaactattgcacatagagaatatttgtgcaaaaaaaaatggccatgattaagcctctatcatctaatgaggctgacactattatcatctccctcttaaagatgagaaaactgaggtttagatagatgagtacatttttcagggtcatccatttaggatgggatggagctggaattcaatccttggccctctgaattctttactacattgctatgcttgagttgagatgatactttgtttctata

SEQ ID NO: 136464 - DNA, 1057 bp, Homo sapiens
atggctgctggggaaggggagtaaatgaagcgggactggccagagggagacatgcagctgagatgcaggctcaatgacagctttggctgaccacattgggagggaggtctggagctgaaatggcctttctgagttgtcttgggttgggatgaaatggccaggcctctatgttcctccatttgtccttcatcactaggaatgtagcttggatgagatactctctggaactgacacagttcagaagggactaacagtaaggggctgcttcctaacgagctcccagaaactggggcaacacatccttccttgaggttgggttggggggttctgggtagtatacctgcatatccaccacattataattatttcatttgagaaatgtgtgtatgtatgtgtgtcatatataccccaagactaagaaatacatttccaaggcttagaggtactgctataatttttttccactgaattggtgggtaaattacctgaaagctgtgcatagccttgctagagaggcaccatggagacaagcaccttctctgtcccccaggagaattactgggagaaaacaaggtgttctacccaacacttgcagaaggaattgttaaaagtacattggactttattttcatttgtcatgtcctaaagccagagttcacagttgtttttttaaaaagcagagttaaatttccaagctaagatcacattattaaaaaaaaaaaaaaccttattaaaaaacacgttattaaaaaactaatctggttcttgacctctggtttaggtgattttttttttctggaaagccagtgagatttaagagaaactcattgttgccattaaaatggttatctttataatccaaataaattagaaattctttgaaaaacagacactggcaatattggagacagtgtcttcaatactcgaagtctctcctctggcttaggaacatgtgtaggtctcggtcagggtaacaatttctcctgtttttttcctcttgccattctcaggccttcagtttcctatggcttaggactcaaaatgatcaaagatgata

SEQ ID NO: 136465 - DNA, 1033 bp, Homo sapiens
gtgttttattacaattaacaatttataaatcagatgctaaattcgtgttttaggaattctgaaaataagccagttgcatactattttggtataaatcctcaaagtgaacttagtctactggcctgagtgacaaatgtcaggcaaaaattccaactttagattcgaggcagttttcctattgaacatgaattgctcagaattttttttttttttttttttgagtagcagtattaatatgtcctgttttcattgacagtgaaaagtctctcccaatccttggtaggccggtgggtcccagcacagaatgttgagaaggcaaagaagggaggacttcatgtcacttgatcaaaatggaatcttggcaacaagttcctctgccacgttcaaggttgcctgtgaaaatgggctgtgtgacttcgggactactgtccctatcctcccttctgccccgttccgctattcccctttgtctgtttctatttgcttccttgcctttattaactaattataacagtcaccatggccttggaattaatatctatgttgctactttttcataacatcactatgaaacatgtaattttaaaaaaaatcttttgagacagagtttcgctcttgtcatccaggctggggtacagtggtgcaaccttggctcactgcaaccgcctcctcccaggttcaagtgattctcctgcctcagcctcccgagtagctgggattacaggcgcccaccccacacccagctaattttttgtatttttagtagagacgggatttcaccacgttgggtaggctggtctcaaactactgacctgaggtgatccacccacctccgcctcccaaagtgctgggattacaggcgtgagccaccgcgcccggcctgaaacatataatttttaatgtagataagtaagagtccaggaagcaatcctataggcagaatgtctaatttactcagctgcagtggcgcattatcttgactctaagcaaatgtctttggggagtggaattacccatttgagagaaattgatg

SEQ ID NO: 136466 - DNA, 1989 bp, Homo sapiens
aactccatcgtgcccaacatgaattatccccgtatgtctgcagagagtttgttgtccaagtatcacaaaagcaaagggcctctcgtccttatgaaactaacttcttaaaaataccccagcatttgccagttcaatagttttggactgacttatgggcattaaaacctttttctcttaagaggaaaaattcccagccaggccgagaaagctcatatcaagtttcagcttgattcatttcaaaaccaccatgaaaactgggacattttctccacaccacaatgggttagtcatggaaattctgccttaatcgcagctaccatggccacagccatgaagcatgcgctctgtgcctctgaaaagtgatgtgacagtattggagaatttctccccttcactgtcagaaagcagaaatgcattacagttcatggtctatggaaaaatgccagggtaacctgaggttcccttttcagcaagcaatctcatatttgatacattttttttctgtatggcagtttggtttggtagctgtttccaaaaagtgctctttccaaactaaaactatggaaagttaaacttagcagaaatgtgcattaagctgggtgtagtggctcacgcctgtaatcccagcactttgggaggccgaggtgggtggatcacctgaggtcaggagttcgagaccagcccggccaacatggtgaaaccccgtctctactaaaaatacaaaaattagccaggtgtggtggcgcgtgcctgtaatccaagctcctcgggaggctgaggcaggagaattgcttgaacccgggaggcagaggttgcagtgagccgcgattgtaccactgcactgcagactgagggacagagcaagactctgtctcaaaaaaatatataatatatatcatattttaatatgatatatattatattttaatatgatatataatatattaatatgatatataatattatattttaatatgatgtatattttaatatgatatataatatattttaatatgatatatattttaatatatataatatattttaatatatataatatattttaatatgatatataatattatattttaatatgatatataatattatattttaatatgatatatattatattttaatatgatatataatatattttaatatgatatataatattatattttaatatgatatataatattatattttaatatatataatgtattttaatatatataatatattttaatatatattatatattatattttaatatatattatatattatattttaatatatattatatattatattttaatatatattatatattatattttaatatatattatatattatatattttaatattatatataatattttatatatataatatataatatatattatatattaacatatattttaatatatataatatatatatatgcattaagaggttaagagtggcttcccctgaggtattcggaccttcctcttactcatgagtgacagaaatagagcagtcttctctgccatatgtcctggagactcttgctaagcgtggccaggcttcactgtgcataggtcttcttagtgcaaacctcaaccagtaaaacagaatgggccattctgccttctctgcatccatagcagagaatgcttcttcagcctcgaagctactcacatcccgctaggagccacttctataagctacattcctggtttttttcttgagatagtttgttcatttgttcgcttgttcctttattgacagaggaaccagcatgttttccctaggaacattctagactttgagaacacaaggatgagttcctgccctcctggggctcacagcctaagtgcgggagacagacatcacacttctgggttgttttaaaagtataactcattacagactgccacctcacacattctgaaatcctaaactgccaggtggacttaattcagtgggcccaggag

SEQ ID NO: 136467 - DNA, 1034 bp, Homo sapiens
cttagctctagtaattgcatgcagtggaaggcagcaagcaagaaacctgaggggcagggcaggtgtgtaccctcaaaaggaaataattctgatagggcaagagatagaagcagcctgaccagtccaaagcaggcttgttaatcctcccaaactcagacatcccaaggcataaggattagtcattttcttcccaaagaatagagaagctagagcaggaccttcactgtgagttggggagctttgcctgtctcccgctgtagcacatgctctctgagtggccaggggcaggtgtcagggagccttgagttagagatgtggggagaaggtctgggatgaaggagaggaagtgaggccagcaaggatggagtgggagcagggcaaagttgatggctggaaggaagcacaggagatggtgatcagaaaggggaggttggtgcttacaaccttggaggtgggtttgtttggaagatgaaaacattcgcaatggttgtggccacaaatgtgggtgactgaagatgaatgaatgaaggtcatagaactgaagataccgaggaaggaggggccggagttggggatggatcacccacgcggccaccataggctcaggaagatggcaagagctggagtcagggaggccagtgttctacaagccagtgtcctcccatgggtgctggtgtgttctgggagttgatgatagtgacaagagggtttgacagtgtggtagcaggtggtgtgagcctgctggctctatcctctgtcgggcagagcagaattaacagcttttgctttggccggtggctgagaatgtcaggatggaagcggaccattcaatgagaagggtccagatatgggggagttggttgctatgaatcagacatcccagaggtcactgtccattgactttacatgtggaaacatgtgcccaggaattgctttcgaagataggcagttggatgatggacaccaggatgtgggtaggaggcccagtgactttccagacctatgccacttggagatgacctattgctttaaat

SEQ ID NO: 136468 - DNA, 1012 bp, Homo sapiens
actctctgttctcctgttttctaggactgcatcgacgtaggctggtgggaaggagagctgaacggcagacgaggcgtgttccccgataacttcgtgaagttacttccaccggactttgaaaaggaagggaatgtaagtctccttcactttgatttcagcggagttgtggctcccatgttgggacttgggatgggggaagtttggtgtaatgttgaagagcactggcatttgaacattcaacagacccagattctgagccctcggctgccatatactctgtaacaagtttcatcataggatgcatctgttagctggcaacagtgatctctactctgcggttgttgcatacataaacaagatagtgtgtgtaaagcactcggtgcagcactggcacatttcagcacccaaataaactgtgagaaccttgggtgctctttttggtaagtggactgccagcatcccacatagcatggtccttgggggtgggaaagtagccagtgttgtggaagtggttgaaaagcacattgtaaggctgaggatgcagggcgaggcctgttaatctttctacactatatgcttacatgtgtgagtacacccgcacatatccgtatattagtatatacacatctctcatccacggtttctcttttgttgtgggagcccatttgaccatgccactgtttaaatcagccactccatctgtgtttgcctcactccaggtgtattctttccctgctgacgatgtaataagaaatattgggaagttagaagcactttccagtataagggaggagcaatcccatatttaggttctttgcccaggcttttgcgtggcctctgcccacctttcccagcctcaacccacttcatgtccatggggactctgttactggacggtgctgagccagatcttgccatggcacgattccagtagggctgaggtgtgggaaggatagctacagtgctggtggcttcgttgccaaggatactaaagtagcatttaatggaattt

SEQ ID NO: 136469 - DNA, 1059 bp, Homo sapiens
gagtttgaaagagtaaaaatgatatgtcagaaatatgatttctttccatattcttgctaagggtttaggtctactttcccctgagttcatgccaatagagcttatgtctaaacagcagctttctggaagcgtcatctacatgctgctccttttctcatttctacctcccacctcattcagagttcatcccctcacctgcctacaatgctctttctcatttgtattagagtctaaaactccatgaaggtgactgtcgtctggagttatgcctggggtcctggtgtaatttattaatagcgccccagatttggaaacaaattgtagtacttgggccacgttacctctctcctcagtggtcagctactgcctcaccatcctgccttcactcaacttctaccgtcttccttggggacatccacttccgccctgatggcagtcgggcctcacaagcggttgatcacctgcccctcctttctgcccctgtcactcagtgggtgctgtcttgcctcacacctcatatcactgttcagtagatgttggaggggcagggtttgttccaagctctaattcctgtatattctcttccatgagcacagctttcctctctccctcttctcttcctttacgctcagcaagtctgcccttgaccattctcattgcctcagttcttgtccttgttctctgcttccaggctgcccagcttgtcttggtcccacttgtttgtaaatccattctagcacttctgccagtgtttctgtgccattctgattcactgtgtctgcctctcccactagactctgagcttgggagccccacaaggacatgatggttttcttttctcccctggattcatctcctgtcctgcacattttagaagtctagcccagccattggcatttttttttaaaattcccaggtgattctaagtgtgcagccaggtttgagagccattttaggttctcagtaaataaactgaggccaggcgctgtggctcacgcctgtaattccagcactttgggaggccgaggcaggcagatcacctgagttcaggagttcaag

SEQ ID NO: 136470 - DNA, 1074 bp, Homo sapiens
gcacctgttgacccatcctctaagttccctcccctcatcccccaccccccaacaggccctggtatgtgttgttcccctctctgtgtccatgtattctcaatgttcaactcccacttatgagtgagaacatgcggtgcttggttttctgtccctgtgtcagtctgctgaggatgatggcttccagcttcatccatgtccctgcaaaggacatgatctcattcctttttatggctgcatagtattccatggtgtatatgtaccacattttctttatccagaaatatttttattttctaatactactgaattcaggctcaaatgcctcatcaataaaaatacattcctgttttaaaatatgtcataataaattaaagtgtgtgaagctaatggttgccgggtttggtcaggagttctgggtgatagtgcctgtgactagagtcatgaaaagtcacagctcaaagtcagagctcccaggaactcaggtctagcccagtgtgccccttggagccctcagagcttcactgacatgtctttggggacctgggtgggagatgggacagccctactccccaaccagaacagctctttttcagttcctttatatttgagctctggaataccttgaaatttgctaagtgtcctgctgaagttaaccagactctcctctctcccctccttagctggtccctgattttacacctgaggacactgaggtcatccagagttgtagtgtgattgtctcaggtcatgtgcttgcgaaagcccagctgggaacccaacctagtcccaagtatcctgccttctggcccaccgtcctctcctcctcctccttgtggcccctccaagtgttcctccactttataggggtcacttggagatcatcaagaaacattgagtgggagctctgtgtccggttttggggggtgcaaagagggctgagatatgctgcagcaagccctggcaccaggatctcctctttttctctaacagtggtgctttccagataattctgtgtctaatgccttacacataaaacagcatagctgcacagtcgaagtgttctaaagctggatt

SEQ ID NO: 136471 - DNA, 1032 bp, Homo sapiens
agggttgttgtgaggattaagtaacatgtaatggttagagaagtgcctggcacatagtaatcacttgattaacgttagttattattattgttgtccttattgttattagagtagaaagagtacctataaatgacagtacattttccagggttatttctatttatttatttatttatttatttatttatttgaggcagggtcttgctctgtcacccaggctggagtgcagtggcatgatcttggctcactgcaacctctgcctcccgggttcaagcaattcttctgcctcagcctcccgagtagctgggattataggtgtgggccaccacgcccggctgatttttgtatttttagtagagacggggtttcaccatgttggccaggctggtcttgaactcctgacctccggtgatccacctccctcagccttccaaagtgctgggattacaggcatgagccaccatgcctggcctctttaattttttattatggcaaatttcaaactgcaagaagtacaattgaattttgctatatctgtgttagctgtttgtttcatatcaccaagtcttaaatgtcagccactagaaagtaagtgccataatttgggaccttgtctgtgttagtcaccatttacagtttatgaaaatagttgtcaaatgatagttggccctcagtaaatatttgtggactggatgaatgaagatactgttttgtgctaatccaattctggttgggatctgcttgtggtctagctaagattcactcttccatttgttcattaattcactcattcattcattcactgaagctttattgaatgccttttatggatcagcagtgtgaagctttattgaatgccttttatggattagcagtggtatctctgggatttgtatgtaaatgaacaaaggggtggcaatccatttggaaagggattggctaaatggcatgtctagatgttgtatttgcatagtaagtgcggtttttttttaacctgacaggttatttatttggggtggagcagatctggtg

SEQ ID NO: 136472 - DNA, 1043 bp, Homo sapiens
attcggtcctgtgtttttgctcacaaatgctggttttcagttaattaaaatgtacactggggaccttcctcctcccccacccttttggcttaaaaataccattttatggaaaatgacaacaacaacaaacaaaaccattgttttaaggatttgattctgaaacgtgttagcagtttataatgacctttctatattttgtctgttttcatttaacagtttcttcctgcactgagacttccttatttgaatgacttccacattttatgagattttatgtgagcaagtatttggtgtatcattcttatggactaggaggccaccttacctgtaggaagataatgcacaattggctaatagagaacaacatttgatggcgtactttcatttcaagggcatggttatgatcaggagttatgtagtaaatgttcaggagctattctacacatctagaggctttcagagacaggttaatgacagagtttagtattccataaaatattctttgaatcctgccctttgatggcataattgatatactgaccatcaaaggaagaatacacccagaaattaactagacacaaataggctcttccttttaggaacatgattgtgggcagagccttgggaaaaaagaatctggggaggtaagtgtccatgttgtcttgctaataactattttatgacttccaaacacatgccacagaagatcaaaggaagagtgtcatgtccccagtgttcttctttggaaagggattcagctttgggaaaacactggtgtttaaaggagagaagaagggctgtaggtttgggggattctggcctctgggaggacggcttcctttccctctttaacaaacatgatcgtcttgctagtgaaaccgtcttaatgtcaagtttggtttaatgctttcctagagaaacatgtctgcatgcatttattccttgtgaagccatccaaaaagattgaattctttggcagttataattttgtgtggtttctttaattgctcatttgtttaaatggcttttagctttacagtttc

SEQ ID NO: 136473 - DNA, 1036 bp, Homo sapiens
atgttgaaagggcttccaggtttaaactgggcataatgtacatgccagtcatttgcagaggcaagccccaatttctgggtgcttatgccatactggttgcatggggactttgggctcattctgtaacattcttaaatcctgcctaatggtctctacttaattttgtggatgaagctcttgcagcagattcattgaaggcaagttcagttaaagactcttcctcttccttcttttgccatcatttgctccctcctcccccctctcttgtttttctctccccttctcttctctcattcactgtcaggaaagactacctttgaagggacaattctgtaccgagctgcaccgggaaagacggagggccacagacgctattacagtgagtgaccttaacagcagaaggcaattgtaaagataagatctgggtacttgtgttttttgatgcagctgccctttcctgagctgctcatgcttatgccaagtgtctgtgtgaatttctgatccaaggacatggacttatttgtctaagtaagtgccatctccttggtgtgtgctaagaagcattcccagcaccagcccctggcgcttttgtttgctttctgcctctatcatgtatgtgatatgcgtgcatgagccatacgtgcaaacaaaggagcagtagcatttgtcgtggcatatgtatttgtaccagtttctctgggcttctggggtggtgtaagatggcttcctgcagagatgtcaacctctcatggttattgctttctctgagtgggtcactggaaaccaataaaccattttgtcattgtgtggttcaaagaagtaagaatttggcatgaaagtccatgccagaaatggcattttgctttgctcactcagccaatcaccacatggcagactttttttggcaggaccaatgtgtagccttttgtgttgtgaaataaggctgccaaaagttgaggggaaggagatgaatgagatgcccttagaacagttcttgccacacagtgagctccatccatgtgagtgttaaattaaa

SEQ ID NO: 136474 - DNA, 1046 bp, Homo sapiens
gccagctgagttcatacctggggccattggaaagcattgtctctaacacagcttactaaatacctccgaatttccaacgcagtgccaccaagtttctcttctacttgaattgagcatagactctgggcatccagagtgacccagatccatctttagagcatggatttagtattcattgtgggggacgctgtggatttagagggcaaaaaaaggagtgacatttcttagaagacctagtatgtggcagatgtgacaagattctttaagcattagcccatttcctcagcccacacggtttattgtgcgggatgaggaaggaggatcaagagaccctagaagacgcagggctgatggccaagcctggtccctgtgactggagaccctcactcttcctgctgtaccacattctcttattcctgctagtgaaatgtccctccagattccctcaggcctaggggatcctgggtttcaggcttagaaccttatcattcattctgattcaacagttgtatctatatctagaaacacagttttccatttgcttattgcttgctgataccctctgaccttacagaaacccacaattcatagaaaaggaagctagaagttgaggatgactttaagggagctgtcatgtgagtggaagtggcaggggtgatgctagaagccagatttcctagctctcatacataacctaatgtgaacatgtgtcagagttttatttaactcattaatgaagggatctgtaagatggtaaggctggcctgaagagaattgtgaaagagcaaagataatgactgaaaaaatttaagattgctaagttacatgcaaaactacatagtgccctacagtgcaataaaactgtaacctttgaggttatcttttctaggggacaaatcctttgcatttctgctcgtcaaaatttatttttgttactacctggcaagaatcatttgcagtgctctcagttttcaccagttgacatccacagtaacagagttgtaaactagcctcataaatagtacatagtgtgccaagcagagata

SEQ ID NO: 136475 - DNA, 1011 bp, Homo sapiens
ataagaacccacatcatttggtggtttcttcaggctttgtaactgttgtagtgcagaaaatgtggtggaggggggcggtcttgtgactcagggagagctgtgacctcagtgagttttaatcgcctgactgagttgatcgtggtgattatgcataatggaatcttattttcttaatggcaagattatcgaatcttagcttggaaagggactttaagatcatgtgttttaacccttagctttctaccagatcaaaatctaaaccatctgagatatcaccgtgatcattactggatatttaaacttgttaagcttggggctcccacagcgactccatgtcagtgtgtctctaacctggtcctgctccaggtgcactacgtcatcagaattttgttttgggggcaggagtagggatagaagccttagaatcttttaaaaagttcaggtgattctgctgcttgatctaaagcttgggcattcattttgcacaatggtaccgatagggcagtaccatgtttttaattctagtttcttttctcaagaacatgaattggtagctggtgacttcaattagaaaatattttcatcttatttctaaagtagctttatggataaagtattaatagctatattagtgaatatgtaagtaaacacaatcatgctggaaattattgtaaaagtttactacaaatacacaaagaacatagtgctatgtaaacagtgcttgatttaagtccattagaattaatacattctggctgggtgtggtggctaacacctgtaatcccaggactttgggaggccaaggcgggcgaatcacttgaggtcagaagttcgagaccagactggccaacatgatgaaacctgtctctactaaaaatacaaaaagtagccaggcgtggtggtccatgcctgtagtcccagctactcagaggctgaggcacaaaaatcgcttgaacctgggaggcagaggttgcagtgagccgagattgtggcactgcactccagcctggg

SEQ ID NO: 136476 - DNA, 1039 bp, Homo sapiens
ccataaaaatgggcaaccagcagctccaggcagctctcggggctgctctgcctgtggagtagccattcttttattcctttactttcttcttcttcttttttttttttttttgagacggagtgcagtggggagatctcggctcactacgacctctgcctcccgggttcaagggattctcttgcttcagcctcccgagtagctgggactacaggtgcgtgccaccatgcccagctaatttttgtatttttagtagagacagggtttcacatgttggccaggacgatctcaatctcttgaccttgtgatccgcctgcctcggcctcccaaattgctgggattacaggcatgagccactgcgcccagcccctttactttcttaataaatttgctttcattaaagaaaaaaaaaaaaagaacagacagttccaccaagccttttcccaatgattcctctccccctaggaaattgatcatcatacattagttttgcctgtactagaattttgtataaatggagtcatacaatatatgttcttttatatatgactggtgcacaacaaaatgtttttgcgtacatcggtactttgttcttgctgtgtagtatcccattatgatgaatatcccataatttgtttaatattttgttgatggatatttgggttgtttccagtttgaggattttattgatagaggctctgaacattcttgtatgttgtcttatggacattagcactaattgctcttgcatatgcacacatgtaagagtggaattgctgctgtcactgactttcaacctgtagatttttctctgtgtaaagttgtggcttccattgggtgaggggaggaggtgccatacctgtgcctgaagcctcatttgcgccacactagtcaatttagctaatcagcctgaatcttgtcataatgtagccacctatgaatataactggtgaggcgtcctgatgcacagaacccaatctcccagtgatgatttgattattgggccccaggaactgacaaagactgatttttaatttatttt

SEQ ID NO: 136477 - DNA, 1150 bp, Homo sapiens
acctcaggtgatccgtctgcctcggcctcccaaagtgctgggattacaggtgtgagccaccacacccggtcaggaatcccatttttatacccacatgcctttctgtccatgttaccactgtcagagagcctaccttaagcattttcttttctttttttttttttttttgagatgggttgcactctgttgcccaggctggagtgcagtggcatgttcacagcttactgtagtgtcgatctaggctcaagtgatcctcccacctcagcctcctgactagctgggactataggtgcacaccaccacacatggctaatttttgtatttttagtggagatggggttttgctatattgcccaggctggtcttgaacttctggcctcaagtgatcctcccgcctcggcctcccagaatactgggattacaggcgtgagccaccatgccctgccaaacattttcttgattcatttagcagatccttattcagtatcccatttgagcgtggtcctccagagtgttgggattcgtatccaccttcatctcagtgctgtctcagtctctcaagagaaaaataccagccattcccctggtatactgagtagcaggccatcccattgttaagaagatacctgtgctttgtcagctcttgggctatttttcattatgcagaaatgtacccagctaggccacatgcctttttaggtttgtctctcttttatttagtttgtccttatttatttattgtaaatatggaagaagaatcttttaaaatctcccttctctttcttttctttctctctctccccacccatgtctttttttgagacagggtctcattctgtcacgtaggctggagtgcagtggcgtgatcacggcttactgtagcctcaaactcctgggctcaagcaattctcccacctcagcctcctgagtagttgagaccacaggtgtgagccaccacacctggctaattaaaaaaaaaaaaattatgtagagacagggtctcactatgttgcctaggctggtcttgaactcctgggctcaagcagtcctctcactttggcctcctaaagtgttgggattataggcatgagccactatgcctggcccccacccacttattttggaatacatttttctttatccctcccct

SEQ ID NO: 136478 - DNA, 1076 bp, Homo sapiens
tttaggtacccagccctatgcagttggtgagacatcataatgtttccacatgccaccatctcccctactccctgaccaccccctccaagcctgtatcctgctgtcttggcatctgttaggcactgagcttccccactttccctagatcagtcctgccacaggccactgagctcacctcaaaatcctttctctcctacctggacacagccctggggcacctgggccctgcttgtctctggccctgcagtggtcctcattgtcacccattaatgcttccatttacttctctctcactcttttttcttttgtaaattaaaacacacacacacacgtgcacacgcacatacacacacatacacagagacagagataaaagaaaattctgtagtgcattttgcagtgagtttattccagactttctctcctcaagctcctcaaattctcttctcacctgaccctaaccaagagatgaccttgattcctgtttaagagaaggcgtcaactcgcttgtgtactctcatcttcatggctttatatcactgttgtaatgttgatccacttttatccaatgccagagaaagatacccttccttcttttttttattgttctctgacttctctccgatcatgcattcctgactcatctgcctgttgtccagcatggtgaccctgtccccgcagaccgtcagtaagtacttactggatcaaagagccattctgtctgagaaaatgtcagctaagaatgtagaagggcagcaggcctaatttggcctggtttcatatttgaacctactgcctatattcatgtgtgcaattgggtatgttcgtggatttttttttttttttttttttctgtgcagctacagtatctggaacatatgtctcagaaaatctttattgattgaaaaaaatatgagcaggaacaggggcaagaagacggactttgagtccagactggctggcggctggaatattatctgatctctctgggagttggattctttcctaaaccaggaacaataataggcaccttgtagagcgtattccagttcctgttgctgtgtgacaaattactc

SEQ ID NO: 136479 - DNA, 1214 bp, Homo sapiens
ggcagaagcaagaaaagtaaagctggatgagaaactcttattgtctttattacccagcaaattcagtaaccaccaggcacaaattcaccaggaacaaccaagcaaggaaggaagaagaagctgatgcaacaaggtgtggtatgacttcatccctcgcccatccccagaagtagcactgagtaaaacaatggagatgacaaaaatattggtaacagtgggccccagtatggacaaaggcactgacgaggtgaccaggccacgtggaggagagtcaaggaaaactcttgggacaacgaagtctttgcttccatctcaggacctcagcagaaggggtaagattcaccaggactaggcatttcccaggtctcagagcagcctgggaaagccaaatcctgcagaagtcagagacacctttgactgtgtctagtgagttctggttctggacatttaatgggaacctagaagagaggggataccaggttccccaacaaagttccgtcaaataggatgattatgagctctgagtccattaaaatacagaatgaacatttaagaactgaggaatcatagatgtagaatagtatgtaaatgttataaatcttgacaaagaaaaattaatgtacattgacaaattcagacatggaggaggtaaagtgggataaagacttaagaactaaccgtctcatcattcatggccaggtgtcatgtcacgtcatgtcttaaaattataatatggggaaaaacgctagtgaccaaccttaagtttttccacaatcttttttttccttgaccttaatacagtggttctcaaagtgtggtcccagaccagcaacatcagcatcacctgagaacttgttaaaaatgcagattcttggccccaccccagacctcctgaatcagaaaccctgggggtggggccaagcaatctgtgatttaacaagtcctccaggggattctggcacatacttgagtttgagaataactggcttatttatcccttttaggaaccaatgaagaaacatttatctgaagttcagcagccccttcaatttaatgcctaattttttttctattgcattcaaataaagttaaatctaaaacttgtttgctggccgggcacagtgagtcacgcctgtaatcccagcactttgggaggccgaggcgagtggatcacttgaggtcaggagtttgagaccagcctggccaatatggtg

SEQ ID NO: 136480 - DNA, 3573 bp, Homo sapiens
ggctatgtagttagcagtgggtggggaggttctggggagaagaaatgaggtgcaggaagaccaacaagggaacgtgtggtgacccagatgacatgttatgaaaacctagataagaagtgctcatatatctagttcagcattctgcttaaaatgggcttttatggccaggtgcagtggctcacacctgtaatcccagcattttgggaggctgtggtgggtggatcacttgaggccaggattcaagaccagcctgggcaacatggtaaaaccttgtctctacaaaaaatacaaaaatcagctgagcgtggtagcatgtgcctgtagtcccagctactcagaaggctgaggcaggagaattgcttgaacccaggaggcagaggttgcagtgagccaagatcgcaccactgcactccagcctgggcaacggagactccatctcaaaaaaaaaaaaaaaaaaaaaaaaaaaaggccgggttgggggggcttttaaatcattggaagggtggagggatcaagtggagataggttatgaaagaagctatgtcaagggtgaatgtaactcaaaataatcacacatttaacaagatacttcaactgaatcttattttagaattattgtagttagaatttccttttaaagttgtaagtaggtaacattttatttgaagataaatttatatgatttttatattgtataatgagtaaagaactaggatacaatgaagtctacctctatttaaaggaatgatgttgacaaatatatacgtgcatgtattttgaagatttcattaaccaaaatagaagaataagaattttctatcagcactgtttttgtttggaattaaacatttccatactaatataaatgccaaaaaataaatcaacttttacatttctttcagttttaatagtgtaagatcctagtgaaaggtaaggatatgtatattaataaatttttattttttaatgtccctaaaaaatgtgccattttaccatgtttgctccgttattacttgcatggtcttatgtccagtttgtggttagtaattgaatattgtgcatagtatcacagtatagaatccacgttcattattctctaatcatagtctcattgttcttgtaaattcttcttcctgtatttattgaagccttacacctttttatactgtagtcaaccatccaaaagtaagaaggcatttccccctctaataactttctctgcagttatcagtcagttaaaagagcccatgtagttttagaattagagatatagggtggaaaagataaaatactaatttgaggtgtgcgtgtgtagtgtcaggctccgtacttgagagccaaaggtttaagagtcttgattttatgccagggatgccttcactgaaactcacccaaatagcagaagactgttttcatcaatttactaatatcaatgttatctagcaccacatgttttctttgtcctattgatttatcatgcgatattgctttgatgtgttctgttgttactttgcgcctttggggttccacatgccttcgtgggaatctcggggtgcaagtaacactgtataaacgaaaatactttgaaaattgcagtgtaaacaaaactagctcagatgtttgacactttgtttgaagtctttatttctcttgttttctctcaataggaatatacagatgttgccacaggaatctaatctgaaatcgtacaaatggaaatgacgctacaggaggatgtttgggagcatctctctctttttgtcaggagttagaagtgacactaaggcactaatactgtaacttcttgataaaataactttattttttagtagtggaatgctgcaacttttttacacctaacaattgcttttaaattacagtattcaatttaaaagttgtattaactacagtttcctttgcaaaaagtctcaaaagaatcacttgaagggcattatttgttgatgcatttttctctgagcatggtttcatagagagaacttcaccaagtaatattcagacgtttatatgttgaaagttttgcttacataataaaaacaaaaacaagtgtctgaattgtatagtgtctttacatgaaagaactttaaacagtggccttatggtagaaaattttataccagatttttctttttctgatgacattttggcttataactcgaagttttcttaagtttctgaagatcaaggcctatataattcatacatttcatattataagaaggcaagagacaaggtgcttcaaatattccatcaggtagttgtgagtgcactgaatttttagtaatatgttcattcagtttttttccacaactatttgctcttttccaatttcaaaatgctattgtggaaaatatgtaaagattttgtaatctatagtccatcttatttttccctcagggcaagcttgtgcatatcatatttttaaaggctttttaaaaatctgacaaacaaaatctcatatttgaaaattgtactttactactacagcattacacattttgcaagcacatcttatagagtgtttacttttagttcagttgatatgtattgcatacctactatgtgtaagagcaaatggatgggatttttaaatgaaatttttaggccccaataccttatttctttatgttttctgtgttctgcttaacagtacatatacattcccaattacatttttgtgaaatgtttatttgtaataaaataaaatgttgttgctctttctgcttaaataagttacttgccagtttgtgagagcattattttaattttgtttgagacttatagccttggatagcacctctgtttaaacagtgtttaaagcactgttctgtgcttacaaagacagagctttcaaaattaaaatgtgaaggttgataagaacttggtttttcatgactggatgtgaaaaatcttagtacattcagttttcttgtccatatctttaaaagagagggcagccttttccttaagtgagttcatgataaggggggcaagtgcacttgattcattgctaagcaggtaataaatttgggtagatggcctgtcttgtactgtgtacaatctctataggtcaggttttccaaacatatttagcattccacttatggtaagaaagaaatgcatgcacacaggtagtatggcaactttatattgtgttaggtacttataaaatctgtcttaaattttaaaataattgatttcatttactcccatattctaggggacagtaatgagctttgaatatttaatcatttgattgacaactatgtattgcacagatactgtactaaaattacagcaatgaacaagaagacaagacacatggaccctgcctttatggtacgaagagtctaataggaaaaatggacattaaacagaaatataacttggtaaatcgcctttatagctcgctttttatttattgtaacacataaaggtaagatggctgatttactattattcattccacaactgattccctatttggatattcttttggcactgtctcaatatgcaaagcgtgttatctgcaaaatacctgtgcagaaaacattg

SEQ ID NO: 136481 - DNA, 2487 bp, Homo sapiens
tatatatcttggatcttgctccatttttttattcttttgtttgcctcagtttgcccaattcctgctgaccaccctattcttccagactacattgctcaccagccccgcttcacagcaaatagaaatcagaaatcaggccttcatcataggacataagaagtatatcctagaagaagctacagcctgctacgggtctccaatctttaggcctaggctttttgcatcatctaaagtgtagcagttatagttaggtttcagtgctggtcaccacctcaccttcctgttgcccttcactgccatctggctgcattagcagtgtctcaacacactggatttttttttaaattagtgtctactattcttgcagtgtctactacctgtttttcttaggcccacccttctggatgctgcttcatatatctttctattgcagccactttgacatggagttttccaatctggctactgtcagtgcctgcaagcaagccagagccacaatttttatagatttgtgtttgaacaaagcccagctctacaagtacagcatcaactcaggtaccttactactagcaccctactgaacagctgggctccactctcctaacctttagagaaaggaatgaggcattgaagctgttctgtttgtgccagggtctgaagtaagatacctgagactaacttggcctttcagctgtcccagtcataacaaatcccattccatgtgtataaactgatggcttagacctattagtccattttatctcaggccttcgtgccttcaaaaaaagagtgaaggcctggagactctggtttcttccagtgttgctttccgtttcccttaaatgagggacatttttgctcaagtagggttcctgggtgaggtaccatttatatgactcttcatcccaagctttagcatcagagggaactttgaaggttcttccttagagagaaatcttagtctgaacagcatccctgcactgctttggctttttgccctcctggagaattcgttcttttggcagttattagaccaccacctagactcattaaggatgcatcattaatctaaatgccctggaaccttcttgagcctgaaattgaatatgaacctatttattcccatatgccttaaagtccaccaagaatatttagacagatcttatctggactcctcactcccctgccatattgaaatgctggagtgatcactcatggctgggaggtcttgcatttcctcatctgtagtacagtctggtgattatgctatcctatgccatgcacttcctgcctccaacaaaaaacagctttggggagtggtggcggtggtggggatcctagatgtgctcctaatacatcctctgcttccacttaccagaatgatagtggcttccctaaaactgcattggctctccagctgcctacaaagtagtcagattcccaagcagtagtagaaaagtacagaacggaaattcttcctcattcatcatgtacttgtcatattccattgtggcaccctaagtcccttttactgtgtttattttctcttggattctgtgcttgggctggaagataaaggggtgggaggaatgtctgttactacctggaataaggcttgtctttaatccactagcattcagaagtacccccaggaagcatcctctgctcaccatagaaagttttcagaaactcctgagagtctgattatatactagattggaacaaagaagctagtaagaattaatgaagtcacctctgggaacattgcctctgaaaaactgtaagtaattgcgcatttggccaggaaggcaaggaattccaaggcagcggagatctgaggagcattctccagcagtcctcaggtgctgtggtgcttaccagagctctgtccagggataggaaaggaagagagaagagggcataatgacagtgcagaaaggaagttagagactgggattcgtggttttgggggttgaaagaaaccttgaaagtcatggagtacgaaaatagaacaggaaccaagattagctgaatcaacagaaatctagtatacacttgccaggtcccttgagctgaagtgtgccagggtgcaaaggaagtgttgcataagggcatcatcactttcaagcacttaggatctggaggctccagtttcactacctacctctctgccttctctgtcttatttggttttctcttcctccatgcattcttttaaaatgtaagcatttcctagtgtgatgtgatattattctcttttttcagtcctccttcttgtcttgattgcccttacctcctcccaagatttcagccatcacctctgttgatgtcttcaaccctgactactctccagacctccagattgtcagctgcctcccagatgccctcacatggatgtcctaaaagcacctcaaatttagcatgtttaaaatcaaacttgcagctgggtgcggtggctcacgcctgtaatcccagcgctttgggagg

SEQ ID NO: 136482 - DNA, 2345 bp, Homo sapiens
cttccagtaagttggcaagtagctaagtttttaagatttatcagggcagagatagactccatctatgaacctttgcaccactgctcccatctgttttagattattctaggaggatgcttggaaatgcaggcagacacaagcagtgtgtgatatgggggagtgagggagggagacttggagaattgtttgggaagatttggagaggattggttcacgactgacaaaactgaggactgttttcctcttccacctccagcagtagattaacaagggaccatttctcttatcaaccacatgggaaacacacaaatattcgttgtcctcttatgtctaatgtaatgctggacagtatatgcagcctaggaagtgttctttttaagtaatggatcttttgtggtaaagaaagatttgtttgaaggtattaacaggaataaagttaaaagagtttttgattcttaaatagatattgatacttaatatctttccccctcattggggtttgatacatttcactatgaatcagaagaataattttagttcattagaggttctgaacattttattttgttagcatgatgaatttcaataattaatttcaaattcttttctttttttattttttgtagagacagggtctcactctgttgcccaggctggtcttgaactcctggcctcaagcagtcctcccacctcagtctcccaaagtgctgggatttaggtgtgagccactgtgcccgccctcaaattcttttaacttaacagttttaaaaatttggtttgatgtagttttgttttgtttttttgagacagggtctcgctctgtcacccagactggagtgtggtgtcacaatcacagcttactgcagcctctacctccaagactcaagctatctcccacctcagcctcctgagtagctgggactacaggcatgagccaccatgcccagctaagaataaaaattaaaaatatatatattgatatataaaatgagctaggaagccagcttgagagaaacctactttctcaccatcattgactctttctgttttaacatctataaggcctagaatccaggacagctccaagtaccagacagtttttcatctgtttttttgttttgttttgtttgagacagggtctcactctgtcacccaggctggagcgcagtggcactcttttgtacttttcaagcatagagaacagtgactcgctgcaacgtccgcctcccaggttcaagcaattctcctgccttagcctcctgagtagctgggattacaggcgcctgccaccacgcctggctaatttttgtatttttagtagagacggggtttcaccatgttggccaggctggtctcgaactcctgacctcaagcgatcagcttgaggagttctgcctcagtctcccaaagtgctgggattacaggcgtgagctactgcacccaaccacccactcatctgtttactaataaagtagacttggaaggtgtagttttagcatttaattccttttttttccttcacagagcaactttagaggtggcagatgccagcccaattataaatcaggcctggtacagaagagcttgtacattcaggctaagtatcagcgtttacggttcactggcccaaggggatttatcactcataagttcagagaaagattaatgagaaaaaagaaggttagttgaattaaaatgatttaaaaatgtttagtgacttttaaactcctagattatctatgttcattagataaattggtttctcatttaattttaagaaacaacctgggtttttaaatgttcttgttgcatgatagttgaataagatcttcagggagtaatggtaatacagttgtgaggctgtgtaaccttaaaatgcttttaggcattatgccttgaatactttgcatatgttagctgtttgaacttttgactttagaatttctgttgtatggttaatctttgaaatggaaactcaggtaaaggcttttaattgatgtattttaatcttatacaaagtgaattatctgaatgccaaaaatatattgaatatatacaaagggtgcataattgcaaaatacactaactcttttccccattcatatatttttttgttgtggtaaaatatgtataatataaaatttgccattttaaccatttttaagtagcatcaagtacatacagttcagcgacactaatttcattcacagtgctatgcaatcatcaccattatatgttcttttgcaatttatgtttttaattgacaagtaaaaattatatatatttatggtgttcaacatgatgttttgatgtatgtatacattgtggaatggctaaatcaagct

SEQ ID NO: 136483 - DNA, 4420 bp, Homo sapiens
aatgtgcacatgtaccctaaaacttaaagtataataaaaaaaaaaaaataaataaataaataaaaaataaagacttcttgaaatttacacatgataacttggccaaaatttagtcccatggccatgcctagctgcagggcagctgggaaatagattctttaatctgagcattcatttgcctggtcaaaaatcaaatatcaaaggatttaatttttgtattgtggcaaaatatacatatcctaaatttaccattttaaccatttttaagtgtaaaattcattgacattgagtatattcacagtgttgtacaatcaccaccactatctacttccagaactttttcatcttcacaaacagaaagtctgtttccattgaacagtaactcctcatgctctcctctctgcagcccctggtaacctctattctttctgtctatatgaatttgcctattgtgggtatctgatataagtagaatcagacaatatttgtcgttttgtctctggcttatttcacttagcatagtgttttcagggtcaattcatgttgtatcatgtgtcagaatttcattccttttttaaaaaattcattctcttttaaggctgaataatattccattgtatggctgtactacattttgtttatctgtttttctgtggacatttgtattgctttcaccctttggctattgtaaatagtgatgttatgcatattggtattgtcatctttttggttatagccatcctagttagtgtaaagtggtgtctcattgtggttttgatttgcatttctctaatgactaatgatgttgagcatctttctatgtgcttattggccattggtatgtctttggagaaatttctattcaaatcctttgcccattttaaaatcaaagtatttttgttgttgaggtgtaggagttctttatatattctggatacagctccctcatcagatatatgctttgcaaagagaattttaaaaaatccattgctttgtttgtagaagtagtcatacacactaatggtaatcatttggaaaaatataataaagtataaaatcaaaaatataaggcattcctaattttaccagtcagagatgaccactgttaatatttagtacatttcttgtcatttattttttctgggcacatatgtgtatattttaaataattgaaattatcctcaatatacaactttgcactttactcttttgatctactgtcgtgagcattttgacaaagcataggcctttttaacatttaaaaaaccccgagtgtctatttcatgtcagattctgggatcagagctggggccacaaaacgaatcatccacattgcttcctctgaaggaatagcaacttgttccgttaaacagacaggtacaccagtagttacaaatacggaatgataggtgttaagacctaaaaatgctacatgggcacatagcagggagtacctagttcacctcagaagggtttaggaaactcttccttgaagaggtacaaatggatctaaatctttaagttaatctaagtagaaggaaatggtcacagaaggaactgcacatgcaaaggtgtagaagcaggagagattgctttgtgccaggaaccacatgtacttcaatattcctggctgggcacggtggctcacgcctataatcccagcactttgggaggccaaggtggatggattacttgaggtcaggagttcaagaccaggctggccaacatggtgaaaccccgtgtctactaaaaatagaaaaaattagcggggtgtgatggcgtgcacctgtaatcccagctactcggaaggctgaggcaggagaatcagttgaactcaggaggtgcaggttgcaatgagccgagattgtgccactgcactccagcctgggcaacacagcaagactctgtctcaaaaacaagcaaacaaaaaatcctgaagctcagtgtgcctgttggggagattggagcgaggtagcaagggccagagcagaaagggctttggggggtcacgatgaggagtgtggaagttatcttgttgccagtggggaatccatgggaaagagtgaaggtgggcctgcagaagacacaggaaggggctgagaagcattgtagagagatgcaggatgtgacacggagaggaatccccaagggctgtggaaatgaggctttggagatcagaggaagatcccagggaaggacctccctcccagatagggctgcctgagaagagccctttgtggcctcagtacctcatgatgacgggagagaggaggctgtccttcgctgctgtggtcctacagtatcagaggcctcagctctgccagtgaggggaccctgagccagtcatacaccttgcctctgttgaatgggctgggtcatgagccattggtgcttccaccagtaagagctgtcagcaagaaggggaggggggcagtgctgccaaaggttctagagcagtaattatctttcctcaaaacacacatttcacatatggtttcagggggttacagcccccagaaagcctgtccttagaccccagattgagaacctggttcaaggagtgtttttccgcattgctaacctccaacttagataaataacatttgttggaaaatgaggggtttagccctaatgactatcatttgtaattttagtagtgatagatcattgagatttcacttgtgtgctactttaattgtttctgaaggggctttttaaaattattcttgtttatttcttggaaaaaaaggtatactaataaaatattcttattttctctgtttccttattagggatgatcagaattccagtttttcaaaggtaaagaatgttcatactgatggattccaaaaacccacacattttataaaatcaaattttagaaaatgtattgaaaaaccttacatggtaagattgcagttccaaaatttgcatttttataatttcttcttctccaatacatcaaaatgtgcagggatcaccaatatttttcacgtttgtaattgttcattaagtatatgttataagattccgttgatgcttaaagttattatgacagaagaaatggtcatttcttacttgatttagtaggattttattggattcattaaataaagctaataaatctagctttcttaagattttttggggggccaggtgcagtggctcatgcttgtaatcctagcactttgggaggccaaggcaggaggattgcttgagcccaggagttcaagacctgcctgggcaacgtggctagacctcatctctacaaaaaaatataataataataaaagaaaaaaattcaaaaaagattttttgggaacaacacttaagatctcttggaacatatttattaaggcataattcacataccataaaattcacccattttaggtgtacaatttaatgatttttagtaaattaaccaaagtgtgcaaccatcaccacagtccagttttagaatattttcattacccaatatgaaccctcatgcctgtttcgttactcccctttgccacccccaaccaacactaatctactttctgtcttaaagatttgcctttttatagggcagctcacaaaatggcagctagttccataagaacaggcaagtaatggcgagaaagatggaagccagagtcggtaacctaatttcacaagtaaaatctcatcctttaccatattctttttgcaagaagcaagttcctaggccctgccgacactcgaagggaggaataattggtcggatcactgggagccatgtcagcagttgcctagtacagtcctccctctggccagactctgcagaaagtggaaataatagaaggtgataagactgttgattttagaaaaaggaaaccatcttgagaatgggccccatcttttctgtctccaccagaggatttaggttcttcatagttacagacttactaatgtagttctttcttttatttctggtacttttctagccatggcaagagcatcacctcagatcagttacctgagtcaggaaaacctgcctcctgcaatgttgaggatttgtattcttcttaggcagtaggaacccttcagcaactcctgatagtaatgggtttatttctctcctagctgcctgaataaatgctagatgtatcatccattttctcagattcacccattatgttatacacgagtatgttttatacttgttacaggcgtaaatgatcctggctcctcacaaactagcatggatcatgttagtcaaagtcgagggtcaagttagcatgggtcaaggaggagatgtgtatgtgctctacagctaagctccctgctccctgctttgtgttcttaatcctgtacatttaaaatgtgttttctaatggtaaaacaagcttttaaagtaaactttaaagtctgttaacccacactactactttttttc

SEQ ID NO: 136484 - DNA, 5558 bp, Homo sapiens
ggtgcgatctcagctcactgcaacctccacctcccaggttcaagccattctcctgcctcagcctcccaagtagctgggattacaggcgcccatcaccatgcccggctaatttttgtatttttggtggagatggggttttactatgttggccaggctggtcttgaactcctgttcaaatgatctgcccaccttggcctcccaaagtgctggtattacaggcatgagccactgcgcccggcctaattaacttttttcaataagcacttttctatgttgacttccacatagtctttattaccataaattaaatgattgtacattattcttttgacttaagtttaccatgatttatttactcattcttcccttcctcttaattttttttttttacatttaagttgcttctattttttgttattttaaatataatgttttgaatctatttaggtagataaccttttatttgggttagagtcccacaagtgggaatcctggttcaatattaggaacttttctgactgtttattgtcaattgtgtctcaaaatatttgtattagtttacaataccattagcaggatgagtacaaggtaacttatctaggacttgtaattaacgttcttgttagatatggtctttgtgcaactaaaagtaatgtgaatggtttgtcttctgtcaaaattcctcagactctgatcaaaataatagatccaaatgacctacgacatgacattgaaagaaggcgaaaagaacggttacagaatgaagatgagcacatttttcacatagctagtgctgcagagaggtaatcagtagatgacaaacatcctgttatcagggagctttgggttttaccatatttttacattttttgtgtgatgataattttcattttaatatagggatttgctccttcaaatccatcttatatgtttaagtgaaatctattaaaatgtttccaggttattcagtgattctcatatgcggtttgatttaaacaacaaaaactatggggtaggtgaatatttgaggtcttcgtaattctgatgaggagtgttaccacttttagaatattagcaggaggcaggaccagcaagtttacagactatttagcttgagctgattgaaactctgatacattctgccctttagattctgggttagtctttgaatagtagaaaatttcctgaagtcagtacagttatcttttgcgactctttgtggatgtctatactggataattgtggatcactgtactgacaaaaagtgaaaaaaatccacatttttggatgtcgtccatgaaattgaggcaggtgtagtagaaaatgcagaggagacctaagtttgaatctcatctctctcagtttacaagctgaccgatcttggacaaatttgcttagtctctggagcctcttcatctgtaaaatgatgataaaatcaatttatgctatggggcagttatgagtattaaacgagttggcacatgtgaagtacttatgtcatatatggcaaatagatcctcagtagatttttctttcttaacctcatacttctgtttaggggctcttagtagtctagatcaaccccagtttatctctagttctgaacaccatgtggatggaactcacggcaactctggggccccatatgattatgaggtataattgaacaggacaacatttccagttcacttgagttcttatactacttggatctcccaaaaagtgagactgtatgaatacaaagagacagtgctaattgtttttccataatcttttctatcaaattgctaagataatgtatttgacaagacttttaagtcaagtctgtagctaactaggtcagaatatatggacttgatgctgacaataaattcagaactaattaaaacatagtgaaacgatgtgttgaggtatataaaacaattgaaaatgaaagagtaaaaatgttgtcccttgctgggtgaaagtctccagtctcctaatatgatatggttaatgcatgacatgactgtgctccttaatgacacaagctctctatcatgcttttcttgactcaacaagtgtaagaaacccagtaccaagaaacaggattttaaaaacagatttaagacaatcagcatattttaaagatcataagatgctttaggatgtatctttaccccttgacgtgattaagaacttgagcactggagttggacctgagttcagtggctggctcttggattcctagctatgtgactgactttgggaaaattattttgtctctgtttcctcatctgtaaaatagggataagagttgtacttacctcacagtggtggttaagattaagtaaagtgatgagtgtaaggtagagtagctggtcagcattaagtattatgaatgctagctttgaggacagtgtggtagtgtgcaaggatgtgttcctacaagctgtcttttgctgggtctgttggattattttatttgtattggataggtggtgaggcatagtggagccatgaggagtttttaaaaatgagacattacttaacattcatcctgcaaaaataaacaattcagtagtttttagtatattaacaaacttatgcaaccatcattactatctaattccgaaacatttcatcaccccagaagtaaaccctctacccattagctgccactccctgccccatttctccttcccccttagtccctggcaactactgttctattttctgtatctatggatttgtctaatcctgacatttcatataatcatttttcttttctttttttttttttgagacaggatctctctctgtcacccaggatggagtacagaggcacaatcacagctcactgcagcctcaaccttccgtgaggctcaggtgattctcccacctcggcctcccgagcagctgggaccacaggctcctgccaccacacccggctaatttttcgtattttttttttgtagagacggggtttcaccatgttgcccaggctggtctcaaactcttgtgctcaagggatctacccgactcagtctcccaaagtgctgggagtacaggcatgagccaccacaactggcctgacatttcatataaattcaataatataatatgtggcctctcgtaactgacttctttcctatagcataatgcttttaacgctcatccatgttgtagcatgagaattcttatgtatggctgaataatattccattgtatggctatatcgtattctctttatccattcaccagttgatggacatttgggttgtttccactttttgtctgtttgtgaataactgtgctgtgaacatttgtgtgcaagtttttgtgcagatacctgttttcgtttctcttcagtatatagctaggagtggaattgatgagtttgatggttactctatgattaactttttgaggaactgccagactgttttccaaagcggctgtgctattttacatttccaccagcagcatctgaagggtccagttgctccacatcgttgccaactcttcttattaatctctcactttatcctaattcagtttccttatttaaataagaaaaatatattatccttttatcttagaaattcagtttataaaaattgacctcattatatgtttttatataaacttttaaaatcaagtcagggtagtttccacagaaatacgaaagaaatgaaacatgatgcaatcataagtcataggatgtagtgatttctcacctgtgtggctttccttcaaaaagttgtatgcagcctttctgtctgtgtttgctcactgttgtatccccactgccctgagctcagttcatatttgttgaatgaatgaagagttcccaaaggagtagacaagacagaggatacctaacttgtaatacatttagatttgggttactattccctgatgccttaggatctttcacaagcacacctaacacttgggggttctgtctagcctctaggacccatctgttctctacaggtgctccttaacttatgatagggcaacatcccaataacccattgtaaagtaaaaaaaaaaaactgtaagttaaaccattgtaagttggggacggtctggatttacttccacttcttacccgtttcttactctgatgtctccatgttttctcctgacacactatttctgccttttctaactggagttactaagtttcctacaatgtaaatgagttgttttgttatagaggtatggagtgtgtttgataaagtagcttaaaaatagtatcagtggacttgaagaggacatcaaactgccaagaatttcttttattttttatttttattttttaacaaggagttggaacgacagactgtcgttttagctgggcaggttacgggaaaacatcagtttttgttcttgctattgcagtagtcataatctatactgaagtagagtgaactttataaagatatattcatatagtcaacagatatttatgtattgatttctttgttctagttactgttctaaggactggggatatagtgaaaaactatatacaaacctttgtcttcgtgttacttataatttaatagcagaagaaagaaaataaatacatgtcagtggagtgataggtgaaaataaggcagaagaggaaatttaatagcaaagagtgacatgtgtgatatggttttatttagggtgatcatggagtacacttatgacttttaaaaaatgtagctgggttgtgaattaagtgagggtgttagccatagggttatctgaggggatagtatttcaagagagggaacagcaaaagcaaagaccttcagcatgcctgcttttgtttaaggaatagaaagggggacagtggggttgtgacagggtggtaaagggagagagtagatgaggccaatcacgaagggctttgaagaactgaaggacgtgaagactttgtattttattctggatgaagttagaaaacattttgggttctaaccagagaagagacataatctcacttaaattttaaaaggatcactgtggttgctgggtggagagtggactgtaagagctagagaaaaaaagtatttccttctcaagtgaaaaaaaaagattagaggtaggaaatctacatgatagggtcaacacggtagagtggacacatcagggaaccaggctgcttagatcttcttcctcccatatcctctgtatgtagcatctgtctcatgatccaagatgggtatttgtgccctagccatcatgtcctcatactagcctttcctttaaagacttcttgaggagccaagatggccgaatgggaacagccccggtctacagctcccagcgtgagcgacgcagaagacgggtgatttctgcatttccatctgaggtaccgggttcatctcactagggagtgccagacagtgggcgcaggccagtgggtgcgcgcaccgggcgcgagccgaagcagggcgaggcattgcctcacctgggaagcgcaaggggtcagggagttccctttccgagtcaaagaaaggggtgacggacgcacctggaaaatcgggtcactcccacccgaatattgcgcttttcag

SEQ ID NO: 136485 - DNA, 3290 bp, Homo sapiens
gttttgtttttgcttctggcgagtttccattaattggaaaattcagtgatatagaacaactttccccagtgatgctacacaaataaggcagttgtaggtattacaaactggaggccttcaagaatttaaaattttttattttgtgcttcctactagacaattgcattaatctttcttaccttcataaaatatgttttgaaaatgagtttttttcctctgtgtccctcaaactaaggcatgtatttactttaaagcacatagtttgtctgaaacagttcatcctctcagctccagtccctgtcacccaaaggaaatgtgattcttggcagaaatggagctgatttgcagaaaaatccaggagattgtcccagaacagaaacagtaaattagggaagaggattgcttaagtagcattctgatggaccaagtgtattctctttctctgtatcctattaaaagtgtgtagcatagctgatttctaaatgttttcatgaactttaatgtgaattaaagtaaagtggcattagaaggccttctgtgatatgcaaacataacatttagtatttgtttgaaattgttttgatgtttcaggcttgtttttgaagttactttttattttcattcaactgtgaagctctatgccatctttactttccagatatagtaagtcttaccttggagaagaaaggtccttgctttgagagagccattgtcttttcccctggacaagtaagcaggcgtgtcagatagaaagaaaattcttcgattaataaatcaggtgtttttactcttgtttgggcttgggaaggcacgtgagcgctacaaattagtctgtgaaataagtttgggtcccacatatttttaagagaaaacaggttgaattttaaaaaataatcccttctttctgtgcttatatgtaatcttttaagtgaaatcagcttaacattgagataaaactcttcatttcctttttcagcaaattattttccatcacctggcattactttacatgagcgtttctcaacaatgcaagatatacacaaggcagatgtaaatgaaattccattgaattcagatccagaaatacacaggtaatgattgattaccatattatacccatttaactaatggggatatacctcagaaaagatttgggaaggggctgctttccgaacctgctcacttgggcttgctgtagactgtaggattgcatttcctgcacaaaaataataggataatccaagcattatctggccactgcactttgatggaatgaataggatgcgctgaaaacattgactagcgttgtttaaatgtgtaggactttgaagatgcttacatacctaacttcacttctgctgtcaatagtaattgcttcctgaggtcctcagtagaagaatgaaagacagttttcaagccatcgaaatcatatgttgcttcgtgtggtcacaaataggtgttctgagggcagccagatgaaaccacgtgtcttctgctggcacttgttggagcaggtggtgtaccctgtcttgtgagctgatttgaatacatgtgagaatgcagtatatcaccagagcaaagtttgagattacacagactactgatttgagaaccactaaagcttccctatagtgtgttccacaggatatgtatatcctgggagactgccatataggtgaaaaactatctggtagcaagtttcttttgctagctccaaaacatactagctttatttcaaattctgttctgtaatagtagaatcagggtatcagtgtataacataattatttagttgtactatgcctttattattttaggagaatagatatgtctttggccgagcttcagagtaaacaagctgtgatctatgaatcggaacaggttagtgaatacaatttttgatgagaaattatcttattgtttgtatattaacggcaaggggcttggtggttgggagagaaaagggagttaaagtacatgaagaaggaggattgaaacccaggaatctgaaattaaaaaagtcttcaggtgattctgactatcagccaggttggagtgagaatactgacaaaagacaaaaatattccctaagagggacaatccctaaggataacagctttgtaaaattgacacgcaattacagcatttgatattcatccccaaaatccgcactgtaaagcttatggaaagtatgttaggtacctatttttttcaaagcaatcacgtggaatatatttttaaattgtacgtggaatgaatgcacaggaacgaaaaatttcatttgatattgcccttctgtttactgcagaatgtacgaaacattctgtggaatatgaactagcaaaataagggaaataagggactaaatttctttattcatgtgtgtcgttcccacccgacacctcccctcccaccccccatttctttgctaattagaaagactgtcttgactagccaggagggaagaaaactggctcttgttttagaagaattatatcaagttctaaaagaactgctaatttattcattgaggataaagagtctttgtagaggagatattttaatacatttctgatagaatatataaataattttttcacttgtgaaatgattataatttttgctgaacttatggagataggttaatttgttgaacaaatgatattttcagacaatttctaatcatcaaagtcctatactcaacttacaggaaatctgtggttttttaaaaaatcacctataatttagtcatttagcacaaactattatttaatcgtcttttctggcagtcttatagcttgcattttaacgtagtcactatcatagtatatgtagttttgtatgcttttttcttttcacgtgatccataataacattccttttatgtaaaatctctgaattcgctatgaccttttatgactgaggctttttaagttttgttttgagacagagtcctggtctcacccaggctggagtacagtggtgcaattatggctcactgcagcctcgacctcctgggctcaagtgatcctcccacctcagcctcctgagtagctaggactatagacatgcactaccatgcccggctaatttttgtattttttgtggagacagggtttttccatgttgcccaggctggtcttgaacttctggactcaagggatccacccacctcggcctcccaaagtgctgggattataggcatgagccactgcacctggcccttgttaagttttaattaacttttttgtttgtttctttttttttttttttgcgacagagtctcactc

SEQ ID NO: 136486 - DNA, 1014 bp, Homo sapiens
agtgtggtagtatttcaagataaaataattttgctggactaacaatgttttggccatttggaagtagaaaataatctaatcgattactttttgcatagtaagtgtctttaataccttgtatttttcaagtaaaaattgtttcacttagaatttgaaggattttattattaaagtggcaaatatttaatgacctctgatttgaaagaactcagagccatgtatctgtagttattttctcctacttgttattgtacatgttttatggcatggaatttagtgccttaattataagaaaagatatacatctttctagttttgtagctatcttaatttttgataaattcttttctccacaaaatagtttcaaatttagttaaacatttgcaaattattctagggttgcttctagctattccacagagagacagatgtcacatgatttggttgctgttggcaggaaaagtgagaactttcatccagtgtttgaacatcttgactcaactcagaatactgaaaacaaacctacaggagaatttgctcaggaaatcataacaataatccatcaagttaaaggttggtatattttgcacatacgttagggataacacaaaagtaatatactattcacgagatacaggtaaacacctgcagtatagtttaatagtaattaatatttcattgtaagctagactgtgaattaggaaatcttttgaagagagtatcaggcattcattcgagcctagttgttctttatatctagttccaataaccttgtgcttcaactgttagtagattggaactttcaagttagaaagggagaggctggctgctgcgaaagaaaaggcatactgagagcagtaagaaacaataactggtaacctaacagggaggaaaaagcaacaaaaaacagataggaaactcaagaaatcaggaagcctaggtcattttatgattcttaaagccccctgagggcattactaggactttgtatcttaaggatgatgctgagtgatc

SEQ ID NO: 136487 - DNA, 2746 bp, Homo sapiens
aagcctcaatgttggcaatgctgaggtatggagaaggtagttccataaaggatgtgctgtccctggagagcattgtagctgctttaaagtataacttcaccgaagttacaagctctgttcgaacagcacatctttccatagatatgcaaaggaacagatctgggaaagaaaagcaacttacctatgttagaggtatttctggaggaactaagcatgagattcaagtcttaagagcctcttgttcccccttttcccccggttaagtacatatgttttgttccttgatacagccttagtagagaaagtagacaatcagctggagaaactctgggcctggcttgggtctgagtttgaattgtagcatcattaaatcttagactctaatttattgtcagaggtaatgttcagtttgctggagaccctcctacacattgatttgtgtgagtcttgccttcctgcttgtttcttacctggcctttgaactggatgtaagcttttgttgactggccctttgaagtcactgcatcttcttttgccagaactttgctgtcagcagtcttccaaaatggatcctgctgtgcacctaagctggccctcctccaatgggacaggtgtgctcagctcatttggataagcacgtggaataccttagttcagatggaaagagtatgcttgttggttgggcagtaccataatcagacccccagatgtacaatttagaatgcagatgtagcaaattgatgaatttagtttgagtggaagaagccgagggatcctaggaaaagcaactgtttttggtaggtcatattgagacacgcttagttgattaaatggtttacacttttctgtgtttgtttacataggtctttatcaccagtacctagaaatgctgaacactacaagcaaagacattcacacgggcattatggctgtgaatataggaaggatccaaaaagacccgtcgcgtggagaatggacagtgagaaacatggacagagtaaaccaaggattccctctcgtggaaatatatattaccagtcttatgaacatagatcaccttcccctaacataagaaactctttagaaaatgtttatatgtataagcctcacagaggatattcgcctggaagaggggacagtaacaggagagctcagtatatgcccaaatactcagagggtataccctacaaagagcatgaaaggaattcttatccccagaaagtgcaaggagggcatagtcctgatgaccacagagttagaggaagtggaaaaggagggaaaccacctcagaggtcaatagcagattcttttagatttgaaggaaagtggcatgaagatgagttgaggcaccagaggatacaagaagaaaaatactcccagtcaactagaagaggctctgaagactttgagacaaggagctcatttcagaagaggtataggaaaacattaaacctgggtaatttggtataaagcctcaagtgaaaagatctgtttactttatggttgaagataaccaccttgaaaagcttttgtctaaaaagacaaaaagcattgtaatttaattatggggtactggtagtagtgaagtatttctttttagagtaaatcatgttgatggctagaatacttttaaaagatggtattttcctctttaactgccttgtgcctatagaattggcttaaagggttatagattaacttgccactgcattctgcatttaaagccatgctgcccgacattctacacatataaattctccctttcttctctctattgcaagtgtaaactgctttatgtcaacacaggtatcctgaggatcgtgatttcagaaaatatggacacacatcaaaaagacctaaagacgtggagaggtatgaaagcagagagcctgccaggaacccaaagtggaagcctgagcattccctcccaccttaccaagaggacacagaccagtggaaccttgggccccaaacttatcgacatgctgagagggaacacccagagaccagttcagcaaccaaagtatcctatgactatcgtcacaaacgtcctaagctcttggatggggaccaggacttttctgatgggagaactcagaagtactgtaaggaagaagatagaaaatatagttttcaaaaaggccctctaaatagagagttagattgttttaatactggaagagggagagagactcaagatggacaagtcaaagaaccttttaaaccgtctaagaaagacagcattgcctgtacttattcaaataaaaatgatgttgatttgcgatctagtaatgacaaatggaaggaaaaaataaagaaagaaggggattgtagaaaagagagcaattcttccagtaaccaacttgataaaagtcaaaaacttcctgatgtgaaaccctcgcctatcaatcttaggaagaaatcacttacagttaaagtagatgtgaagaaaacagtagatacattcaggtattatctttgttttttctttatgatatttaataatgtttctacaatctttatttgcagcttcaaaaatggaattaatagtgtgtttagagtccatcaagtgggagggattgccaagaattttcccccccaaaaaaaaagccctgtagtgaggctgtttcctgtgattagttacatgggagcaatttcatgtctccttgtttccacatcctatctccagatgcttcttggatgcggggcattctgtggagttgttcctcttcatgaattcacgtgt

SEQ ID NO: 136488 - DNA, 1001 bp, Homo sapiens
ttttatttttttaatttgaccaacatagtgcctttaacctagtatattcaaaatatttcaacatgtagttaatattagaaatacatcaataaaatattttacattttttatatgaactctttgaaatctgatgtggattttacacttacgacacatctcaatgttgtcacatttttacatttttaaagagttgctttaaaaaaaagaagaaacagatgtgacagagaccttacatggcctgcaaagcctaaaatagttaccacttggcactttgcagacagtttactgacccctgatttaattcattttatcctgacaacattccaataagaaggggtgctattattatcatttccatgttagagatgaggaagctgaggcacaaagggtttaagtcaattggcagcattcgctatgttttagatcaaattgtagggtctttctacaaacctgctaatcctgtgtttctttgcagtgtaaaaagtggatagtggctcacgtgtcaaaggatggcacggtcacgatctagatcccccaggtggaaacacaggtgagcagttcttagcagagtaagcttggatttgggatgtgctgtgactttcaatttcaccagtactagtaaacacttaagctcatgggacctggttattcacagtaggtactttatcatagtggaggttgtatttctacattctagtagctgacagctttgtttaatcatagcaggtggctagagttaaataatgaaaagcagtgcagtggccacagcaagagagagtgagaaatatctttgagagtattacattttttgaattagtgagcagtttagaactcctcagtatggatttcattttattttttcataattaatatgtttaaagaaatttcgagttagaaaatagggagtttcctctttcttcttcatggcagaataatagagttttgaatagttcgattatagtccatttctccttccttcttggtagtatcaaaattatgta

SEQ ID NO: 136489 - DNA, 1776 bp, Homo sapiens
ttcaagcgattctcctgcctcaacctcccgagtagctgggactacagccacgcgccaccatgcctggctaatttttttgtatttttagtagagatggggtttcaccattttagccaggatggtctcgatctcctgacctcgtgatccacccacctcagcctcccaaagtgctgggattacaggggtgaatgagctgccgtgcctggcccatttgaattttaataaaactaattttaatattgggtgaaggaaagtgttcttaataatacttcttttatcacatgcaataaatgtcgcttgtaaatattttctcccaagtgatgtccacttttcctttaaaactagtggttctgtagcccctggaccagcagcatccacatcacctgggaacctgctagagtggggcccaccccaggggtagggcccagcaatctgtattttaaccagccctccaggcgattctaatgcacactaaagtttgagaactactccagtgtatattcctgcatggaattgctgggctgtgggatatgggcatgttcgactttattgggtatttccaaactacaggtgacacttgaacaacatgggtttgaactgtgtgggtccacttatatgtgaagtttttcccaatgaaacgggtatagaaaatacggcatttgagatatgtgaaagctgcctatacagagggacttggatatgcacggattttggcgtatgtggggattctggaaccaatcccctgagtgtaccaaggggcaatggtattttcaaactggttatactgtaccatgtacagttcacctagcagtaactgagagttcccattttcacacatctttgccaacactttggaatatgcaacttaaacatttttggcctatctgatgggtgatcatagccctttggcatatcaaatggctatgatcttaatttgtattttcccaattgctaattaagttgaacatctcatacgttcataggtcatttgagttttgtgttctgtgataatggagtcttttgcctattgaaataaatacagttatgtaaataaatacgatgtgttgaaataattgcaaaataaacccagaattcccaaggagaaagaagcccagagggaaaaaacagaaagtccaggaaagagtcctaggggatgtgatagttacacaatcgggaaagaatagggatttgtcaagctgaccgagggaaggccatccatgtgctggacgagcatggcctgatcagggaaagcaagtagtgtggtgtaggggactagtagggtgtgtgggggaaaagacacacataaggctgggagaaaggtaggaagcaactagatgtatctatcttacatttgtttaatcttttttgttgagcatttgggttattagttttcttgagctttttttctttcctattataaataaaactgatacaaacatcttagtgtacacagctgatttttttcttttgaattattttttaaaacaagtttaaactgaaattactagattaaaggaaaggaggtatgattagtttcatagtttcttgtaagaaacatgtatgtttcaagattactctccattagtcattagggaaatgcaaatcaaaaacacaatgagataccacttcatacccactaggatggctatagtcaaaaatatagtaagtgttggtgaggatgtagaaaaattagaaccctcatacactgctggtgggaatgtaaaatggtgcagctactttggaaaagtttggcagatcctcaaaaagttaaacata

SEQ ID NO: 136490 - DNA, 1049 bp, Homo sapiens
tgcagtccagcctgggcaacagagcctccgtctcaaaaaaaaaaaaaaaaaagaaaaaaaaaaggaatcactttggtttagatatgtcttttgtattgtaaaagttgttgaggtttcttctgttagtcaaattgaaaatttttattgtaataggtggattaagcccacccacatttattgttaggactgaaaaatttgacctcaaatccatcataatattttataattatgtgtatttgttatctttgccatttctctatgcgaggtagatattttgctcttttattacaaaaattagggtgtgtgtgggggtgtatttaggaaggtttgcatttttgttctaatcgtttacctttgtacttacaccttttaaaataccctcactcctttgtttgcttatttttctgtgcatgtgtgtgtgtgtgcgtgtgtgtgtgtgtgtgtgtgtgtgtgtgtgtgtgaaattgcatctatgtaatcaaagtaggataatgatagacaactgtggaattctgtatctacttcgtgctcctccttactgaagaactggcaataacagataacagctacccaccgtggccaagataataatccatgatggtctcttcaggtctaccttccccttctcactattctactgattgtgctctttttctgtgggctctgacttggtgcgtttctgtgatgggagtgtggcttttttgtttgtttgtttgtttgttgttgttgttggagagagggggtttcactgtgttgcccaggctggtctctaacttctgggctcaaaggatctgcctgcctctgccttccaaagtgttgggattacaggcatgagccaccacgcccagcctgaggcttctttgttgcaaaggctttcctggggaatttttattctttgcatttgtaaatgctgaattcacatttagtgtggaatctctgtcagttgattttttttctgtaacagctttgttgagatagaattaacataacacaatttacccatttaaagtgtacaattcagtgttttttagtatattcatagagttgtg

SEQ ID NO: 136491 - DNA, 1037 bp, Homo sapiens
gataagttatagttatatgggaggcttagatatgtgaaaaaatggggttctgcagtcatctgtggtttataggcctgcccattttgtagatgaaaagagaagcacagaactaatgaggcctctaaaagaggaaaaggttgggtggcgctctgttttgagttaggagatgatgtgtatgggacgtgtgccagttccagaacctgagtagatttaacagggtctgcattctcacaaaggctcagataagtcactgaaagtctgtttatacctttcagagtatacaggttaaggaaatgacggaagctctccatgcactaaatgtttattctaaagcaacattgaagaagtatcaggtgccagtggagtgtttagcacaagttatcaccaagggcagagcaaaaggctggttgcgacttggcagaggctggtgtgccttcctggttgtttccactgacattgaccttgtacctctatcccagaggcatattatgtgtgtcagagaccctataaggttcataatgctactgatctgtgatgcagttcatggtaagcaccaggaacctggaagtgatgaagagctgaatacagagtgagggaaaagttaattcattgccatatataatacattcaaaactgatctaaatattttggtcattgacttccagattatgaatactactatttgtctttcattaaagctgataatcagttggctgtttgtatttttgtgcctctcacttaatttttacccttattgacatgtaaaaagtatgaaaagatatatttttatactattacaagatgacattttatttaaaaatcagtgtgttatgaaatgcttcttagcgcaggacctaaaacaagtgttttataggcataatttgttttctacttggagtaaaggtttttttgttgttgttttttttgttttttttttgtttgttttttttttgagacaggctctctgttgcacaggctagagtgcagtgatacagtcttggctcactgcaaactctgcctcccgggctcaagccatc

SEQ ID NO: 136492 - DNA, 1068 bp, Homo sapiens
gctggtgatgatgactgtgagcatgataataaagattttctggaaagatgatttgaaggtgtgactctcatgtgtgtccatgagagggcagcctaaaatcatgcatgtctgtggaacaagcagcctctgtaaagcctcaaggtaatgtgggcagtttcaagtgtgtttggccctttttcttctctgtttttcttttttccctctgtttgaagagcgctttcagccattttcaggcttactttagatacggagcaggcccatgaacacctagagggcagcatgggcagtacagagctaggttcaggccctgcctgggtgggtgagtttgtgtaggtgccaatgagagcgtctgtctaggcgtcctaggcttttctttgtaacttttcacacagaactaattcttattaatcagactcttgaggtagacactagaacctgactgtgtttagagaaaaaagaaacttgattttctatgcttgttccccttccactaacttcacacctgcctctgagcattgtgtgcatgcattggtgccaccatgtaaggggacagtggccggagctgtatagacccagagttgcatcagccacacatggctctggaacacaccaggggagactgagttacagagagagcagaataagagtcctcaaaccatgtgggagcacagagcatcatagggctgggggacagtgggggtcttgaagatgggcagggtttaaacagatggagcagggtagaataaaggatggcatgagctagaaggtgcatgggagaaagggcagtgctgaggtaaagttgggaaaagagtttggagtcagattgcggggtggctggaatgagctgaggagttggcctttaaatttttgatgacgttcatattgttgatagtgtcataatgattaagagatgaccaaaaacaaaatgaagaatggcacttggatttttctagtacttatctcattttaatatccctgatatttaatctaggctgcaaaaccagatgtatgtggggaatcatgacaatccagtgtttgtcacgccatcccccttcctcattcccactg

SEQ ID NO: 136493 - DNA, 1107 bp, Homo sapiens
tatttttagttaataaggcaggctatttttaaaacattttttattgcagtctaatatgcatttaaaaaaccacacaaaactataattcgatgaattatcacatagtgaagatgggagtattttatatacgatgggccaagaaaaggaaagaaatcaagagaaatcttcttaaaacacgctttttcactggggttgagggggcgaggtagtattttctgactgggccttcagttgcatcattcttaggaggaggagatagcttaaatcatttccagtttgtatttttcattatgctattttaaaggcagaattcattaactgtcacaggataacgttataactacctttgaaatgtgtgcttttgtttttatcctttttgcttgaaacactcaagctgcatctgctagggaagaacctggaaactacccaccagaacgaccctccgtggcagaggcgaccttgtataataaaacactgaaaaggagaggttgtttcagtttgcatttttatttggttgagagcttaaataatagtttgtttcgatgttctgttgtactcatgagaggtggggaggggcggtatgattgggttttcagtgtatcttggattttatttgaaggaacttaaggggtttttttttttttttttttaatggaaacaaaattggggaaggggaggaggtacttttgcgggggagattcttaataagttctgtttggaaactattgtagaatcatttaatgcactcttctgatattaagattagcttaaggatatcttccttcatttgaaattggaaatatagaaaaatatgtgtgaaggtttaaaatgtgaaataagcacctatgtgcattaaggttggtatggtaaaattggaatgtttaatttaggtgccaggtgataccaccatttgttgtttgggggagttagcaaggccaggtacttaagtaaagtctccttagaaaaattatgattttgaggttttataattatctgtcctggatactgatcattcttggttacccaggcccttagcatttgggacccattcctaatgagacttaacctgcttttctagagagtcaaccattgttcctaagcttgggc

SEQ ID NO: 136494 - DNA, 1026 bp, Homo sapiens
acttcgtaagggtaagttttatttatactctttggactcccatgaacttttgcacactgctttgtgtttttggtttaccctaaactaccatcctttttatctttgctttttttcttcctattcagaaaagagcaaaatgtgaaaagacacaagactctcaggtatagaatgaactgagcaatttggagaatgtattggactttgtcctctcttattcccccctcctagccctgcaagttgctaggtacttgtgaggcagtgtactggagaggggagagcatggatcctggggtcaaagggcctttgcccccacccttacttggccctctacctgcaggtgaccactggcacattctcctgcttgtctcagcttcaggttcttcacctctaagatggggatgatgaaaacagtacctgtcatgcagaattgttgggaggattgataatttagatgtttatacatgtaatgtacttagatcagtgtctgctcttttcacttgatatccagtactatgtaagatagaaggtgcatgtcttctgtattctgtatttcccatttcttttgcgtgcagtctttgattcgtacaatagaaggaacacgtagaatgtatatttgtacattcatgtcaacatagtatttgaaattgctaccaaactcatttaatttggcataagactaacagatgaagtctctcatttgcttgaagatattttacaaaataccaactgttctatatttctttagaaaaagattatagttattaatattgatacctctgataatattttattcttaaatcttcagtgattccttttactatagattcatgacagctaattagtactaactgatttagaggtttcctttcccatcatatggaatgatgtaaagaaatcagatacaaactactgcaattagaaaataaaatatgaacaactttcaacaatgtatacaattgattcttttctaactttataacattttaaactatttattcatatgactcttttccaaaaatttgctgt

SEQ ID NO: 136495 - DNA, 2472 bp, Homo sapiens
aactataaccagattgactcaggagaattaggtcagtatcacactgaacgggatcaatcatatcatgcttcctgtgtctgctcccatccatgagatacaaaaatctcaaattacaagcattaaaggaaggagacagtaaattttattaagaatattttgcataacatgtaacattacaaaggagatcatcacgatttacttatagcaggccagaattataggaatttcttcttcaaactggatttgtttctcacatagcctaaggaggtgaaagtctcccttatatatggagtagactgttggaatataagaattctttttcctttcatctgatgttcttttcccttccagatctaaattgaactcaacattttacattccatcttttctgaagattgtcctacaatttggattttgatcatgacaaagaagattaaaatttcattagcatgaatgcaatttgttaaagcagactgatttgtttctaagatatttttggtttttttaaaactgataataatgctgaattatcttaagtgagatgttaagcccactttgttcttttaatgtaatggagcttatgggtagaagaccatgtctactaattacaaaaaaaaaaaaaaaccatgcattgctgcttttcctaccacttccagtaagaaaatgggtgttttgaagaaatcatttgccttgtcctcacggaatctgattaagccctggcctcttgattgtatagagtcattgtgtatattccagttacctagatattcccttgagattttgatacaatttgagggaggcagaagtctgcagttgaagaaaaaaaataagtctgtttgtcatatttaagtagcctgtggctatttttatactgattttgatatcatgttcttttcatagtcgtattttgccaccgtaaacataaaaaaaaaaaaaaagatttccaaaatgccgttttcagaacctgggttttaatagcagtattgaatttgtaagcttagtagttgcagaaattgaacactaggtggcactcagttatcttaacaggggaagtactgatacaattgttgacttttcttttactatgtgtaagaaataccccaaacatgaaaagattgttttgatcatatgcatgtatgtagaatatttttgcagagcagaaagattatgttagaagtgtgatttttattttcagaagtcatatacatgtaagctacaattttgagtgctttataaacacttaagatatatatataaattttaatttcatagcaacttgtaaaaaataaaatacttgttgaaaagcctttttcaacatatccctaagctaagggaagaggaaggaataacaactcagtgaaaagatggtctccagtttctgaatgaaaaagctacagctgagaaataaaataaaatgtcatgctgcagaatatgttatacccttattttgtgttaaggatatattttattatgtgaatggttttgtttttgttttttgtttttgttttttgcttgtattgggaattagctttactggtaacttccttatttagtttttagtggtcaactctaataaaatgaaactagggctgagctagttagccctcactagccaaactgaaactctatgcaacattaaaagaagagatccatcatgtagcttgtgacacttttattttattagtcaccggggaacttttcagtgatgaaaatacacagggtaataaaccttcacatggcttcaaaaggaaaacaagcaaatcttctctaatctactcttactataatttcctaagtgtacaccaaactctggatttaaaaatctgaagtactatagaacattaagttgaagaatggaaattaagagtacgtattcatggtttatatttcttattctatggagttcgtgaacacatctaggtggaatgcatctgagactaagggctggtttttaatcctcataagaaaccagccttgaagaattaacaattctcttcattggtattctaaacctcctaagatatttaggcttctgtacataaaagtgtttttgctaaatttacagtatatatagatcctttcatattattttactaagaatgtttgaactttgcatatttgatatagttcctggtaggaatagcacagctcaaacattagtttttctacttacctcctctaacacgtggtttgtctggagagtttctaaaaattcagctataaccccagttcatgtatttactggtgattgttcttgctgaggtagtaacagcccaatcttgggctgttaaatcctaggaaatctcgaatcatagtgattaaaatagttggggtaaagttgtagcttatatgcaatactacttggaggaattcttctactaatttgtatttaatgtggaaattgtatagtttcattgatttaatcataaataatggaaatggtctccaagaagttttatttttcattttttt

SEQ ID NO: 136496 - DNA, 1048 bp, Homo sapiens
accagatctttctgattgatgagtctatctgatgattagtgaaccagctattcttaaggaaatacgttgttaccatatttccttgtatgttgagaagtatacctgaaagttataatagcttcagaattagtgtaattagggccttccttactaaaaatacctttgcaaacaaaagaaaatggtaacacagatactcccatcttgacttagcagtgacactgcaggaattttttttcataaaatattctttatagttattgtcttatataaaaggaatgctcttatgatgaaactttgagtaaattacagtgctgacttatgagtatttcttactgtgtccttagctaaaatcaatgaaactgatacatttggtcctggagatgatgatgaaattcagtttgatgacattggagatgatgatgaagatattgatgacgtaagtagatgtaccttgtgttttccaatttttgttattatccatggagaaaccaactttcccctaacatccattaattttaagaacatgggacacttaaataaggttgtattttgagaattgtctgaattaaataatattatttagaagacacctggtcaaactgtttatattttgagaattctttttttttttttttttttttttttttttgtgatggagttttgttctgtcacccaggctggagtgcagtggtacaatctcagctcactgcaatctctgcctcctgggttcaagcgattctcctgcctcagcctcctgaatagctgggactacaggcgcgtgccaccacgcctggctaattttttgtatttttagtagagacgaggtttcaccacgttggccaggctggtctcgaactcctgacctccggtgatctgccctcctcggcctcccaaagtgctggggttgcaggcgtgagccaccatgcccggccctattttgagaattcttataaccctcttcaatttctcttcctgaaaaggtcagtgtttgcattggcaatattaacgccagccactctaatcataacttgtttaattaagagtctct

SEQ ID NO: 136497 - DNA, 1032 bp, Homo sapiens
cctcggcctcccaaagtgctgggattataggcgtgagccacaatgccagcccaaactaaaatctcttaatttcttttctttttttttttcttttaaagaagtttatttatttgtttttttgagacggagtctcactctgttgcccaggctggagtgcagtagcgcagtcttggctcactgcaacctccgtctcccaggttcaagtgattctccagcctcagcctcccgagtagctgggactacaagggcatgccaccacgcccagctaatttttgtattttttagtagagacgggtttttgccatgttggccaggatggtctcgaactcctgacctcaggtgatccgcccaccttggcctcccagagtgctgggattacaggcatgagccaccgctcctggcctaaaatctcttaatttctaaactaattgattgttactctggaatttcttgattcttcgttattttaaatgtgacgggcagtgacttttcttttgtaggtttggataaatacctcggacattattttggttggtctccgagactaccaggtaaaatttacatgtaaatttttcctattttactggcttgaatttgatgagccatttcttaagagccagttttgtttcaggcattgtgctaggtatcccagggatttatgtttaaatcaaaatctgggagccattattctaggggatacagctgaatgagttaagtgcccatcccacaaaaggctcatagcctggtagtggagagagttaagcacacaagtaattacaatacacatcacaacataggtatgtgctataaatctaaaggagcacttgggaaagaaagaaagtggtggttgcctttcgtgatggtaacccttgactctgtagactcattgtgggtctgtgagatccatttgacatccacctattggaaatcatccctgtatgatactatctctatttgtatagcctcgatcatactttgatttaaaaaaaaaaaaaacccagaataaataatttaaatcttcactttaagcca

SEQ ID NO: 136498 - DNA, 1076 bp, Homo sapiens
gatctctacagttctgagaagcagaactataaaacaatgtaaaacaataagggcatatgtctggtgtgtgtgtggggggtgtgtgtgtgtgtgcacgcacacgtgtttataaaggtagcagttgtaggaatgaatgagattgggggtgagggggtgcatatgtatgtctatgaaagcctaatcatttctgggcaatgatgtaaaggttttacgactgacctttgtaactatgaagttttctacacttgacctgagctcagaaaaaagaaagaaagaaagaaatgtcatcatagagtcttagttctagctctgccgttaactaacttgatgtttatcactcccttatgtttgtttatagttttactatatgtatttattcccaactggtgcaactttattctcttgacagttttatgtggactttaagttgctgttatcaaaagttgaacaatattccatacccttttcctttctccccgctagagtatgctcaggtaatcaaaatgttgggaaatggacggctagaagcaatgtgtttcgatggtgtaaagaggttatgtcacatcagaggaaaattgagaaaaaaggtaggtgtgatttgttttactttaatataaaattggttaagggggaaaatccctctacagtttttaactgtccatggacttcatttttggaaattcccaaaagacttaccttggtaaacagtgatttacctataagtaaaatagcaaggtctgtaatggtaattttatacaggttctaatgttaaagaagcatttgtatcacttgtattgtattcctgcccaaaaagtccaaattgagagacattctgcaaaaacaaacggcccagttttttttttccttgtcttttttttgatacagggtctcactcttatcacccagcctgtagagtagtggcatgatctgggctcactgtaacctcaccctcattggttcaagtgatcctcccacttcagcctcccgtgtagcaggggctacaggcctgtgccaccatgcctggctaatttctgtattttttgtagagatggggtttcttcatgttgcttaggctg

SEQ ID NO: 136499 - DNA, 1068 bp, Homo sapiens
cgcacaccactgcacccagtgagatttcaatatttatggtactctgctaccaaaagtttgaaaaccacagttctctgtccagacactgtcttcacttaattttgaaagtatcgggttccttgcatagggcctggctttagaagacacccaagatttccgcttagaagaatatgtatagaattgcatttttatttcaaaaggatgggtgctaaagtgaaatgtttttctatattttttaacataatatctgctatttatgtgtattttatgtcagaaaaatccccaaaggaaattccaagaagggtagggaggtgataatgtgttaatgttgggattggagattgtaaatttaatatgattgtgtagctaaaatagatgaattttttaatttaagtgatcttttaaaaaatggttttataagccttaatttcattttatttcatactgttttacagataattaatgtcatttacctccttttcttttttttaaaccatcaggtaaaggaggtaaaaacagacgcaggggtaagaatgagaatgaatctgaaaaaagagaactggtattcaaagaggatggtcagggtaagtgttttcataaattacgctttttaaaataacatcctttcttttttagctggggactttatttttttgagacagcgtcttgcccatcgcccagggtgaagtgtggtggcacgattacagcccactgcagccatgacctcctgggctgaagcagtccttccacttcagcctcccgagtatttgggactacaggcacacaccaccacgtctggctaattttaaaaatttttttaggctgggcgcagtggctcacgtctgtaatcccagcactttgggaggccaaggcgggcggatcacgaggtcaggagttcgagaccagcctgaccaacatgatgaaaccccgtctctactaaaattacaaaaattagctgggtgtggtggcacgtgcctgtaatcccagctactcaggaggctgaggcaggagaattgtttgaacctgggaggcggaggttgcagtgagccgagatcacaccactgcact

SEQ ID NO: 136500 - DNA, 1530 bp, Homo sapiens
gagatcgcgccactgcactccagcctgggcgactctagagcaagactccgtctcaaaaaataaaataaaaataaaaatatacatattttttaaaaactgagctaaccacgaggttaacgagtcagccacttgtgaaaccgggagacgcgcgtttgctacaaagcagcagaggtctggtcttaaccagcagcaagcgccacctcaacccgcccttttctatgacgcagagtctctccccctccctccctgactccgccttttccctgcttgaggccctgcccctcgcgtcctctctggcttgctgcgcaccctcccacaacgcgtctccctcggctctaacaataggagtcagtcggccacgcctgcgtcataaagcctgggggcgggcccagccggcgacgggaggcggggaaaagcgacgcaaagagtcgcggcgccatttgctgccgccgagcgtggacgcaggcggatctctgaagagctgggtcgccagcctctcccgcgcacgttgcctggcctccagcacctacttggtcccgcgcgctccctcgtgtcgcccctcggagcagcagccgccgcggtcgccgctacccggaaagaagtcagagacgccgcgaggtcgccgccaccgccatgcccaagaataaaggtaatgccgcccggacccccggaccacggctctgctcggccgggtctcccaggtcctgcccgtagattgcaggtcacccaggccgcagtgaccctttttccttcccgccctgcctgcccgcggctgggcgccccacacgcgactctgagctcgggagaggagctgggaagttaactcctgttgcccagtttggtcacattggggtggagccggcgccatttttgtagggcctcctgcgggagaatgtgggcttttgctcctgattcgcgccagactgaccgctgctcggtggggacggtggcgggaaccttccccggggcggcctaggtttagtagataggcccctttggccttcccgggcatgaggggttataatccctggaagccgttctgaactttcagagtgctgtctgcattcgtgagcaccaggtactcctgcatgggtttctttatggacagttcagtattgttgaggctactcgctgtcccttgtgaacagtgggtgaaaccttgatacatttctaaggctcacctctagagatttactctctccatccctttacaggatatagcttatgtttgtttgctgaagacttattccatattgagccaagttttctacttttgcttcagatgatgcatatgttgtgagaataaagacctaatttaagtgtcctccattctgaggctaagcgttcacaaatgatcagacttgaggataactttatttgggatttccaaaacggaaggcctaatcttaaaaaaaaaaaaacaaaaacaaaaaacagaacactcctaaagaaattacttttatagatttacagtgttcctgtcatttttaatagccgtataacttgaagaaaattgtgcaagtaaatata

SEQ ID NO: 136501 - DNA, 1016 bp, Homo sapiens
attgttagcaagttagattttcctggagcttcggaagaaatgaaaatggaaacatgatgaagatatagtcactgaatcaatgagaaaaataatgaacatatgaataccacctaaaaatacactgaataaagtacaccatatagcattatttttataggaaatatttcatgtcccttaaatattctttgttagttatagggatggacagtttatgttaagcacttagcttaaacaatccgtttatattagcactgtatcccttgtgccatccaacattttgtatgtttttgtaaacagttcatatacagtacatttctgtactgctttctttaatgtatacatgccttgtttaacttggaatctattattattaatcaattgactattaaatctggttaaatagttcacctggattaacagtattgttggacagtcctaaaaatggccagattgtggaacagctgttgaatgtaatacttccaaaatgtacatatctttccccacgtctgtttcactggttcgttcatttgtttgtttcttaaagtcaggtgctctgtcagactaacctagagagctgttatggtagagaaagttatcatatgtgtgtggcatgaaatcaagaatacacctatgaagttagtccatatactttgcaactccttagagtacttttttccttaattaaggaagtagtccttgcacttctaatcttacatagcatccatacttagaatttggcatatcatctgggattttgccaatatacgtcaaagccctttaagagtcatggtaaggagatgggtgaaggaaaatttagcaacaggtaattgaagtcctattggatatttcatgtttaaatagatattctatattaaacactaatttaaatgtaataaaggccaaaggcctctgtatgaaattggatttaaactttcttattttagggaataaaacattattgatcaaacagtatctgttctaacctaaaattataggtagggcaggctaagtgaaca

SEQ ID NO: 136502 - DNA, 1060 bp, Homo sapiens
ccaaatttctcccacgcccagcccaattttctccattacatacacctccctgaagctgtcatctttcaccagtccattttcctccacactcagtgaatgtgatctttttacttaaccgcatcactccctaactttaaacactttattaccatcaaataagtccacgtttgcaaatatggcttacagggactttcctgatctggtcccttctcatctctcccactttatccactgccacattctccttcacggtaaatttatgctgtagccgcattgtactgctgccagttccttaactgtgtcgtcttctctcccacctaagagcgttcctccaaactcactctccattctctctactctacctgaggcagtgtttcccccttcctttctctaatctagctcctgcttatcctacaggtcttatcttcctcttaaaaagtcccttttaagccacctcacacagtacagtcaggtatctctgtgtccctccagctgcacctggtgtttgttcatcctgtcaaagaacttacttgctttgtgattattgattctttatctctccttcactgaactgaaaacttcatgaagtcagagttcattttgtcttttttttttttttttttgagacagggtctcgctctgttgcccagactagagtacagtggttcaatcacggctcactgcagccttgacttcctgggctcaaatgatctctgcctcagcctcccaaatagctgggacctcaggcatatgccaccacactcagctttaaaaaaaaaaaaaattgtagatacaggacctcacaatgttgcctagacttcatttctgtgttgttcattgctaactacccagtgcctagcagaatgcctggcctttactggatacttaacaaatgtattttgaatgaaaaatttaaaaaatggtggcttttataaatgacagtggtgttattttgaagagtgtaaaaccatgtagtgattatatgcatctacattgcatgcataggaatggcatttagatagatatgcagtgctaacagtgactgtctctggaagagtgg

SEQ ID NO: 136503 - DNA, 1045 bp, Homo sapiens
actaatttgtttatgttgtatgtttgttggtgtttgtttttagcggggagtagatatttgttttgtggtggaattattaactatttagacaaggctaggcctggtggctcacgcctgtaatcccagcactttgggagaccaaggcgggagaattacttgagtccaggagttcaagaccagcctgggaaaaatggcaaaacctcatctttacaaaaaatacaaaaattagccaggcatggtggtgcgtgcctgtagtcccagctactcaggaagttgaggtaggaggatcacttgagcctgagaggttgaggctgcagtgaactgagatcacaccactgcgctccagcctgggtgacagagcaagcccttgtctcaaaattaattaattaattaattaattaattagacaagtattgaaaacaaaggctgagcaatatgtatatttctccttgaaataaaattatcagtgaatccatttttgataggtgcaggaccagatggagttgaagaaattaaaagacattcatttttctcaacgatagactggaatgtaagtatagaatgaaaacttgcttgaaatatttctttataattaaaatatgtctaagtctcttttttttttcccctccagaaactgtatagaagagaaattcatccgccatttaaacctgcaacgggcaggcctgaagatacattctattttgatcctgagtttactgcaaaaactcccaaaggtaaggagaaaatgtgaaaatccaaatataagacaacaaatatgtttttttcttgtttcatcagaaaatcttttccagactctgggcgcggtggctcacacttgtaatcccagcactttgggaggctgaggcgagcagatcgcttgaggccaggagttggagaccagcttggccaacatagtgaaacgctgtctctactaaaaataccaaaattagccaggtttggtggcatgtgcctgtaatcccagctacttgggtggctgaggcacgagaatcgcttgaacctgggaggtggaggttgcagtgcatca

SEQ ID NO: 136504 - DNA, 1009 bp, Homo sapiens
ggtggatcacttgaggtcgggaattcaagactagcctggctaacatggtgaaaccctgtttctacttaaaatacaaaaaaatgagctgggcatggtggtgcacgcctgtaatcccagttacttgggaggctgaggcaggagaatcacttgaacccgggaggcagaggatacagtgagccaagatggcgtcactgtactccagcctgggtgacagagcgagactctgtctcaaaaaacaaacaaacaaaaaaaacttgtattagaaattttaaatgattaatgtcagaactcaaagtttaaaatttacatgtgcaaatttatgtaggatatttatgatatttgttttggcagatttcggcctaagtaaagagtctattgaccatgaaaagaaggcatattctttttgtggaactgtggagtatatggctccagaagtagttaatcgtcgaggtcatactcagagtgctgactggtggtcttttggtgtgttaatggtaaggtttgaatttgggattttttagaggggaaggagattgttaagtgaggatcagcagtgaatgttaaagaaactggtgtttttattttctttattttatgccatatgtaataaataaccaagaaacattattgcatgcagtatagaaggactatgaaatctgttagctgcgtctatctcatcctaatttgaaagggcaaaaaaaaatattaccatagatttcctgctaatagtaacaatctaaagcattaatggtgtttggtcttttggagaaactggtccagaaatctgttagtaagtgacccttaaaataagttcgtttggccgagtgcagtggctcacacctgtaatcctagcactttgggaggctgaggcgggtagatcacctgacgtcaggagttcaagaccggcatggccaacatggcaaaaccccatctccactaaaaatacaaaaagtagctgagcaggatggcacacacctcaggaggctgaggctggagaatcgctagaacc

SEQ ID NO: 136505 - DNA, 1043 bp, Homo sapiens
agatttatatgcagcttttgtatacagaaaagaccctccatcagtgaatacttgtatcaacaggaaattgtggtcaagaaggaaccgccgtataacaattttgacgggctcagtagaattctgttttgttaaaagcaggacatcataccacctgtgttatactttaaacattttgggattttttccatctaattcatacatatgtagtttaaagggtttttttctgtcttaatgtgttacatgctctttgggaactggcaaacaacaaaatgaaaaaaatgtattcccttatattgacaccccaagttataacaaatgtttataactagtatttataattgatacattttaggggaaataatctacagtatatctgaatctatattataataataaactgtattatagcagggtcttattttaacaaggatatagtttatactactttgtaatatttattttctcttacttaaatgcaggttttcttagttaaaaaaatctcaggctctgatgctaggcagctttatgccatgaaggtattgaagaaggccacactgaaaggtaagtgttgctgctatttgtaatgttcatgtagtctaaacaaactgaaaggtctcaatagagctcatgggactccttggcatgttatttacattctgaataggttcctgttaccagctttaaatttaggctgacttttagtgaatttttcctgctaggctaggaatcatataactagtgagaaccagagttgccacgttataaaagacgtattataaattcatattgagttttatacaagtaaacatttagaagattaaaactgggtttgattcatcttcaaatttatatatttattttaatgtttttaaaaacgtactgatttactggctgcaaaatagcttttattctaaaggactttatgacttctggtctccaagtaagtttttattctgagcctatgatttgaaaaccctaatgcaggatttggctctcataggtaaaaagtagttaagaagaggccgggcgtggtggctcacacc

SEQ ID NO: 136506 - DNA, 1029 bp, Homo sapiens
cccgggtgagcattgccgtttgagcaccacctcctgtcagatcagtggcagcattcaattctcataggagcacgaaccctgatgtgaactgcacatgggagggatctaggttgtgcactccttatgagaatccaatgcctgatgatctgaggtggaacagtttcatcccaaaatcatctccccctcccaccgcgccagtctgtgaaaaaactatcttcatgaaaccagtccctggtgctaaaaaaggttggggatcactggtctagattgtttcttggcaagaggaaaatttggagattgtattcaactttgacgatgcagtgattccttaccacttctctgtaaggaaatatttgaatatatcatgctttgcaagtttcagaacagcaccagtttagctctcttgtgtattttagtgggggtatttagcaattcttggctaacataggtaatttgttacagttgttaacctcttttgaacccaaaaggatgcttttaatccaaataaagagtaagtagccatcagagcgtaatggttgtaagtttgggctctaggtcagccggacttcaattcaattttttttcttctatttattcactgtgtgtgcttgagcaagttacttaacctcttggatccccatttccttcctctagccagtcattaaatattgaagttcttcaaggttcgattctaggctgccttcttctctgttactaatactctcctaattgattttctctgtgcctgctatcttaattgtaactcacatacagctgacataacacatttatatctccaatctagattgcttctccaagctctgaattcttatgcacagctgcttactctttttctatgtcttaaaagcactttaaagtcaacatgtctgagaccaaactcatgatctttccctaagcctcaaactgttctatttcatttttctctcattaagcaatttagaaacttgggaagcgttcttgatgtatatttctagtccctacctcccctatcccactctgacctggcca

SEQ ID NO: 136507 - DNA, 1039 bp, Homo sapiens
gccaagattatttttcttctggaatttggtactaagccaaactatacaaatgggaagacaaaataacaacatttacagatgtgtgaggttcagaaagttttcttccacatcacctttctttggaagttacaagggggtaatctaagaaagagacatagaaaactgaaaacagtgaattcaaccagaaaatcactgaagacctatcccaagatgatagctgtgcagcgggcctacagaaccaccaatcccgatgggagggtaagagaggtctccaggatagaaaggagctctcagaagaaaggaaaatattgctaagggctaagaaaacattaagaatagtggtcaaattacttttccctttccccaagaatggtggaaggctgttaaaaataggaaaaaatagaaaagtgcatgataaattcatgatccaaatgggaatcaaagtaaaatttatcatgaatttaaacatttaatgaagttttgttttttttttaagtcccctcagattggcctgggagtcgttgttatgggcccatataaaaggaaatttagtatattacctagccttcatttgaaccatatattgtcatgataatgtggatgctgttgtctataggctttcaactttagaatcaggctatagagagagcatgaaggatttggttgtggctgcaggaggaaatgttaattttcttttttttttctttattttattttattttattctattattatactttaagtttcagggtacgtgtgcacaatgtgcaggtttgttacatatgtatacatgtgccatgttggtgtgctgcgcccattaactcaggaaatgttaattttcttaaaattaatagctttaatattaataaaattacatacagctagcagcaaatgggaagaagtttaagaggaagaatatatgggcactattagcctccttttgcaaagggaagagttaggattctgtccaaagcagagaaaagataagaagtgtatgtaaaggtaatataattaccaaacaatagagaggaagatgatg

SEQ ID NO: 136508 - DNA, 2057 bp, Homo sapiens
actctatttgtgttttacagcagtaccacactgttttaattaaggtatcatttcaacttggagacttatttcagattttggtgtctgaaatattgcttcattttagtgctgattattaaaaaccataacacacgcaaaatgtgaattattaacctgagcactggtagtaattaaagccaattttcactaatcctttaagtttaaaaaagggtatttggttgctcatgtttaaaaatattacttgaataaagtcaatgactgctacttaacagagatatcctacttcatgagttgtgcagtaaagatgatgctttttcctgacatagtctcaagagccacctcatgttcagactgccattctgtgttaggcggttgtcctagccttgctgcccttttggagctccattgtaaggagtcttaagtaattccttttgggagatgggagagttcctaagtgtctgccttgctgaaaaactgaagcatgcgtttttaaacaagaggagtgcacagttttccgggcggaattcaaagttctatcttagatatttatttgggtccctgttgctgctaatgtatttgattgtataagataattttttaaattgagcaaggttttttttttagttactcttcaacttccattaggtcatttatagaacattttcataaaaatttgatagaggaggaagagccctggcttttcatgtagaatctgtagcacaaaatggtctctctaatgtttgctcaataaatgggtactaaactgaactcccattatagatagctctatcaccaaatatgggcctaccttgaccacagtttcttcatccagaaagtgagctgattattcttggtattttctagagtgtctttagattttgaaaattccgtgcttttattaaattcttacaggctgtgcagattaacacttgaggtttttgttggttccacatagattaaatgttcattaagcagagcattatcccacaactcttgaagctgttgtccttcggttgttttaaataccactattacagtgattatgttctgaatattggcatacctgtcattttccaaagtaaaaataccttagaaaaacttctataacgtattagaggatgaaatgaaatggagtaagggattatatggtagcttgacccctccttcttttccaacatggcttcttaagtgtttcattttgctaataacccaaggattggacttcttttttttaacttatattttatcaactaggaatgtgagtttttaactatgggcctttaagtctttaacctggttgataattaatgcttatgactaacataaattcaaaagtaatttactttcatttaagacaggtagcatttgtccttacatcacaattttaaaagtttcttgcctgtggtcttcattttctacctatagttatgaaactcttcctcattgacagggaacacccatgacatgcctgtgtataaccttaaaattatcttgagaccacggcttgagtgtgtgtataaacacactgcaaagggtcaaattccacttgtgcatcagtttagcaacttttagtagtggcaactagtttcagttgttttaaagggtcatatagttaagaaattctggcatttctcaggattctaaaataataacgtttgtttcactggttgtgaaaattgtccggattgctgggaactaggagaaaagaatatttcaacaggatttggctatcagcaaatctgttttggtttcctattctggcctccctacctatccagctacattagtgcccctgccggcaggtttcttctttcttttaccacaggaaaattgtccggcctctttttctagcattttcaggacccgcctgacaggaaattttctaattgccggaacagctggtaggagaaaactttgcaggggcttggccttccctttctaacttaagttttaccgtcagaaattcttttatcaccatcatggtttcgtagccatgtttaaatttttgtcttttcgtgttcgctctatacaggtaagctctgttcagcttcttttat

SEQ ID NO: 136509 - DNA, 1035 bp, Homo sapiens
ctatctctgtgctttggcatttgctgttcattctgtttgaggactctaccccatgagtcagcaaactttgtctataacgggccagatagtaaataaatatcttagactttgtaggccatatgatctctcttgcaaatactcaactcggcggtagccattgtgggcaaacacagttgaagataatatttaaacagagatggacatgggcagatttggcccttaggctggccaggcctggctgtagtttacccctgcccaaggtcttgatgtggttccttccttattattcaggttcttcctggaggacaacgtgccaaataagttaggatccaaaaccttaatgctgcatactcttgaatgtacagttctacttctagaaattatttctaaatgtgaatgtgtacaaaggatgggacagaccatcgtgtagagcaaagacccaacaataggagatttgtataatagaattttcaacagttcttaataatgcattgaagattagagaacaggggtcagcaaactacactcatgggcctgtcacctgtttctgtaaaagatgttttattggaacgcagccttacccattcgttttctcactgcactggcagagttgacagaaaccgtatgtcctgcaaagctgaaaatatttactatctgtccctttacagaaaaagtgatactatgtgtagtatggtccatatatgtgcatagaaaagactggaaagaaaatcaccaaaatagtgatttttttaaattttttccctttttgtttattatctaagttttctacaatgggcatccattatttttataatagtagttactttttaaataataaggtaaatgattaaatcaataaaatgtttaaaacaaaactttagtgagataaagtttaagaaattttagagatggaaaaaaagaacagtatctagtttcatgtgcacaaccacacaagtagcatccatttcagatttcagcatatgatatttattaaggcagccatttatttgaggtcttatgtgtgatatttggtat

SEQ ID NO: 136510 - DNA, 1048 bp, Homo sapiens
atagatcactctgtggtctttaagttgtcccaaaacataggaaaaaatctgccttgccttcttgttttatagaattagcatagtcccgaaaatgagttagcatagaaaaggaaaccatgtgccagtttaatttatgaatataaatgcaaaaatcctaaataaaatatttacaaattacgtatagaattatactaaaacaatggatttttcccggaaatacaagcataggtcaatattaagaaatttatttgtctaagttatcagtagatcaaaggaagaaaaattaagtgacaatattaatagataaaaagacattacacaaaacttagcactcattcctcttttagtaaagaggaaatagactttaacactatatatctaaaaccaaatattcacattatgtctgaatgaattagtgagtgtatctccaagtcaggatcaagatagcatttactactgcttactttaagctctgtagacgatgggaagtttggagtttgttctgtgatgggaagccattgaagaatttgaggtaggggcataaattagtctgctttctgttttaagattattctggctgctgttattaaactaatgataccgcattggacactatatctcataccctaaaccataatgatatatgtctagtcaataaccaatgttatttctttaaataaataaaaatttctgacaaaaaaaagattattctggctgctgtgaagataaaggatttcacagggaaaatttagaagcagagaaaccagtcttatggcaatagatgatagtttgtactgggaatggcagaggaaatagaaatagacagattttaggtttatttttgagataaaattagtagaatttattgaggggttaaatatgaaaggaaggaaattagataagaaaggaaagaccagaaaggactcataggtttttgagataggtaataatgtcattgcctaaaatgagcaagattagcttcccattacacttgaaataaaatccaaacccaaatttcttgggtctaaggcctcacttaatatggccc

SEQ ID NO: 136511 - DNA, 1049 bp, Homo sapiens
atcttcatgaaacttatttcccatttctggtttaaaaccttaggcttttaccactttataacactgtctattgatggatgtgtgcttaaaaaaattaactgtcctgcacttagatggaaatccttataaattaaatcttttagtgtctgaaaaaaggaatgatccacacacaaaaaagtatccagtggaatcaattaagaacatgttaattttaagtttttgtcgtatgggtcgatttttttttcaacagggttcagtcatcatggggtcatgaggatggttaataattgggttttatcatggttggggttttgccagacaggtgttatgtatggtgtagaaaagttttcaggaactctgtcacagtccccatactcagccctcttcctttggggtctgatgaaaaggttcagcacctcctgtttttttacctaagtcagtcaccgaccattcatgtgcactctccttccccaaaccaaattacctggttatgcgtccaccaacatcatgaccacttccacatccaaactataagaacttgggcagcagattatttaacttctctttaagccttagtctgtttcatccagtgtggataatagttcctacctcattggtgagaatcagctgagataatttcatgtaaagcacagtgcctagaatatagtagtatcttaaatgttattgttatacttgaaagaaaactttattaataaataagagaactcaaagcaactaaggactcagtgaaggaaactagaaaaaaagaactacaaagtaaacctataaaaagcaagaggaaggaattaaatataatttcaaaaatcagcgaattagaaaacaagggaaaacacacaaaagcaaatccacaacattaggaaagcaaaacaggatataagcacagataggaaggagattaaaacatcataacaacccaaatatttacagataaaatgatataacgtctgagatttgcttcaaaataatcaactacaggagttggggaagtgagcatatgaaacaagattggctgtgagttgaagattatt

SEQ ID NO: 136512 - DNA, 1071 bp, Homo sapiens
ggcatatgctgtggtcccagctacttgggaggctgaagcagagaatcacttgaacccagaagtttgaggctgcagtgagctatgatcatgccactgcactccagcctgggcaacagagtgagaccctgtctgaaaaaaaaaaagttatagttttttacatacagttcttgtgcatttgttaagacaaattatgggtattttatagttgtatagtctttgttatgtcataagtgggattttttttctgctatgttttccatctggttattgcgtatgtatatttaaaatgttaggtgtttctatctgttttttagcatcttaggagtgttaacttttcagaaatcaaacaaattgtcatgaacgttatgtcagttgtggaagaataagatcagtttaaccttctgcttaaaacacctccatagttttatggttcctttaaataaaaacccaacctccataacatgacctaccaggccctgcataataaggttttgcatacttctctccacatcctctctagccgcacacctctaccctctactgaaagtccagtcactcaaatgtatcagcttctcttttgcttatgggctttcaaaggcaatgttccttctcccagaattcttttcccttaccgccatccccactacttaattcctggtcatctttcagatctgtttagatgtcatttcaactgagatgtcttccctttacaactaccacttccactttgaccttgagttaagtgtttttcctttttgctgccacgggagcctatgcataccttaaatggcaacaccataccagattccattgcttatttacttggtctatattccctactaaactgtgaattgaatgaggcagtgaccaagtctgacttattccttgttttatgtctgtgcccagtacccagttggtgttcaataagtatttgttaattaaatgaatgaatggattaagttttagctagcatagggacccaggcatggggcctagtgccctgagctaccttcagattcctaccctctccaaaaccatttgaggcagtttacttcattagtctgtagtata

SEQ ID NO: 136513 - DNA, 3251 bp, Homo sapiens
acttgcctccctaccttttcctgaattttggcactgtttctgtgcttcatagtattatataggcattccctcatctaggaacatcttctatgagtggtgaaaatgaaaggtgccctttgtataaggtcagtagaccttctaagataggggctatgttttattaacttctgtctccagctcagtgcctagaacatagcttgaatgaaatgaatgaatggatggatggtaaatagggatgagaaaaacaaagaggggagttcatatttagagcagctgcctcatgtgaagtatgaggtgataggtgggctgccttttatttcccaggtgataatgttccaaagatggttagcttagatccttgtatacttgttgaattaatagtcgggactactcctttttccagtaagggaatgagagaagaagctacgtgttcctgacttccgtttttgtggtttttaaaaattacacaaataatacgtattcattgtagacattgtagacacattagaatattcaaataagcaaaaataaacaatttaaattgtctaaaattctaccacccagagataaccactgttaacattttggtgtatatccttccagagtttttcccataaaaatatatacattggaatatgtatatatttatttagaatgggatcattacaatccatattgttttgtagactgctttttcacttcttacatgtgactgtctttctatgtcaatgaatttacacctttatcatcattttaatgactgcatagtattccattataaggatgtaccataatatatttaactagttctctattgttaggaatttaggtttccaatttgaagttctttttggaataaaagttatggtgagcattcttgtatgtacatctttgtacacttgtctactttttttaaaaaagaagtagaattgatgagacatttcaaaattttatgtgtggtattttggtttttttaaaatatggactcggattgccttcctgaaagtttgtgctgattcacactttctccagcagtatgtccagagtgctctctcccccgtaccctcgttaatactgaatggttttttgtttttgtttttgtttttgtttttgttttgtaaatcattaccaatttgaaaggcaaaaggtgtctttgggttaaatgcatttctttgatgagtactaaggctgaactcttttttcccttattgctcatttctgttgaggttcatcgttttttcttacaggtttgtaaaacaaagctctttatgtattgaggataccaaccctttgttatatgttgccttttttttttgtaatcagtttgtcttttatctttttttgtgtctggcagaagttttaaacttttatagattcaaatgtcatttttttctttatgatttcaaccctccttaccccatgagtattgttcacctgtattctaatacttgtacaattttattttttcacatctaaatgtttaatccatctggaatttattttgatgtagagattgggcttaattttctctgaaataattaatcagttcccttgattaattatgaatggagttggaatttagagtgtgttttgccatacactgttgtaatgatgtttggtgaggcttaaatgagaccatttgtaatgcatttaactattaaactcaagggttcacgtggaaaggtaataatcatttattatatgatttccatgaaaaaatgtttttatagtttcaaataattaacttttgaagcacatcctgttgcaaatttagcaactgcatactcatatggtggttctacttcattagagccctttaggggtgaaaatcttcctcaattttttttttttttgtctgccttcatttaactttaactgatgtgaggtctgttttggtaacttcctgcttgctgtgcttttcacagaatggacagcaaattatggatgaacctatgggagaggaggagattaacccacaaactgtaagtaaaatattttatcacaaagggtatagataaatgaaatactgtaaagttattattatttttcagctgagcagagtaatcattttacagtgttagaaacttgtcgatcctttcacattaactttaccagactacattattgagtatgccagggacctttctaaaaactgtttgataagagtgattttaagagaatgataaaacaaattgctttatattgttgaaagtttttcattagtgcctaaagcttatgtttttttgtttcttggggatttttttgagatggagttttgttcttgtcgcccaggctggagtgcaatggcgcgatcttggctcactgcaacctcagcctcctgggttcacaggattctcctgcctcagcctcctgagtagctgggattacaggcgctcaccaccacacctggctaatttttgaatttttgtaattttagtagagatggggtttcaccaagttggccaggctggtctcaaactcctgacctcaggtgatctgcccacctcagcctcccagagtgctgtgattacaggcgtgagccatgtgcctagcctgaagcttatgtttttaaataaccaaattgaacgtaaatttgttaaagacaaaaatataaaggtcatactttacagatacgtttaacatagaaagtggacattcaccatttcctcatctggtttttttgttgttgttcactcctgaatccccagtaactaaaccaatgtgcctggcacataatggatactcattaaatattacataaatgaattaataaattgttccctaccaccacacacagaataaccattgtcagcagctaagttatagtcatcttgatattttgtacgtaagataattattatttacgtttacaaaatacatattctgcaacttgttctttttacttaacatgtcttgaacatctttgtatgacagtacatatagaactacctcttctttgttttgtttttttgttttggggggtttttgagacacggtctctctccctgtcacccaggctagagtgcagtggtagagtcatgactcactgtaacatcaaactcctgggctcaagcaaccctcccacctcagccttcttggtagctagtactacaggcacatgccacgacacccagctaattttttttttaatgtttgtgttttttgtacagatggggtcttgctatgttgcccaggctggtcttgaactcctggcctcaggcaatcctcctgcctcatcctcccaaagcatt

SEQ ID NO: 136514 - DNA, 1048 bp, Homo sapiens
ttttttggctggaaggcattatggtgggatgagagaggataaatacatttgcctcacttttaaactattttttgtccatactcattctctagctacattgtataaaaatatagcacatacataaatgatctcttccaccctgcttagtggaaaattgactgtagtgaatgatggaacaggtgtttcaacactctccgatacttcttcattgcattacatctttagaagttacctatagaaatgtaatgttacacagtcaattgaggcaaaagagaggagaagaagtaacatttactgaacatagactgtctcttggtggatctttttagttacaacatccctgtgaggtagatattatgtgcatcttgtgagtgaagaaactgaggctcaaaatgttaaataacttacccaagttcaggtaactacaccagtaagtgacagaattggggtttaaatgtggtactgaccagctttagaacacattttttcccacttgttttttaaaattagagaaatatattttcttgtttaacaagtactattccttaaacttaggaaacaatagaaagtaaaatactgagtaagactcataatccatgtaacctaatctctaataaaaccaaccgtcattttccaaatgggaaacttaactgtagaagtaactctgtgctcatttctaatagataacatttgaatccttgttttgatgaagtgatagaaaagtttcatttaaataaaggtgctttttttggtagaaaaagctttgtaaagctgcactggtatgtaggataatgttggctcgctgctttaaaaattaaattgttcaacattttaaattattgccaaactcaggaggtagctatttttacaaaaagtagagcataaaatacccttcagattatgtttcactcaatttttttcttaggttgctttgttagtatatactatactattagctgggtgagtatttgagaaaagaaagtttattgtaaaatttgagatgacgtgaagctgaaaatagtgaagaggctgattgacagatttggaa

SEQ ID NO: 136515 - DNA, 2645 bp, Homo sapiens
agttcgagaccagcctgaccaacatggtgaaacccagtctctactaaaaaaaaaaaaatacaaaaattagctggatgtggtggcacgcaccagtagtcccagttactcaggagactgagacaggagaatcccttgaacccgggaggcagaggttgcagtgagccaagattgtgccactgcactccaacctgggtgacagatccagattccatctcaaaacaaaaaacaaaagagtaggggttttagaattagatttgggtttgaatttcggctctacttattagccttaggcagtatattagactttctcatgtattcaacaaatatttattgaacacctactgtgtgtgccaggcattttgctaggggactggggatccagtgcttagaaagtttgacatacctatcttggcttaatttcctcatttgtaaactggtgataatacctcacagagtggttaagaagcatcaaagataacagtccttagcatttgcctggtatgtggagctcagtaaatgatagcaatcatttttactgtgtgtactcaatattgattatatctttaatccaaataaaatgacttttttaactcagcttaaggtttttgccttacattttatttttggtattaatgttataaacgcttgttttattttttttttatacttatctgtttggtttgggtttctctttaaagtagtaaatagttgttggtttactttttaaaaaatataacctgattattaaagttatgattatcaaacatttcaaacacataccagactggagagagtagtgtaatgaaccaacatattcccataacccagcctcaaggattatcaaactcatggccaatcttgttccatttctgtttcctcttctcattcccctaaccaccctccgataaacatttgcatttatacttcttaaaagatagacttttaaaattcataaggaccttactatcatcactcataaaacatcagtaattctttaatgacatctaatatccagcaagccacttccttgtataattaaacactttaaactttacatttcttacattattacttttggaatggtttccgtcatattattttacattttttattcttgtgaggtttttttcttcttccatataaattgttttgtttgaggagcttatgaaatatagaagaatgaattacggagctaaaaagatctgggtttgaatcctgcttctgccattcagtaattaactttgctgagccttggtttcctcaactataaaataggaataattatacctgactcatgttcttagggttgaatgtgatgcctgcataaagtattgttaatagtctctgccagttattatctttagtgattcgaactgtaatatctattcttggttactgtatggtttttcaaaacattccaaaatttgtatttactggataactactaaaactaatggttttaaaatatccttctaggaaagagaatttagaatcttggcttctcccactacctcttttattttgagttcacattaatttaacctgatgttacaaatcctactttgaactttctgaagtgttttttcttttatattgtttatatacttatatcaattattcttcactattgaacccttttcttttagtgggattaactgttttactcagttatttctagatattaggttggtgtcagtatacttcaccagttctttcctacctcaatattctttatctcttattctcttttgatggtctaggatgtacctttgaacaatttatttttttaaaaaactaccaggatggtgaaaatttgactttgcagatctaagaataatttcctgtgagctttgaacacgaaaaactagaatgaggtataaaattcttagatcataacttttccttttcaattctctgtaagtgattacttcaatgtcttctggcattttattgttgcagaggagaaatctgaggtcagtctgatttcagttcctttgaaataacctatttttttctgcttgtatgcttgtaggattatatctttatccttgaaatttaaaaacatttgccaggacatgtcttggtgttgatgatctctgttgaaccttctcagtctccagtctcaggtatttttttttcagaactggaaagttttcttatacttttgattgattaaactgcctgtttttttttttctttaggaacatctgttattcatagattatttctatgtctgtcttccatagtttctttaaatcttttctttctttctttctttcttttttttttcatttactcaagtttgtcctctgtggcatggattccgttttctgtagtgtcaattctaatacttgctattcacagtgcagatttaattttggctactatgttttcatttctttattcttatctcaacatactcttgtttcataagcagaatcccccttagacggtaacacttcaaaaaacatgaggtggatcccagcctgaaacttggccacaaccacaggaccaggaaaaaaaaaagtttctgaaagggtcctcttaaacataaaaatgtaaatataaccagaggtcattcctaccctcatctagaaaatagaacaatgttgggtactaacagaccttaagtagctagaggaata

SEQ ID NO: 136516 - DNA, 1086 bp, Homo sapiens
tgggatttccctttttttttttttttttttttcttttccgagatggagtcatgccattgcccatgctggagtgcaatgacgcgatctcggctcactgcagcctccgcctcccaggttaaagtgattcttctgcctcagcctcctgagtagctgggattacaagcatgcaccagcacgcctggctaatttttgtgtttttagtagagacggggtttcaccatgttggccaggctggtctcgaactcctgacctcatgatcctcctgcctcggcctcccaaggtgctaggattacaggtgtgagccaccgcgcctggcctcccagtcttgtgtaatcacaggcatcctctaaggtgcctgtttaaaaaataatatacttaacaatggggcttctgggaattctgattcagtgttgggctgagataggtccaggtaatatatctttaacaggaaccataggtaattttgatcatcaggcagattggaaaatattaccaatgccattgtgtactaagagggtttgaaggtattggagaagcaggaataggattaggagtagatcccaatttttttaattgatactttactaattttctctagtaaaataatagatcagattgtggaaattataaaattgctttaagttcccttaatctgcacaaaaaccaatattgtatttttttcttttatttgacaacattcgtacagtgagttctttggcattatctatgtttacattggggaacaaaagcaccattgacaggtatagataaaactattctaaatgcagaagtggaagaaaaagttatacttagaagtaacgttaaaaacagctttaaacatagaatcagtaacttccttgggtacgaaaaccccccaaaattttaaataaccttaatctaaaactttaatccttaaagttttatagaagatcgtaaaactttcaagctgggagagctcctggatagtcacatatttatggatgaagcaaccacaacttagagaggcttgggggcttgcccacagttagtggcagactttcaaatccatgctggccaagattccatagaactcatggattacagata

SEQ ID NO: 136517 - DNA, 2275 bp, Homo sapiens
ctttatagtgcagcaacaaagaagtttgagtcagccctctgctttcctcctccctgtcatcagtggggcccagcagggaggtgagcttacacccctactcagaggcagtgaggtgatacaggttggtgccctactttcattgggactaagagtggagctgaacttccgtcccacccatctgcaacaaaacagtgtgagtcattgctccacttttgcctgggtgatgttggtgcggcccagagggaagttgaacatacacactccacctcaacaggaggactgcctgcttcggggaaaaaaaaaaaaagattaaataggaaagagtcctataatctccaaatatccattagacagtaaaaaatcacttataccaaaaaccaggaaaatcgcaacatgagtgagaaaagacagtcaacacacatcatcactgtgataattcagatgttgtaattatcagaccagaattttaaagcagccatcacaaaaatgcctcagtgagcaatcacaaacactcttgaaacaaatgaaaaattagtctcagaaaagaaatggaagccataaggaagaaccaaatagaaattttagaactgaaaaatacagtaacaaataaacttactacatgggctagatagaagaatggagatgataggaaagaataacattggagataaagcaatagaaatgaacaatagagaaaaaataaactggaaaatgaacagagcctcaagagcctggtgaacattaacaaaagatttaacatttatgtcatcagagtcccagaaagggaaaaaagaaactggacctgaagaaataatggctgaaatttccccaaattttgcaaaagacataatcttacagattcaggaagctgactgaatcccaaataagataaatgcaaagtaatccactcctagacaaaatcaaaatcaaacttttgaaaatgagtagttattgtctaatagatacagagtttcaattttgcaagatagttctgaagattagttgcataatgtgaatatacttaatactactaaaccatacacttaaaatagttgagatagtgaattttatgttatgttttatgacaattgaaaaagtaaaatatcaaacttttgaaaattaaagaatctttaaagcagttagagagaaatgaactgttacctatagggaacaactcatgcgacagcagattttccatcagaatctatggacgtctgccaggcacagtggcttacgcctataatcccagcactttgggagacttacgcctgtaatcccagcactttgaggggcttacgcctataatcccagcactttgggaggccaaggcaagaggattgcttgagcccaggagttcgagatcggcttgggcaacatggcaagaccccatttctacaaataataacaataataaaaataaatagccaggcatggtggcacgtgcctgtaattccagctactggggaggctgaagctggaggatcacttgagcccagacagtcaaggccccagtgagccatcttcacaccactgcactccagcctgggcgacacagtgagacctcatctcaaaacatctatggatgccagaaggatatggcacaccatttttcaagtgctgaaagaagatactgtcaacccagatttctataccaagtgacaatatccttcaggaatgaaggtaaaatcagagtggtcttggatgcaggaaaactaagagaatttgtgagtagcagaccctgaaagagaatgataaaagaaggaaacttggactgtcaggaataaagaaatcacataaattctacatagtctcttccagaaaatagagaacagtttacaactcattttatgaggccagtattatcctgatagcaaaacctaaagatagtatagaaaactgcaggtcaatatccctgaagcacatagacacagaatcctcaacaaaaactagcaaaacaaatctaacaacatataagaattgcatgccatgaccaagtgggttttattccacatcagacacagtattcaaaaatcattcaaggtagcctaccatattaaaaggttaaagaagacaagtcacatgatactaatggagaaaacgtattttttcttgatcataaaatggcttatgggaaagagaaaaatttagctaagttaaacattcattcataataaaaactcagccacctaatagaggaggacttgctcaacttgataatgaacctacagctaacataaaacttaatggtgtagtcccagcaccttgggaggctgag

SEQ ID NO: 136518 - DNA, 2327 bp, Homo sapiens
cacctattctggacatttcatattaatggaatcctacagtatgtggcctttgtgtctgttttcaaggttcttgcatgtttcaaggttcatacatgttgtagcatgtaggaagacttcattcttttatgtggctgaataatctattttatggatataccacagtttgtttatccatttatcagttgatggacgttggaaattgtttctaccttttggctattatgaataatgctgctgtgaacattcgtattaagtttttatgtgaacacatgtttccagttttcttggatatatacctaggagtagaattgctgagtcatatggtaaatctatgtttagctttttgaggtactgccaaacttttccagctggcctgtaccattttacattcccatcagcagtgtatgagagttccagcttttccgtatccttgccatcacttattattgtcttttttactataaccatcctactgggtgtgaaatggtatctcattgtggttttgatttgcatttctctaatgactgatgatgttaaggatcttttcatgtgcttcttgtccattcgtatacataattcacgtgcttattttgttaccgttttagggacttaagttggcttttgttctaatgctgatagggaagttccttgtatatgtatttcttctcagaaaacttagtttcaatacgtgcttttaagatattttctttctttttagatttgataaatacaaggcttttcctaaaatagtggttttccaaatgggttaatagagctctaggttctatgaaagtgccttaggatacctctcacctagggcaccctttctctcagccagagtggaattcctagaggaacacaacaaagaattaaatattggttatagaacttaaaaaagaaagttacagaaagaaaacaaagattggggcagtgatatttttccttagagtctcctcggcctaaactagtctatagtttcttatttaaagcaaaagtgcaagagttaattgaagattaattattaatcttaataggaagataatatgcctagaatctctgaaattaaatataagtcaacagataaatgaattcaggaatccatctcaagtgaagtaacgtatacaggtatgttatttgaagaagtaaaaatgcaaataaaacaaaaccttatttgcctcttttccttcaagttcctgctggctgttggtataattcaagagtaatagctatcaaaatggatgttcatattaagtaatccttagagaaatgtcataggcaaattaaaaataagttttgccttggattaataaaaagaagagctcataaatgagttttaaagctatctcctgcccaccacctcccctcccccgccagctcttctgagtatgtatagtatactactaggtgaaaatgaattaaatggatttattttcttttggaacattaaagtctagaagtactagggtgggcaggaagtttaatagcatgaaacaaggtaaattagtaaagaataatataagcagatgtaattggatctttaggaggaaattatgacctataatgttacagcagttttctgtagtacattttcaaccataatgtggaaaattagaaaataaatgttattttcaacataaaaattaatcacttggaggatacatctggttctgccaagatagaggacccctattcctccttgatctcccttacagcgaaaacactgtagacataacaaacaagcacaggaacactctaaaggtggaaaaagaaggcaaacagcctgcagacctcgagactcaagaaaacccagggaattcactatttgtgttcttcctgtcacctcccatatatcctagacagggtgctatgaaagcctccaaactagaactgccaacagtcacagacaaaaagagctctgagaaaaagcctgtttcctttagacaaacaactgggggaaaggtagccaagtaagtctaaacctttttgacaatactcaccctaccctggccaaataccatcagaaaaaccccaccccaccccaccccaaagaagcaaataacagtgctctcactccccaacccagtggtgtgggctggggagatcagagacctaagcacccatttctttgcccagcaaaagcagacagcactttggttccccctgctgggtggttttggcagaccaggcaggaagcgttttccctcattccacttcaagctgaaggaagttatgctcttgccagggtggtgtctagcagcagtggggtctagtagcagattgagcctccaccccaacccagaagcaatgacacttaacaaggtgacgtg

SEQ ID NO: 136519 - DNA, 2505 bp, Homo sapiens
gtttagtacagtagctgctatctatatgtggctgttgagcacttgaaatgtggctagtgtggaagtgaacttttaaattttatctaatagtcaccagtggctattggctaccatgttgaacagtacaattccagattacaggattagtacaaattgaatgcattttttacaccagtgttttttcatttctaccttgtatgatttgtatcttgaaattaataggctaaaccttttctaaaaacaaatatttaacatgctttttcaaattatgtttaatcaggttagttttgtccttttctaccctgaagattctgataaaccctctagggtggtacataccccacaaatcaccattctactcttcctacagctttaatagttttactgtgacatctcattcaagtgataacactaaagcattggggcaaatttaaatatcaaaaaatgttgtaattacaagtttcctcttgtgcaccgagcttacagaccgagacataaacagtaagactaatgtctctggggagaaaaatatacaattatcttctatattattggataaataaattactgtatggtaatttgtttaaatattgtgttgcattcactgtactgtgctagttaaaacggaaaaagtggattggtgcattttgaaatatgaaagcatttaaatttttttagcatataattttagagaacaacttagccctaccctatttatgtaagaaaattgagacctgttcaggcagacctgctgcaggtgatatgttaacaaagtcagagttggcgtgtgcagcacatttatttcactaaaattcattttgtcatccacatcatatcaatacaactctttaattttatgtaaactatcttaaatacaaattctgaaagagccacaatgcacaaaagttcaaatattactttttctctactctctgctaattttaactcgtaagtctggaaaatacagtccttagtttacaaaaacaacttcagaatgttcctacctacaaaccaagggtgaggggtacgttaagatcactgctctttctttcccaagtgaagatggaaggaagctcacgtctattgagtgccccccttgacaagtcactttgtgtatatcaacttgaatgaagtatacagaattatcctcaacttacagatgaggaaactgaagcctagaagggttaaataacgtgctcatggttgcccagctagtaactgaaggagccagaattcaaacccaagtctcacagattgcaaattctaatgacttttcactacacagccctgtttgagttgagaacatccaggtgagtgactcagtctaaatgaaatctgctacaggggaaaaaggttccaggtagtttacatgggtagctattgtggagatgtagagaataacctagagagataggtgacttctcacatatataaatatatgtatgtatgtagcatgaagccctcttctcaccaaggaggcctgtagagatgatgtgatcctggcatgaactaggaatgctgttcacaatagagacagtgcttaagtagtcaataagtaaagtttaaaaagttagtaaaactgagtgaagttgatgttagtttccaaatacagtgggttaaataggcttttgtgagttggcctgaaaaacagcatttatggcattgtatgggaagattatttgagatttctaaccagctgtcttacaaataaaacaaaatgtctaacgtttgaaacaaaaattacagtacttggaaaaaggggggcctgcctagacattacttaacagctctctttacagaagcctctaggtgtatgcatgagtaaatgtgctctgttctttgattgcagcttattaaatcgttacctctctatctttgcatcctcttttcagaaaaatctacttgatgttccctcaaagtgccagaaaacagaatttggctcaacccaaaaatgttaacaattatcttgctatcgtataagaaaaggaaatttaaaaggaaagttatgcaatcatttttttttttcttagactgtcaggtcaaatagccctaattaattccttttttttttctttttttttttttttttttttttttttgagacggtgtctcactctgtcacccagagctttttgctctaatgctgatatggaaggtccttgtatatgtatttcttctctgtcacccaggctggagttcagtggctcaatcttggctcactgcaacctctgcctcctgggttcaagttattctcctgcctcagcctcccgagtagctggaactacaggtgcccaccaccacgcctggctaatttttgtatttttggtagaaatggggtttctccatgttggccaggctggtctcaaactcctgacctcagggtgatccatctgcctttgcctcccaaagtgatgagattacaggcatgagccactgcatccggcctaattccttttttttttttttttttttttttttttttgagacgaaattttgctctattgc

SEQ ID NO: 136520 - DNA, 2663 bp, Homo sapiens
agaacatgcagtatttgtctttttgtcatgtgacctattttaagcaaatacattagttactagtaattaagtaatttggtttttgctcattcttaaaacttagaagggactttgtggggttatttggattaatagcaaagtgttaaagaacataagctctggagccataaagacctgtgtttgagtcctggctctgccacttaataactttgtaaccctatgcaagttatatttaatatctctatacttcaacatcctaatttgtaaaatagggatgaaaataatgtctacctcatagagttttggtgagaattaaatgaaatgataatatatgtaaagtacttggttcagtacatggtttaagtttttaataaacaatagttacaatgaatcatccctcttaaagaactgtctcagttctttgtttttcctctggggtaattttttagaatccagcaaagcaattaaaagtgatttatttgattgatcagtttaaatagtcatggtaatatctgaacgtaattgaaagggcaaggggaacagaaatctctttaatcttaccctttttgcattgatcccttcctcagtattgtctttaaagggaaaaaacaacattgtgaagaatatatgtggaagaaggaagaaaggaaagtttgttcacatttttaacattgctcaaattggaagatgtctcacagtccatgggatgtcatagtttaattagcagcatgtttttccttaacaatatataaaataatagtgtatcttacacttgattgtatcttttaatcaatgaaatatagtgtattctgtatgtctacctcttgaagataatgtgtccctgaagaaatggttaaagtcagtttatagcatcaataggtagaattttaactttctttctaaaacataccaacacaaaatgtgcacacctttttatattttaggatgaatccgttctgttaatttttagggaaggaaattaatatgtcacacctccttccccattactataaatacatttgttttagttatttcgaaatgccatagggtaactgggttttcctgtctagaaatgtaatcctttagattttgtctgtaatgtggtgttggttcttacagaactctaaatagtatatatagtatttttcaagccgaaaagtctctggagatatgatgttaaaaggtgtatccatgcctcaagaatcacccccctccaaaaaataaggtagtgtggcataatcaagtaagttggggaaatgtggcattaaataagatttaacctgtctttactgtataatttagaacttttaagatgttgtatacaatgaatctgcaaaatggatatggcccacggcatttgagacttgatgtcagaaccccttttttgtaaaccatctattgaagtctcagtggacacaaagtgctttgcagaacacagttttggaaagtctgataactacagtaacgcgatccagtattgcctggaaatgagctgttatgtttaattgactatattgaagtgttttctttaactgtcaagagttttgtttcattttgaattgaaatctttctaaattaaattgtataaaaatgttccgtcttaatagtgaatataaatttaataataatttaaataaaagttaaaaataatttacacttttgattcactgttctgaaaattaatggtcatattctacttaatatcaagctaattgcccctactaaatggcctgtaccttgactgtttctgtaacttatgtctaatatttgtagtttaaaaattctcttatatgccactttatgccactgttaatctgcttttctctcccattttcctgtttaaattaattgcttcttgttttcacttactagagaatagatagctaggattagtaatataaaaaagttacagtttccaaataatgtaaaatagcatcctcactctttttctggtctctgctcatcatgtacaaatacctctggggtcaggggtatttgctgggcatattaccaaataataaatagtgattttatgttttacataccataacagaatggctcaattgctgacattacctgccctgcatatttaccttcctctcttgaagatgtcagctagaaagtagaacatgaatgaactaaaaaacaggcagctttaaattgaaagctagcctactgccctgcctggagtcacatctccacattgtgagtccttttctgttgttctcataaagtagtgctagtttcctaaatatttgttactctacacgtaggtgtaaatctaaaagcacttttagatttcttgtcatagtagaattacaaccataagttaaatcgaattttcccatcttaactaatatatccatggtctcttatataacttaaaaacttgttttgtccaccatataaattgatttttataatcttacatatggtgataatctcatcttcaaatctgacctggtcatttagatttctgtgagcttgtctctaattctttgggccacaaagcttgtcctaggaaacttggttcagtcatttgatatgtgttagaagcagatgtcaaatgatagcctgaagcaaaagatcattttgacattaatagattgaaatgcatctcaagtgcagtggtttgggataaatcttcactccagaaatcttgt

SEQ ID NO: 136521 - DNA, 2225 bp, Homo sapiens
attttccagaaacaaatagagtattataagaggtctcatttggtaaagccttgttatttcagttactatcatgttttccagaacttgacagataggattccacaatttgctgttttcaaagaattttcttgctatcctggcataaagtatgtcaaacagagccagtgttgccaagatttattaaaattaaattctaacaaattgcctttagatatttaatttcctttgcttgttcagctatttcaagtaaattacttctgatacaatttggaaatattgaagacagtgagggaaaggttgaaaagttccactcagaggtctaatattttcactattataccgtttcctcccccagtaggttcctatcagataattgtattttaccagagtaacatagttttttttagagtcatttacttgagtgaatacatcaaaatatttctctccaggttaaaagatttcaggattggtctgtgtaggagtttacatttatggtctcatccctagtacactgtgaattcttgaaagcagacatttttccccccctctctgaatcctcagcattcagcacaatgcctggccctgacatattgtggacttaataaatatctgctgaatgaatcatgaaagtcaggaataggatgattatgaatcttatctgttttttatcattttaatctcattaaaatatgaacaatttaaaaagacctcagtgcctcagtaaaaacacaggcagtttcttcagttcctttacactggccttcctgctttaagacctcacacgaatctcatggtgttcaaaacaaaaaaacccttgtggttaaactcaaacgtgggtcagaacatgataggctagaactaggccaaatgtttaaagaagcaaatttaggataataaaggaagtactatgtaagcaaagtaagggttggtacaagataaaaaacaaactagcttcctaactggtctaggtgaactctttagtgagttacttaaagatgctaatatgcttttgaatatttgactgtttagaggatggataggtaggaattatggctcttctgttgtacaaattctttgccagtgctgtcagagacagcatttagtggatcataagcctgacctagagtgatacttttttctccactgcaatagagtaggtataaatgatagtaaatctaaatatgaagttttcaaaatgataaaattatggaggttatttttgttttatagaaatgtgttatataaaatagccacaatataatgtgttgtatacaatgtgtattaaacaatgtgttgtatgaaaatagctacctcgacttcctttaaataacaggtacccatgatgcactgaaaaatatttaaaaaatcaactatataagtattttattatagaaaatgaggcctttgtgtgggagatcatgtttagtgaatgtgcagccatttttaacctcaaagattatgtagtattctatagtatagtacatagattttatagtatttctactatatcaatattatataggtttcttattttatctatagggaaaatgctctattaaagtataatcattgattttgaaaaaaaatgttttattgtttcttttccttttcctgttttatttttaccacctttcaggtttttttctttcccctaagtgaagatctgaggagaggacaggtattgttacatgtcaactgtcaagtaactgtgacccattactgaacacttcattgttttcagtgattatgatagaggatgtcagttttgtaaaatctagaaaactttgctttattttggcagcttgatcctgtagtaatggggtagattcaaaatgtgaaacttgctggatgcatttaaattttattaataaaacttttatctaattgcaggagcaaatataggcagactttgtcttctctttagtatacatttctggaaaccacaataagtatatcttatttttaataagacaggtggcataattggactgtgtactcctgaccaaggacttgacatttgctaaattatagaatgaccaaaaatacagatcacttatctagaagtctgagttgcagaacaattgtcctaaagtttttaaaaatttttattactaagaaattcataccattgtgataattaacaagatttgctctacagttcaatgctcagggacatgtgatctgccaggctgtgaatgatgggtaaggtcacacttgcctggttg

SEQ ID NO: 136522 - DNA, 1128 bp, Homo sapiens
ccctttgttcctgggaaagctgacgccccctcggcggccgcccttgccaggtgccttccccagcgccaactctcccaagcaacttttagcccacataatggggtcaggacgcggccgcccccattcggagcctggcatccccccacacccagatttggctgaggatgcccagggtgggggtatgtgctactttgagggtgaggacatcatgcttcccctgggacagcatccttgctgctgtctctgggctgcctccagcgcatcccctcgcatcctttgccttctctgctttctccctttcaagccagtcgaggttttggacctcacggctttttattaagggctcaacgccagatgtaaggtgatgcgcattcaggtaccttcacatttcttccatcttgaaggttcccccttttgtccctggcgatttataataaccacagttatagacactcaccctcctaatcgcaaacgtgagctttttttctgatccctgggctttcctgtctcactacctccctctgttgtctgagttaaggggcttgtagaggactcccccacccaccaaccccttggatcctcaggcccaactcttccctaagattttgggaattgaagaggggatggatgggatggaatggaataaaggatgcgtggccacacttgggaaatgttagcgctttgctcgaggtcatacctgagcaaactctaggtagatcagtcagggaccaaaggcttattatcgctgaaaatgcccgttcctacgatgaaggagccccttcttgggcttacttaacagtcagactttctaagctccagataatttagaacgaaaggtgaggtgattgggagggattgagagtgacagggagaaactgattttttttgctcattcttttccccagcctttttggccgcttgcttattcttgtggatttttctttattttgctttccttttattcccttacttgcccctttattcctcatttactttgcttttcttttctaatatgtggaaactgctttgtaactgctaagcagtacaaatgtgagtgaattgaattaaacctaatacattatttatcgactgcacccctgtgtgcagtgcattgtgctaaggtgccat

SEQ ID NO: 136523 - DNA, 1039 bp, Homo sapiens
tcttaaagcaatgataaattatcatttttatttataacagagcaaccctagattagggctcaatttgttctttttttttttttttttttttgagatagagtcttgctctttcacccaggctggagtgcagtggcacaatctcagctcactgcaacctccgcctcctgggttcaagtgattctcatgcctcaacctctcaagtagctgggattacaggcacccaccaccacccctggctaatttttgtattttttagtagacacgggatttcaccatgttggccaagctggtcttgaactcctgacctcaagtgatccacctgcctcggcctcctaaagtgttgggattacaggcgtgagccactgcacccagcctcaatttgttcttaatgacttttagctttctatgtgtcttccctgcagtacctcacacataagggttattgtgaagaataaagttattagcttctaaaaagagtactaaaagagtggatcatctgtactaattttaaaaaaggttgggggaagggagtataaagtaatttgaaaaaaattgagtctaaaagttttaattgttcatggctttttattgtttagtgtctgattaaaaacagcaagtatagtcttcaatgtggaatcattgtgttgaattacattcggtgagggaattcacagttttcatgtatagcataggcctgtattcctcaaaatggtatatttttgtggttgtggaagccaaatgatcaaaagaagccaaagagttgtgttttttttgttttttgctaagctttttaaaacattatattaaaacaaacatggatattatattcatgatgtagaaagcaaaattggcattatttcaaagatgagaccagagacttaacaggaattttaggcttgcaacaggctgtttaaagctgtattctccagacctcccagggctgagtacactcttttgagcaattacagatgcatcagtggaaaagttggagaagtggtggttgagtttaaaaaaggtaaaattaatgtactctgtttcc

SEQ ID NO: 136524 - DNA, 1033 bp, Homo sapiens
cttagtgatttggggatcccgagatttattttcccctcacaacagtttctcctgtctggtcaagataataagaactctctttttatttactatgttctgtccttggtccatggcctcactttgtgctgggttcagattctttacactaaagaaactgtcatgctaaatttcgctaattgtgctagtgctgtttgcatctgcttctcaagtctgtacttttattgtgtctatcagcccctcaagagagacagcctcatggtaccaatacccatagaaagaacatgggcttgatctgaagacagttgtgggcaatcaccacactgccaatgattgctgtgtgactataaacaagttattttatatccttgagattcactttcctcagatagaaaatgaaatgagctaataaagattactttatatggctgacatgctaagacatgataatgcattaaaaagagttcaatatggctcctatccaaaaaagacacccaataaatgctttttcctcctctgttgctttctcaacccttaaaatactgaaatcctattcatggtatgaattatctcattattcttaattgaattaccttgctgaccatcttacaatgatcagtaactacactggttagtctagctgcatggccatgatggacagttcacatctctttactctctctgacgctcaggtctcaatgctcttagatacaatgaaggtatttactctgaaaagctgctaggcaaagtgccaacaggaagatcattcccctgaaataggaaacccttcagggccagctttgtgggagggtgacttgtgcagttgcacatgggcctacacttggttttatgctctgctgttgctatcctagaattcttaattgtttttgaacaaggggcttggcattttcattttgtactaggtctcacaaattatgtggcccatcctggaatcccattctctgtatttttaaaaatttgtcttaaaaatatacatcagcagccatggagaaaggacagaatggcagtacttaac

SEQ ID NO: 136525 - DNA, 1178 bp, Homo sapiens
tgtacttgaaatggatttgttgaagttaatgtgaattatttatatcaaatggaaaggatcacaatacaaaaagatataattttttgaaatgcatttttgaagcacttacccactagagcctaggagagttgcttgtataaagtttacaaaggttaataccaattatcattttttcataatgctctcagaaacgtgttcttttataataaatatctatatattattttgcatttctgtttgttgtcattagctatgcatagaatgcaaactattttttattaatttttttctttctatgtttatttaactggctcagcaggtaaaaacagtgtattaaatactaataaccgtgtttattgctttaattccttgaaatttttaattaatttttaaatctaatttatggagatgaactttttgtagtgtttccagagacaggaaatgactgataaaatttatgttctttatcgtttcttttatattaaattcagtcacctgcagatcggtgcaagaaaatccatgctggcgatgaagtgattcaagttaatcatcagactgtggtatgtataattaacttaagagtcagtgggaggaactaattttgatttgctaaagctttaaaagaatgccaatgaaatgaaattcctgtttgtatacaaaatattgaacagccttttgaaaaaataactgaatatttattcttcttaattatttgatggaacgtaaagcatttttttaaaagaacctgaagagcattggtggtggttgaggttagatatacatttctgtatggaaaagtactagataatagtatatattccatgaactggaataacaattttggaatagaaattaaagtgacagtatgtataaattcaaccttttcttgatacaactttttgaaagtttcattttataaattattgaattacctagtagatgttttataacagcatacatccatttatctaacattgatttgttcattaaagtatctggtggttttggggggagtattttaaatgtagatctttgaaaattttaaaatttttaatagctgaattagctttttatttcctaaaagaggacaacagttttcattttaaaaaatgttcttgccctatgaacctcacaaatccctttgttatctacccttaaaaatctacagtaggcacaga

SEQ ID NO: 136526 - DNA, 1670 bp, Homo sapiens
tgtaacaactggagaatgttgattgcatttgatttcatatacatagagatatgaatggttaaagtcattctggaaaaatcaaaatacataagtaacaataaaatttaatattcaagttgcaggtcgttgtgactgaaaaaaaaacattagtgacaaaaaaatttatctgtttctgagagttttgttttaaggagagcaagaactagtattaggcatggcactagagaagaaaatcaatttttaactaaaaatgtaattgggctgactgggagccagaagcaattgtatgttttacatactcaaatgagtaaatacatgcaagtaattgtcaaattttagctcaccagtctttaagcaaatcagtcaaaggatctaagtcacatttgtatttttgagccacatgctttcaagattttaatagtggctacagataatcacctataatgtaaaaattgtccattctttctttagttaacatccccaaaatgatgtttactgtaatttgagaaaatggaagtccagttttaatgttgcagtttaattatgcccataagactggacaatgcaggattaaagacactagtgttagcctcaatacaatgtgcagtatttcatgatttgatggaaaaagccattttatagtgtgactcttaagtctttattagttatatgctttataagtaatacatgttttaggcatatatatctgtatttttaagcctaggtagatatggttttctgatcaaatctgtggtcagaaaaaaacacttgttttctctgtattctgacaggaaaggaaaaattatatgcttataaaaggatactcaaaccttttgtatttataaatttgcattctagaaaaagctgtgaaagaactgagagtgggagaattttgaatatatgtatttcccttgcttcagttcttttcaaataattgactacttatgaaaagcttggccagaaaaaagtattcccaataattttccaaattagatctaaccttctttacatggtcaagaaactaaaaattatatgtgaattcttgctgcttaaaattcaggatacattttctctgaagcatttgcttagattattaagagagtcaatataaaacaatgttcttgtactagtgttgggaattaaaaatgtgtttgaactgagtaaggacttatgtgaatgttctgtgctagaatgatggggtattgtgatccatttgagtctgtgtttatccccaagagtgaataaaataaatggccaggttttatacttgatgtaattatttgtatttcagtgggtatttcccccctggaaggcaaagcaagttctgtgtgatcttggcattagtgaattttagagctaactacataaatgtgtaatgcactgttttaatctttaacgctggagttgtctttatgtcattggtttcattcaagctgtatcaaagctgggtcacgtactagaaagagggacaactaaattaagatatgcttgcccagagatgttaaaatgtaaaatgttttggggaaaacctcaacatcaaatgtagtttcttaagtatagaagttcttttctcatggtctttaagactatagagatttcacagatacaccaataccttctatatgtgctcagttaccttagagatgttaaaattggggcgcacaaagaaa

SEQ ID NO: 136527 - DNA, 1053 bp, Homo sapiens
ctgtagatggtaaaagtaaagaagagaagtcctcaaaatagaaatagtgactccaggcgagaggaaagacaataaaaatttaagtttgattatgtttaaatgcttatgtttttagaacttgattttaagttcatttacagtgttaggatattttaaagtcagaaagctattagagcatttaaaaagcatactgaatattagtttttctctcacagtgtatctgtttcaaagaattggagaataatattctgttaagtgaatgttttctttgctacatttctattatggtgaacttttggtcagatttattgtttagcatcgtctgtatttaaaaccaagatgtcctgacagagaggaaaacagttataaacagagtcacatcacagtgactgtgtgtatgtattgttgaatctgccattcaaggatttgttgtagaggcatgaaatgcatccttagaaataaaatagttatttatttccttgggatttatggtattcatcagtacaggtgactcctatgattacctgtataatctcaggatttcccattgcctcaagttttgtttctaaaagacaggaatagttgaactggaccctattccaaaattagcatagtaaaacataatctttactgtgtaattttataatagcttacaattcttcaattaacatgtaaaacttctgacctttttaaaaatatcgtataaggtggaatattgtaaactcccaaattacattatcattccttttccctttctctctctctttctttaatttctacttcactacattagaatttaactgtcattttggtaggatgtatgatttcaagctattaaggtgagctgtataacagggaaggtcaaaaccgtgaactgagtcctaaattatgtagcctaccccagtgacttacattgtactttccattgtatttatgcttggctttttaagcgaattttgtttatctgtacaaaagtattgtcacaatacaaaatagttgtaatatgccactttttgagtgtctagcaatgcatattaaaacaatagaactgtg

SEQ ID NO: 136528 - DNA, 2061 bp, Homo sapiens
aggaaataagtttaatgtctagttccaaacgtttttctcagtttgccaagaaattaaaaataggaagtatcaggtggccaaaagaaataatggaagaaaacatgaaaatatagtctgtcatatgctttaagggtgaagaattatgtcatcaaccaaacctctttcttatcatttacgttttatcttaccttatatcacaatatatgttatatagtgcttatgagcttacagagcaatctaagaagcaagatatacctaaatccatgccttagctgtttttcattttccttatgggtatggaatttggccctgcttataaagtatatatttagccttccttagaacagacttcaatctgtgttctcgtagttgaactaccttttgccttattttgaaattcaattatttaactgagtcatactgtgattttcttaggctgaactcattttagtctgaaatggatggtactaaaagtacacaaatgagacctgtcttgttttcctttgactgaaaagtcagcttgcatattaattgtcttgacctgcttcactgacatttgagaaaagacaagtaatttcctgttatcccaattagcagtttcaaaccttacctggtatggacattataagacatcagctaaattaacttacaaattatgtcattctatgcacctttaaaggaatataaattatgaaagtatgggacaaaatatgaagatatatttcattcagaaataatctgccataacattaaaatactattttggttaatacagcttgaagtcagcttagaaaatctcgctttcctttgccgtatgtactagccaattcagatgaggttttgaaaaccattatcccttaatcctgctgattttcccctaagcaattataagggaactctcctggactcttgatgccttcatttactcggtgaagtcatgatgtcctttatcattgtcttgaagattacctaccagtattctcacttaatttacacgtatatgtagcttgggcttagaaatctaaagcaaaacctaggtcttttaagggggaataaaatctattaccttggagccactgtacacattagattatcaggctgaaatattattgacactttcaaaatgagatctgctgagaaatatattttaaggttatttttaaaaatctagactgagttttgtggctcacgcctgtaatcccagcactttgggaggccaaggcggaggatcacttgaggtcaggaatttgaaaccagcctggccaacatggcaaaaccctgtctctacgaaaaatacaaaaattagccaggcgtggtggcacatacctgtaatcccagctactaggtggctgagacgggagaattgcttgaacccgggaggtggaggttgcagtgagccaagatcatgccactgcactccagcctggatgacagagcaagactctgtctccaaaaaaaaaaaaaagaaagaaagaaaaaaaattagccggtcttataacctgctctataaataaacaaaataaataaataaataagtaaaaaatctaacattctttgtacactattaataacttaggagctgtgtagaatatgccactcagtagcctaaaatcttaaattattagggcataggggctagattatgagtacaaatacagagcagaagatacattaattcttgtcaatcattttaagggtcctatcttcatttcctgaagattttctaaaggtcatgaattctatttttaagaacattaaagtaggagatatgtagacaaggagaaggtattcccagaatatgaaattgtattgaaggaagaaaaggaacaagttgaaaataaaaatgttgcaacacttctcacttttttattatcaagataaattatatacacacacaaataattttaaagagcataatcatcattaatatcttaagttatagttcatgtctaaagggagtagatggagaaggatatacacagtgtgaagaaaaagacatgataaagtcaaagaaaaaatggcagagaaccttaactatatcacttttgtaaagttgagcac

SEQ ID NO: 136529 - DNA, 1024 bp, Homo sapiens
agatctcagatcccaccacaggcaactcacaacatcctcagtcccagccctcttccatattctggtctgtgaggccagaccaacttcttaaccaccttactgttttctttgcctcccaactctggctggcccagaggtgtatgccttacttcctgcagaacattttctacacttccctaagctttacttgggtcaggactgagctgctcagactttcttaacccctacttctccatcccaccttccacctgggaaattctcatcttccccaggtgatagttttaacttggtgagttataccaaaatgaagctcagtcttcagctgagacccagcttccaacatggaagggagagccattctccattacaggcccccagtgctacagaaagggagccataacattcacacagcaagaattatgtatttgtggtaacaggggggccatgctcagtctcattcaagtatgagaagcttaccataaagcaggagaaatagaacacatgcaaaagtaactcaagaaatagaatatgacaaatgtactcagtggcactgatggagtagtaaaggggcataaatgagggagaaaacttttctgagtgtttaagcacagcttgaagaaatgagaggcttttgaactggatcttaaagaacgaaaaaggtttccatagcagagatgggcaaaaggacaggcaaagagaaaaagcaaaccacacagtgggcaaaaggaggcgttcctcgggtgtagaaaaaagtacactaggacgtgagtctaaagagctgggtgggtgtgagtatccaaagccatctcctatgggcttcttaaatgttttgcctattaactttttattttaaacttgaataaaactttgtccctgtcttaattgttgaatcctttttcttttcaggccagagaaggggaagtagccattatcgataaagtcctagacaatccagacttgacatctaaagaattccaacaatggaagcagatgtacctcgaccttttcttggatatctgtcaaa

SEQ ID NO: 136530 - DNA, 1072 bp, Homo sapiens
tatgttcacttaaaaatatatgtacctgatggatgtgtcatgtttacagtggccaggttgtggcctgtaaacagcaagcagttgacgggaagactagctctgttgctactaagcagcttttacttttgtaaagtcagctctgttgttttaaatggtaaaaattaaactaatgaatttgacaagactcgtggctagcctagcatgaaagagaccttttaacactatataatatctgtacattttattgcattcgtttcaaatctaggagagaggcagcactgtaaactgaagtcaaataaattcagctcttaatgaatccttataaagcacctactttattcatgcaaagtccttaccacatttctttgtgacctaattatacagccaccaccccccaccctagtttcgagttctaactttgctgcctcattggtgatacaagccaaaagcagcacctgttcagtatatacaagtgtcttatctaagaccctgaaaaatcaagctcgtttcccatttacctgagacgaagtttaaaactttacctattcctctttcctttctctgtgattcttttgggggaagtgggggtaaccaccaaaaattgatttttttttacaaatataatctacagtatgtctgcagaatgaacatttaaaagagtatgaaagaaatcagtttttgttttgttttggttagacattccacttaaccagaggatcctgattattatggctaagggttgatgaaatgtgacttaaaaccagtgagctgtctaaagtcagggcaaaagcagcctagggtgacaccggtgacagaaaaatttaaggatactttctagattaaaaaaaagtgcttagagattttttttttccttctcagttccatatttatatcaaaccatcagagcagaactgtaaccatggctccggatcataaaatcatagttctccttacaatgatttcatggtatttaaccaaggcactctcctttcactatttattcagataatgccatctcctaggacttaattacagcctttatagccaacaattttctgagttttgtataaac

SEQ ID NO: 136531 - DNA, 1064 bp, Homo sapiens
acccaggcccccgacggccaggagcctctcgcccaccgcgccgcaccagaagtgggcccgcgcttcccgcatggcgggcacttccgtccaagcgtggaagcgcgggtcgtaacggtgcacttgggccgtgaccacccgcgagtcgtcggccaggggagaggatgcactgccggaagggctctccccacccaggacaaacaggaagttgcccgcggtgcacacgctgtgccccagcagtggtgtgggtagctgcgtaaggctgcgccagcggtgattgtacacatcgaaggccaccacgttctgggtgagctcccactcctcctcctcctcctcttcctccaactcttcctcttcttcctcgggctctggggcggcgacctggcccctagctgccctctgcggggccgcgacctcctcaatcaccacctcccgtgccctgcgcccccccaccaacaagatgcgggtctgggggctccggatgctggtctgctcgccctgcatgagcggctggcgggagggcgtcgtgtggtagttgagggcctggatgatgaggcccttgacccgggcgggcagcacgaggccagagcccgagtacacgcgccgcagtacgtcggcgggaaccaggccaaagcggacacgctccagcaactctgtacagtgtgccaggcgctcagttgtgggctcctgccgcaaccaagctaacgccaggcccagtagccgggcctcgggcacccgcgccacgtcgggggcacccagtacagccctcagcgatgtagggttgagctccaggagtcccgcggggcccgcgccccgcgccagcagctcctgcaagtggctcacgatgcagcgctcggccgcgtccagcgtgtgagccaggccaaagcgcgctgccacgttggcggcgaagcagcagttctctggagccagctggcgctccaagtagcgcccacagagccccagggcctcagtgacctgcaggtagctggcggcctccagagtgtcctctacagtgtccatggaaagcgacagccaggcagtgtagatgaagtccagcaggcgctgca

SEQ ID NO: 136532 - DNA, 1061 bp, Homo sapiens
tatcagcacctgcttattaatgtggaattgtaactccagctctcattttgtccctaaacaatttcccttacaattcgaactatgcatttaaaaggatatttcccttattttatccagtacttctcggcgttctgtagcagaagggttttcagattattcagtctgccatgtggcccaaagtagaagacctattgaagtctaggaagtatgtaaacataaatatgaccacacttcagccttagaattccaggcttgcatctagtaattctaatgtgcatctgtgcttaagactcaatgcgagagaaaataataagcttggatcattatatcattcgaggagactgttcatattttgctggaaaataatcttagactatttttcaaaagaatgaaacctttcttggcatctacaaagataaaatgcttttgctacaagtgattgccttttggtagttagttccttttatagctaattgtatgcagaagattttgttgaaattatgtattattatatagtggacaatttcattttctgaaagggtaagaaaaaaatagatgtttacatcatgtttcctgcatggaaaatttctttggccaaaattttgctgagctctgaaaacattttaaaacttttattatcatttgctttggcctgtcaatatgctgtaagccagtatcacagcatttgaactttggcagttttttagctgaatgaataataattcagcaatttttaattgtgtcactgataactaaacaagtagatgaaaaattttaagtaccaaatacagccgctgtctcgtttgcaattcttactaaaacccattgtcttatccattttgtgttgctataaaggaatgcctgaggctgagtaatttataaggaaaagagatttattgggctcacaatgttgcacgctgtacaagaagtatggcattgacatctgcttctagtaaaaacctcaggaagcttccactcatggtggaaggtgaagggggagcagatgtgtcacatggcaagagagaaagcaacagagagacaggaggggtacccacactctt

SEQ ID NO: 136533 - DNA, 1141 bp, Homo sapiens
tctccattttgattagggtacacgtatatatatatatatatatatttatcaaaactcacagaaatggacaattgagctctgtatgtatgatttcattacatgtaaatttacacttcagtaaaaaggataaacaattaaatctggatatctatgacagggtcggggagggagagattattacttcagacgaccccaaatcctcatgggttaaaagaaacagcaaacccctgaccagaactggcgagaatggagagtagacagcagggagggccaaagcctaagaaatcgctacaagactagatgccgagttcgaactactgcctggacggcagcgcccgagcgcccgcaaaaataagcccccgtgccatttccggtactagcaaatcctcctgtatgtccccactggaagagtccggtgggaaaccgtgccaccgcaaggaaggagccggcggtagcttggttcctgagcggatgctggggctgtaaggcgcgcgcggtcagctgttggcggtgcagggaggaggacgccggggctcgccttccctcctctgccgccgctgccgccatgattccggtgtcgctggtggtggtggtggtgggtggctggactgtcgtctacctgaccgacttggtgctgaaggtgagggccttgggcctaaggtccaagcccgcggtgcccatggccggagcgcaaggccttcttttctcttcccctgcctggcgcctcccgggctggacggtgcccacgtgcgacagtccgcgtggtggatcggcccggtggagtaaataaaacattgccggccgcgggagggttgtggcggcctgcgcggctgccactgtcgcagtgcggggcagtgcaggcccttcagccttcgggtcctgcccgggaggcgccagtggtgggatcgggagggccggggccctgccagacccagcagctgcagtgcagcagggaggaaaagaaaacgtctgcttagtaaagacagtgctttcccttattgtttttaagttcaaaacgctctagagactcagatattggaatgaatctaaatcaagtcgtgattgaaatcagtagtctcaaatttttaaatgcatatgatcatctggtttgcggtcaaaatgcagattccgattcagcagg

SEQ ID NO: 136534 - DNA, 2466 bp, Homo sapiens
catgttgcatatgtgaaaaaaatctaaaataaaaagaacttttacagtccctagtcacaagtgtgtgaggtgaccaagatgtcactggtttcagtaacaacccctagctccttaagaatgcaccaacctctgagcaaaagacctaacgcctactcagagtatctgcctgggaaatggagagacctcaacttttaggagcctgcacctttagtttctctgcctccagcttggtctgctgatccaccctgggcttttctaggatttctgcatagacatctgttagagaagttgtgtcactccttttccaagtcttggaaaacaagtacacttaaaatttaactacctgaagactgagagcagataatactacagatccaaagcaaacagctacctatattcagactatggtcattttttaagactatgatagggctaagatttccttcttggacagataagtttctcacatgggtgggcatgaatatgacaatacttactgtacttactgtgtcaggtatataacacagccttatgtcatccaaaatcctatattagtcaaggacttcaaacttccctaaaggtaaaactcttgttggggctgtgtataagcccctatccccacaaccccagagaatttaagggacattattgagcccaagatggctttagataagttttttactttttacatgatcgaggttggcctaacttcttagagttgttgctcagaagaagaaagcaaacactgatcgcaactgtcccttctcttggattggtagggtttttttttttttaaattataacacaaggcttctggaccagtgctgtccaatatggcagctattagccacatgtggttattgagcctttagtcagagctagtccaaactgagatgtgctgtaagtataaagttgatgttgaaattcaacgaagtaatgccccccccaaaagtaaagtatctcaccaatagtgtatgttgattacatgttgaaatatcttggatattttggggcataagtatacgaaaattaatatttaaaatttggctgttagaaaatttaaagttatatatgtggcttacatttgtggctcacattatatttctattggacaacactgttctaagcaggggtcagcgaactttttgtaaagtgcttggtagtaagtattttaggctttttgggccacagagggtctctgtcgcatatttttggtttttattgtctttttataatcccttaaaaatgtgaaaactattcttagctcacaagttgtgtgaaaacagtctgtagttcggatttggcctgtggcccatagtttaccagaccctaatctcagtagaccggttaggtctgtgacctttaatattctgaagaataaacataaagctttaagattataaacatttgggaagtcagcatcttaatttcctctagaaaatactttgtgttattttcttacacattataaattgttcttcaaaattgagtgatgtagaacttttctttctctcttagtcatctgtctattttaaacattcttatgaagactggctggaaaacaacggactgagcatctcccctttccacataagatggcaaactgctgttttcaatcgtgccttttacagttggggacggcggaaagcaaggatgctttaccaatggtattcttcatcttcttttgtttggtttaggttaatcattaagtgatcacgacagacagcttgttaaattaactatttccattactttgcagttttctgagttttaaaatattgacaatattaaaactttctggttttatataaccttatgggattgtatcattgtggcttgcatacattaaaaatcaaggcatttatggcaatttatagttaggggctttacaatgatctctgggacacccaagatacaggcaggttctgtagatgagagaatgtgagggtcaggggtggcatggtctagatttctttttgttaaaaatttagccccaaatggattagagctaaatgtaaacaatcagatcatcagagttagcagaaaatgcaatagcagatcaaagcatacaaagtggaaagaaggatataataaagataagaacagaaatcagtgaaatagaaaatatacaatagagaaaatcagcaaagccaaaagttggttctttgaaaatattaattgggccgggcgcagtggttcacacctgtaatcccagcactttgggaggctgaggcaggtggattgcttgaggccaggagttcgagaccagcctggccaacatggtgaaaccctgtctctactaaaaatacaaaaattagccgggcatggtggcgcacgtggtcccagctactcgggaggctaaggcacaagaatccttgaacttgggaggcagaggttgcagagagccaagatcacaccactgcactgcagcctgtgtgacacagcaagaccctatctcaaataaat

SEQ ID NO: 136535 - DNA, 1143 bp, Homo sapiens
gaaaaaagaaattattattaaattataccatgttaatatttaagctcattttatcacaaagtaaagctgaaatacgatgcagacaatagaagaggtagatgaaaaaggatggatgtctataacgtcaaaagggctttcataacgatataaggacaagatcaaaacaatattatgtaaatgagcaagtgcatgagaggaaacaaacttttttattgggaatgatattcagattctttagttatcagagaattataaattataaaactgcttaaactagtgctcatgctgcagtcaaatatttgaagttcatgtaggaaaaagaagcagagttactgaaattttttagccattattttaaagctatgaaatgtggctgcttagtgaatttgctagtccatgaattgagagaaattgtaaattaacatgatttttttcccttttgacaggttcaattttggaatggtgtttggcgtaattgccatgtttagctcattttttctccttggaaaaacgctgatgcagactttggcacaaatgatggctgactctccctcttcttattcttcctcctcttcttcctcttcctcctcttcttcctcttcctcttcttcatcttcttcctcttcctcgcttcacaatgaacaggtgttacaagttgtggtaagtatcgtcttttcgctttaaataactatcgaaatagagatgcaagataccacttatgatctagtgtaactcctatccataatataaatatgaaaataaattaaaagtctcataattttcaaattacctgcttacacaaaaaaattaataagaatacagcaaggaattgttgaaatatttggtagtagttgtaatattaatggtaaaagagaacaaatgaaccatcattaagactgtcagcaattaaacagatacgtgactgtctttttaagatattaaatgattgttattttcaaagaataggcatgctgatttaagatctctataatgtataagtaaattgcattctaattatatgcaaagtgtttccctttccttttcatggccttcagagcctaaccaataatatccttttaattaaagatataagacctttctgaatggtcactgtgatttcttaatgtgaagaataatgtgctg

SEQ ID NO: 136536 - DNA, 1316 bp, Homo sapiens
gagtgaagatgtggagatcatttaagagcagtaatttattttagaagtgataaagatataaaattagtggcaaggagaatgaaggggatggattcaagtaagcttttggagtggaattctcagacattggtgattaattaaatgtgaggctggagggagaaggaaaagtttaggatgactctcaggttacacaattggttcttgttcaacaagaaagagggtaagagagaaagaagccagttggagaaaatatgatcactggcttatctgcctgctagaattagaatggcaaaacgttgtttagagaagaaattatttcttctctttgccactcagtttattcatagtactcacaaaaatgtcagctctattaggagatccgtgctttggaaccattaagaagtcagctgccctctggagcccaccatgcatattcatgtataagtttaagaatgttatgaatcctgactttgacatgagctcttgtagcttaagtaacatactttctgtttactctataattcctgacagccttgttcagtattaattctccaaaccatggcactctgtgttgttgaaagtattctgtattcagtattctggtacatctgataccctgtgtgaatcatggcagagacagatgggcaatcgtgtactgttgccagcaaataagacctaccatctgttggtattatcacacattcaaattcttactttatctcactcactagtacatgcagaaaataataaagagaaggaagaaatatcctattggaccaagcttactgatttatttgaaataaaggtaaggtaagcaggatattttgtgatatagagggtatgtatgacagtcttaagtatgtaaatttagagaggggtcagagaaaagtataatactggaaagatgtctgacaacttaggaatggagcaggtatataaaaagggacatagaagttcttgagaaaagttgctcaatagggtccaagtaaagagaatttcagataatgaacattataaacatatccatttcctttgactctttacctccacatctgggactctagcttaaggaaacactttcaaatatagaaaaaatagtattcattaagctctttagcctaacattatttattattatgaagaattaaaagcaaccaaaatatctaattgaggaatggttaaattattggattgtcattcaattagatattatgcacacattaaaaatgattataactagtttcggccgggctcagtggctcacgcctgtagtcccagcactttgggaggccgaggtgggtggatcacctgaggtc

SEQ ID NO: 136537 - DNA, 1021 bp, Homo sapiens
agcactttgggaggccagggtgggtggatcacgaggtcaggagatcgagaccatcctggctaacatggtgaaaccctgtctttactaaaaatacaaaataaataaataaataaaaattagccgggcgtggtggcggacgcatgtagtcccagctactgtggaggctgaagcaggagaatgagatgaacccgggaggcggagcttgcagtgagccgagatcgcgcgactgcactccagcctgggcgacacagcgagactcgtctcaaaaaaatatataaataaaataaaataaaacaacaacaacaacaaaaatgattataactagtttcttaactagagaaaggacacttggaattaatggaatttagaaaatgattcaagcagcattgtttgaatcttcagttactaaaggaagctttttagatgagatttctgtgtccataaaaataaattccagttgaattaaaattaaaacttgaaaccataaaaggccttgaaagaaaagacccatgttatcatttttatgagcacagaatgaggaagacatagagcgaatagtagaaaccatgaatattttttatgtaacagtaacacctttattttttattttttaaatactttattagagcagttttagattcacagcaaaattaagaaggtacggagatttccccccttacaatgatgaaccgacgtgaatatgtcattaccacccatagtttacattagggttcactcttggtgttgtaggaaaccatgaatactaatagatttgactacctaaattttatatatcaaaaactaaaaacaaagtaaaattaaaaggcaaacaaactgtggaatacatttatgtcatgtattacaaaggaccaatgctgatatttgaagtgatcttacggatcagtaagaaaaagttgaatactttaggagaaaacaagtcaggttatcagtaggcaactcgcagaaggaccaaaaaatggtcaaaagtacggggaaagttcagctttacaaatggtcaaag

SEQ ID NO: 136538 - DNA, 1569 bp, Homo sapiens
ctaggaattttaacaaggattcccaaatcaggcatccagcccttgaggttgggtcagctgctgcctgcttcactgtcatcctgcattccttggcactttgctgggctccctcattctttcccaaggtgaagactccaggaagctaacatctcaactgtttaacctggtgtttctcattctctttagactggtggtgtgcttgttccagagaaactggctagttcgaaaaatgaaatagcgtttttgctttttattatgatagaaatggagaagtgaaccattgtcatattacttttagtttgcagaacattcagcttgaaggtttaatacagaatgaacatcatgtatcttagtgcccaagtgggactcccctgcacccccactgataattgctgccatattgtgtctatgaacaggttcctggtataaatttacccgtcaatcaactgacctatttcttcacggcagttctcattagtggtgttgtacatgaaattggacatgggatagcagctattaggtaatgatatttacctttttctttgtactacatgcaaaaaaaagcttttcatttaggaggatttattactaaaatctgctatatttgatacttcactatttttctttctgcggctattgcctagtgcatagccatcatttgttactttgaggaagcttctttttttatagagaagattaatatgttgatgaatatgctccattaaccatgggcatatctgtaatcagggtctttctatcctttgccttttccagtgtggttatcctcatgatgcctcaaagttttttaccaagtcctaaaagccaatctttctgttcatcgagtcagaatgataaccactgtactcaaaacccactcaccttagaacttgatttgacttatcagctgaaataatttcctgcttctgcttatgtcctctgctggctagagcaagaaaactgaaagcactgggtttaacaaatatcatagtctatctagaaacccaagtggaagataagaagacacctgggactagctttgagtatcactccctgttcttggtcttggcttcccaaatgtatcattgtaactatacctaagcatttagaagcctataacacatataaaatcatgatggggagagggccacgtcataactcccctgctacctccactgataattacggccataattagcaagcatgctaataggaatgtgttttatcctttcggtgtgtggaccagagaaaaggttaaaaacctctgttttggcagagaagatgtaatcacttcttattactttccagttgtttatgaacaagagtctatttattggcaataaatcctcatcttgacagagcatatactgttacacagatgtgcacaatagtggcttaaagtggtggctgctgggttttttttttcttttaaaatcgccttcagtgctttgcagcctttaggattttacctatagacacatcgttaataacagcttaacaatttacagtatgtttgtaaaaataacttgggtaatttttttttaagtcccaactgccaagaaaaaaaatgaa

SEQ ID NO: 136539 - DNA, 1030 bp, Homo sapiens
tttaaacatacttatttaacgttagcttgataggaatacacctagataaatctccaccattatttataattgctaagacaaatacaagttattaggtaatttacttgaattatatcgtctcctatgttcttctctgaaaatagttcagagtaaaccataaaaatgtttttcatttagtttctcataaaagccatttctgtatatatgtgactaacttcaattatttgctcaacatattggtttctaaaaattttgaagttatgtctatttcagtatgccctattttgcaaaattcaatttcacagataaccaaatctgtacattattataaaattaagattatatatagtatagatataatttttttggctgttcagagagactttctgttttttaagcaagaattcaaattacagtgaaaagttttaagattatgtacactattaatttgataaatataatagtattagtaaactcctttttcttatgtgatttcttagggaacaagttcgatttaatggctttgggatttttctcttcattatttatcctggagcatttgttgatctgttcaccactcatttgcaacttatatcgccagtccagcagctaaggatattttgtgcaggtaacagacttaattttgttttaatattcatctgtggttttggttttgattttctatggttagtgctttttggaaaatatatcacaaatgacaatatcttatcttttggttaataacttcagtttataagaccccttcaaaagtagaggagtaaaataatttacattccagttgcttccttaaaaccaactaaaaacaacataattttaaaaaatttaaaaacagaggaaaactttgttttgtccacaacatgaaatcacaaactatgaagaatgtcaactcagctgaaatagaatgaaatttgcatcaaatcaagggagaatatgaagaattgactaagagataaatcaaaagtatccaggaatggaaaaaaagggttatgaaaggatgagtagtgaactc

SEQ ID NO: 136540 - DNA, 4550 bp, Homo sapiens
cacaaccatccgccattgatggtgttgcagccgctcttcacgaacacgggctatggcgaccacgaccaggaaatgcttatgttgcagacacaagaggaagtggtgggctattgcgactcagacaaccagctaggcaacgacttggaggaccagttggccctcccggatagcattgaagacgagcacttccagatgaccctggcctctctgtcggcctcggcggcatcaacatcaacatcaacccagagccgcagcaaaaagcccagcaaaaagcccagcggcaagagtgccaccagcactgaggccaacccggcaggcagcagctccagcctgggcacgaggaagtgggagcagaagcaaatgcaggtcaaaacgctggagggtgagttttccgtgactatgtggtcccctaacgataacaatgaccaaggggcagtgggtgaaggccaggctgaaaacccacctgattattccgagtacttgaaagggaagaaacttcctcctggggggttaccaggcattgatctctcagatcctaaacagctggcagaatttactaaagtgaagcccaaaaggtccaaaggagaacctcccaaaacagtcccttgctcttatagcggctgcgaaaagatgttccgggattacgccgccatgagaaaacatctccacatccacgggcccagagtccacgtatgtgcagaatgtggcaaagcttttcttgagagctcaaagctgagacgacaccagctggtccacaccggcgagaagccctttcagtgcacattcgaaggctgcgggaaacgcttttcccttgatttcaatttgcgcacacacttgcgcatccacaccggcgataagcccttcgtgtgccccttcgatgtttgcaacaggaagttcgctcagtcaaccaacctgaaaacccacatattaacgcatgtgaagaccaaaaacaacccgtgaaaaggagaagacccctctcagacttgggaattatcttccaggactgcggtagggaataaatatgcctctcaaagctttgtatgttgtttctaagagttttaaaaaaaaatgaatcctgcacatttaaggttcgtgttttgttagagtagtaaaaatagaatttaaacgtttttaaaaaggtaaaccttgacataagataatagtgctaagatgccatagcttgttctgtaactatttttgtaaagtttggtcccaacaggagaaaaattcgtagacttcacatcaagagacggttcttacaaactgtttaaaatgggacttttcacattcttagaaataggaagttcatttattgtttacaatgtttttaaaaaacttgttaaaaaattcaaagtgttcatgtttatacttttaggaatatgcttaataagtctatgtatggtttttctggaggttgataactttgggaaagatttactttaaaagagtgaacaattatatgcatacgtgaagtattttcctgcttaaaaaagttatataggtgttatttgttttaatcttggttgtagtcttggatgttaacacatcttgcattttagctgtattaggtcatgtagtattgatattaggtgatttaatagtactagtttaaacctattttagtcattttattttccccaaaatactaccagatgctgttgtttagtgtaatttctttgcctgttcagttaaagtagtgcttgcttgtagaatatattgtgtatatgttgactttaacacttaagaagtacatcctgtgtaatagaaaaagcaaaataaaacacctcttctaaagaaggaaaaaagtagtttgcctatatcagtacagaagttagaactaaagaaaagggggagggtgctactggcatctggtgagtggagggagatcaggaatgccactaaacatcctacaatgcacagacagccccacgaaacacataattatttggctaaaatgccaatagtgtcaggtgcaggggctcaggcctgtaatgtcaacactttgggaggccgaggtgggtggatcgtttgagctcaggaattgaacatcagcctgggcaacatggcataactcggtctctaccaaaaataaaaaaattagctgagtgtggggcgcacacctgtggtcctagctactcaggaggctgagatgggaggatcactggagctggggaagtcgaggctgcggtgagccgtgatcgagccactgcactccagcctaggtgacagagtaagaccttgtgtcaaaaaaaaaaaaaaaaaagagaaaaaggggcagaggggctgggcgcagggctcctgcttgtaatcccagcactgtgagaggctgaggtgggtggatcacttaaggtcaggagttcaagaccagcctgtccaacatggtgaaaccatcccccggctacttaaaaatacaaaaattagccatagacttcgtagacttcacatcaagagacagttcttacaaactgtgtttaaaatgggacttttcacattcttagaaataggaagttcatttattgtttacaattttttttttaaattgtaaaaaaattcaaaatgttcatgtttatacttttaggaatatgcttaataagtctatgtatggtttttctggaggttgataactttgggaaagatttactttaaaagagtgaacaattatatgcatacgtgaagtattttcctgcttaaaaaagttatataggtgttatttgttttaatcttggttgtattattagatgttaacacatcttgcattttagctgtattaggtcatgtagtattgatattaggtgatttaatagtactagtttaaacctattttagtcattttattttccccaaaatactaccagatgctgttgtttagtgtaatttctttgcctgttcagttaaagtagtgcttgcttgtagaatatattgtgtatatgttgactttaacacttaagaagtacatcctgtgtaatagaaaaagcaaaataaaacacctcttctaaagaaagaaaaaagtagtttgcctatgtcaatacagaagctagaactaaagaaaaaggggagggtgctactggcatctggtgggtggagggagatcagaaatgccactaaacatcctacaatgcgcagacagccccacgaagcacataattatttggccaaaatgccaatagtgccaggtgcaggggctcatgcctgtaatgtcaacactttggaaggccaaggtgggtggatcgtttgagctcaggagttggacatcagcctgggcaacatggcataactcggtctctaccaaaaataaaaaaattagctgagtgtggggcgcacacctgtggtcctagctactcaggaggctgagatgggaggatcactggagctggggaagtcgaggctgcggtgagccgtgatcgagccactgcactccagcctaggtgacagagtaagaccttgtgtcaaaaaaaaaaaaaaaaagagaaaaaggggcagaggggctgggcgcagggctcctgcctgtaatcccagcactgtgagaggctgaggtgggtggatcacttaaggtcaggagttcaagaccagcctgtccaacatggtgaaaccatcccccggctacttaaaaatacaaaaattagctggggttgctggcatagcacctgtaattccagctacttgggaggctgaggcaggagaatcgcttgaacccaggaggtggaggttgcagtgagctgagagagtgccactgcactccagccggggtaacagagtgagactccgtctcaaaaaaaataaagtaaatgccaatagtgtccctgttaagaaaccctgctgtagaaaaagtaaaagtttataagaaagattccagaggtttgcagtacttataatccaatcattaatgggcaagaggttgttcagatgaaagaaatgtttgtgctccaccaccctcattgccgcttaaccagcatgggtaaatccagaatcagaggggtgatctggtactagctacatgcctgacgagataagagactacacaaatagtcaaggaatcagtgctgctgagtgtcccggcttttactcatttgttcatgtcttgtttctgtgactagcaactgagctggggttggggggaattcatagtagtatcctaaattagtttccccagagtaaattactgtgcatcaaaggattaggttttttaaattttgttttaattttgttaaggaagctatgaaagcagtacaagaaaacacaagtgaatatcttttataatcttgaggtggaaaaggcttagtacaaggaactatttgatcacacaaaaatttaaagtatctgtacaggcaaaacaacaaaccacatcaaacaacaaactggaaagataaaattataatacctgttacaaaggaccaaattcctccctatatagattataaataatagcatatacaaattagtaaattaataagacaactcaatcaaaaaatggcaatggatagaaataagtagctcttaagaaaatgggctttaatttttcacccagaagactggcaaagagtaaaattatg

SEQ ID NO: 136541 - DNA, 1920 bp, Homo sapiens
gaaagaggaaaattacctttgtgagcaattggcttacatatacattgtactgatggtattgcctgcatattggggatatgaaaggatgtgtcttattgttttatgcgttaaggatataggaaaggcaagacagtctgatgatactttcaccaaaaaatttttaattggcagtttgggaaaaaattttatcattttagtcttaacagtcagcaagtcggctttttttcaattgtgaaaaattcaaaatcttggagaatttgggaaaagcaactataattgttgggttttattttaattttctaggactatgtcttgaattcaaagctggattattttctgcattcaaactattcacttaattaactcagtgtctttattatttgctcagattaattatagcttgtcttcatgcattatctgatttggttttaccctcttcccaaggactctcctgccattggacccagaggcctttttgtgggagaccttgtcacccatctacaggattgtcctgttactaatgtgcaagattggaatgaatgtttagataccatcgcctatgagccccaaattggttactgtataagtgcatcaactttacagcagttaagtttcccagttagaggtgtgtatatttcctcaatataatataatgcttcaagcaccagtacctgccattcactaatccttaaaccatgtctatacatttattctgttctaatctgtttaaagcaaatcagtaaagtaaatagattccaaccaatagacatttttcttggtaagttggatgctaatatgtgtttcctttattatatattgttgaacttctaactattttcattatatcatatttaacttttaggactctaatattttctgctttcaaaacacttgtattaaatcatagccgggcgcagtggctcacgcctgtaatcccagcactttgggaggctgaggcgggcggatcacttgaggtcaggagttcatgaccaacctggccaacatagtgaaaccccatctctactaaaaatacaaaaattagcagggcatggtgacgggtgcctgtgatttcagctgctcgggagtctgaggcaggagaatcgcttgaacccgggaggtggaggttgcaatgagccgagatcgggacatggaaagagactctgtctcaaaaaaaaaaaaaaaaatcagcattcaaggtcaatcataaccaattaactaattccaataatcaaataccccaatataatattatctttatgcatgtctgtagatatattatagtactttaaacttttataattgaaaaagggaatataagtaataagaaccggttctactttgcataagcttatgtcagaacagataaacaacgatagttaacaactaaatatataaaaatcaaagcataaacattctgtattaatatattgttagcccaacacagacatgcaataaggaaagattacaagaaataagaaggaacttggcaaacaaaaaaccccatctgggatttagaaaaaattcccttacttcttaaaaattcccttaatacttaaacagttctagtggaatcagtgttggcatgtctgattctatctggggtagagttattttatgtattttatgtggcagccatcctaaagaagttgtcttggcttccaaaaataccatgtgaagtcagatatgttgctctgtgcagcagatgacagagctgaggcaagtttcttctcggatcctgccaaacttatttagagttatttcagctctgaaaaatcagcttcccaattctttatacaaaatcagcttcccaattctttatacaaaattggaggtgttagaaaatagaaattatgctcacagactatatctttaagtaaaaaaatatcctgatacttgtccacatctattggtgtagggaaa

SEQ ID NO: 136542 - DNA, 1757 bp, Homo sapiens
ttgggcatctctggttctctagggggagccccaaagtaagcctggggtagaatcggtatttggatataatggggatgtcttaggcaacctctggccccctctgtttaccagcaccacagtgcaggggttcagcagtaatgttggatcattggcattcaggcacataatagtagttcattaaatgtttgtgcttgaccagccagacttattattgtgaaacctactgagacactgcaactccggctttatgggtagctcagtttatatgaggacaactaacctagggtaactgctgcttcatgatttaaaattgaatggatctcttttggtaatgtaaaatcaaactgcagcaagtagccctcaagctgaactctgaattatacagttgcttctaaattcatatgccattttacttattctttttgtcttaaaggcattttttgttacaaatgtatttttatataagagactctaataaacagtgtatttctctttagcatacaaacgactagatggttcaactgaatgctgtaacaatcacagcctcacagatgtgtgcttttcctacagaaataattttaataagcgtttggtaagttgtccctgaagcagtcttgcttgtctgatataattactaaaaaataagcatatagagctaaaatggaatctatggaaacttctctcttttgctctatttgtatcattttattaaaatctctacatttcacatgtcacatttcatctgaaaatctttaaaaatttatagtgataatatcttatttgacccaaatggggtacttgaatctattttatagtagatgcacataaatggcatttcttttatatgaacctcattcctgatatgctaggtgacatgaaaaatattgaaggaatgtaacttaggtttttcttaatcatttttaatattgactgattaatattttatttatagcatacatgtcttcctgcccggaaagcagttgaagcaactcaagtttgcagaaccaataaagactgtaaaaaaagctcaagttcaagtttctgtataataccttctttggaaactcacactcgcttaataaaagtaaaacacccacctcagattgatatgttatacgtaggacatcctctgcatcttcactacacaggtgagtatttttgtggtagacccttagaaaatcattaagatcacatatagtctcagtggtagagactcactacaaatccttgaattaatacatttattataaatttgatcatttatcaaagtcttgttaacttgttcttaagcattaagtgaaaattatgcagtaggaaaataatctgaatttataaagtaaggtggagctgaatccatgcctgcctatggagagtgacacatttttccttccctaccatttatgcccaggtcaaataggtgatctctcagatgtcctctgagagtttattaaatttatacaagctccccaaaacaggcaagagcaacataccctagagaatgccaggatgcatggggatgtaactgtaatttatgtgtgacacatgattttcatatgaatatactttcaaaactgggccagcataatcattttagcagtggcagcatcattggactaagttctttatggctaaagatcatgtagtctaactcattttgttgtacaagatttttaaaatagtttaccatgcgatttacccattaaagtttacagttcagtggggttttgtttgtttgtttgtttttgttttgttttgag

SEQ ID NO: 136543 - DNA, 1175 bp, Homo sapiens
atatcctgagatacaaccgaggtcatttttcttatctattagtttgacactaaattactgtagactgtaactatgaaataaaacctcaacaaatgaataaatgtccctagtgggggtaattcaggaatgtgtactgtgagttctgactaattacaggatagttttaaaatgttttgaacaaaaacaggattatggaatccacagagtagatgagactttaaatcccctcatcttaatccttggtttagccatgaagaaaaaaaaaagacctgaaagaggttaagtagtataatagtaggagtaaatgtaattttaaggttatacctctttgaaagggtaaggactcttaatgtaaatttcttactctcgcctcaaaatgtaagtacacactgggacgtattttttcattctgctgtttttattagatgttctagaagtattgattgcttttatatatgaggtatatggcctgcatatgtttaggaagggctttctcaatcagtttaatctgctagcccaatttttaaccatatggtagaattcataatgctgttgattctctggtatgaataatatttattattccttatttttctttttcagtgagcatcaccagttttatcccacgttttaactttctaagcatagatctgccagtggttgtggagacatttgtcaagtatcctttctggtgtgaaacatgttttaaaagtgtgttacttggatcttgatcaattttaccttgaatacagcattacaaatatagacctcacaagtatcacttaattgctaacaactaaaaaagagtcttgaaagatgaaaaagatcagattgtacccaggagggaagaagtcagaggagaaagattaatcagagtgagaaaggtttagatgtagaagggaaagaacccagaatacaaattgagaattgaatttacaagtctaaaacattttagtaagtttataaaggatggaagcttcagttactactgaggtaatgaattctgccccatccgagattgttagttctgaccaaatagagaatgtaatcgcataaccaggaattatgtaaatcccagggaggaatgcacaagaaagatcgagctggtttcaactactaagatagcaattcagagggccaaatcttattgtggtctttcgcatattatgattgca

SEQ ID NO: 136544 - DNA, 3516 bp, Homo sapiens
cagctttgtcacaaagagacttatgctataaccttacagagggtagtaaaataaagtaggcttcaaggaccaaagtctttgtttcctaatataaagtaatactttgtaaggcccaaagagtaattttccccttatttcttattccttccacattcctttccctgttgtatcattaaaggattagaaagacttagtcttcctacgagttcattatagattggcttagtttataagtggttggcctttatttttctagtcaaggtttttgaactttgaaataatataaactcattttttttaagtagtagagatctaagaaggaatggcagagatttaaagaaagtagagaagtcaagtgtaatctctaattcagtcacagtaaaatatcttctgactcatagaaatatggtttctactcagacctctcacagttggttccttaactgattttaacccaggtacctgatttccctctcaggagctctggctattgttaatgcagtaccctgctttgctttggatggacaatggattctaaactctttcttggatgccacccttacctcagtgattggagacaatgatgtcaaagatctaatagggtttttcatcttgctgggtggcagtgtacttttggctgccaatgtgaccctgggactctggatggttacagcacggtaatgtttgcactcatctgacagaatccctgagttacagtatacagctatgtggtaatattcattgccattgaaattcttacttggtatgaaatataaagtgtttccttaaaattacatcttagccaacaaccctgagctcctcccatatccagagtacccaaactctgtggtagaagataagcagaagaaatgaaaggcatagtccctgactatattctaatttaggactgaatgtacccagatgcttgtggaataatatctaagcaagtgcaaattcatgtaataccgttttgtctgattacatattgtgttgaaatagtataaaggagaacagaactgggtggaattaattgggaaaaacttcttacaaaagcatcattaatcaaaatttgaaggagaccagactttggccaagtggaaggatgaccattgtcttggcctgtatctcttgtcctttgtcttgtttgaaaagtattttaaaacttaatggtgtattattttgtgctctgaaagctgaggtctgattacaattagtaaaattctatagaagaatctgctgacgtgaaagggaaaaatctttgtcaaatgataccaaataaatgaacaaaacaggaagtagggcctatgatatcgtgagacatgttttgccccacaagagttgcatcttttataaggtgtctctgccccctcataaagcagcactagctttgacatccacggtgagctgcaggaagcatcacacaccagcagcatgtgagcagagggaggcagttggggttgaacttcggaactaggccgggtctcctgacagatcacaagacaccccagaggatcttcagcagtcctacttcccattctctatagagctttgaagcttggaacccttccagggtaaacattttctcttgtgctgctcaggacatctggggcctagctcctgggttcctgtctccaagaagcaatgaccttaaactctgagccatactctgtcctcaccagcggctcccatgtttttctgtgtcaggttattaagtacctagtccttgttttctgtctctctcctaagctacctctctgggtccacagaagacttggtagtatagtgagaatggctatacgtgagtacaaacgtggattttccagggcttgggaactgattcttgagcccagaagagccacgcctgctttgaggtcttttggagtggagatgcagccctgggaaatttggggagtcagcaggccagtgtgaagctattggtcctaggagtatatgagcttgctgtttctttgatggaaaatacatgcttctcttgtatactcagaagtgactaagggcaataactcattaatagccatctatccaacttctttactgagtgatgtattccatggggttacctttttcagattattgagttgctctgtaagcactaaaactttttaatcatttttaagaaactttttagattgtattacaaatttgccttaacagtaattagatgttgaatataattttaacattttattaatgacttgggtcatcagttaataccagtactaaaaccatacgaattattggtttattccagaaaatacagtatttgttctatttttaggtagacaatcatttgggatcagagtacattagcatagtaatgctcagtcagacctgttcaagtagtagagcttggagaatgccatgaaatacttatataattaatttgattgcatgaactaagcaattttactaatgaaaaggttgtatatgtgcaagtcacttttttaaaaaccaagaaaaaactttaatagaggaaatcttattcattaatttatttttctgagtaaaaaaacgaaacccaaatctcattttatttcaactgttaaacattttgatctgttgacccataggatcaggatttgggaaccactttactaggaaagagcagatcagtaccatttgtataaaaccggcctcattatgtaagaaagaaaatgttacgtgttttcttctttagcttggttgtgggcacttctacagcaaggaccatatcatattcatctttgcatccctggcacagtgcatgagacataagtacttaataaatgcagttgaatggataatgattagtgttatttatggattagaaaaagcatgtttctatttaagtaagctgtaaaaagtattattgaatatttactgtaaatatatgttcacataaaaaaataacttggagggtctttgtgtccctggcatattatcatcttcatggaaagaatccactgtggtttctgtagagtgattggaaaaatggattattttgaggattgaagaaagtgttctttctgcgttgtcactttgttcaacagtaaaactttattctcagtgttcctactctgcattgtttacatttttgacagttttttttaatcacctacaatctgtaaagaatgtatatattcttttcagcatctcagtttgaaaagacatgcagttaaacttgaccttttgataatcgctcttacaggtcattgtctgttctaacagcaaattgtaaacatgtgcttcatagatattgtggctctcagtcatcactttgtcctatggtatttattgaatgttcacatactaatggtgcacaggtgtttttttctataaatcttctgactgtcctgtaattcattcttaagctttaacttgaaggtatcgtaattgccggcatttgatgtttagcaataaaagaataaatgtgtaccagcattttatgtttatcatcgtctatgtgttgtcttttttgaaactcttttctatcaaaattgttcctattacataaagcaa

SEQ ID NO: 136545 - DNA, 1475 bp, Homo sapiens
gtggaagtggcatcttaatttagttgtgcaaagaggaagtaaaaagattgacgataaagacgtgtatagatcagaatagaacgttcttaagagggaaagatgaaacataagctgttaatattttaattcccagtctgttcttaaagatgagaaagctttgatggcaaggcgaacattctagaaagaactattacgtgtgtgtgggggggtggggaatgtgtgtatgtatgcatctgtcagaccttgagtcattacaagtgttctgggcgtaagaactccgattcatattgcattctcttccatcactttatttggggtgaagcacatcgtcctgtcagtatccacatttgaaaaataaagagatcctggctagattgggatctaagttcacttagtttttagtaaggggaacttggtgaaaaatcgacttgtgaggtctccagaaacacttaattgataatgagtcaaaaggcattactcttggcatgtgaatattggatgtgactcaagggtgagtcaaatgcctgtggagcctggattcatgttcttttccccgtttgtcagtaatcctttctaatgttccagttccatgatgtgattttagtggaattaaacttgaaccacttagttatgatgttgttactgtgttgggaacgcagcagccaccagaccaccaagagcaactgtaggttgggcttggtggtgctggtttagtgttgtggctgatgaggtgtaacccaggaaatttttatttttgcttttaaaaaaacaactcatctgtggtcatcttgtaagtgaagtattggactataaggactcttgagcccgaaaaacattttgtgacttagcctgaggctaacaggaataaacttgtcccatgttcagatagtttaggcatatctgagttggtggaggaaatgtgatctgttcctagccctatgtgctaggcaggatgcctgggtatccagagagtgagtgagaggcccggcgcgatgccgcatgcctgtaattccagcactctgggaggcgaagcgcttgagcccaagagttcaagaccagcctgggcaacatgggaaaaacctgtctctacaaaaaaaaaaaaaaaaaaaaaaagaaaaaaaattagccaggtgtggtgagttttctgcacctgtagtcccagctagttgggaggctgaggcgggaggatcccctgagcccaggaagtggagactgcactccagcctggacagtggcgtgaaactctctcaaaaacaaaacaagggccaggcgtagtggctcatgcctgtaatcccagcactttgggaggctgaggtgggcagatcacctgaggacgggagtttgagatcagcctggccaacatgatgaaaccctatctctactaaaaatacaaaaatcagccgggtgttggtggcctgtgtctgtagtcccagctactctggaggctgaggcaagagaatggcttgaacgaggga

SEQ ID NO: 136546 - DNA, 1869 bp, Homo sapiens
cggtgattctcaatgtgggtgcttccctccgtgggtgacatctggcaatttctggagacagttttggttgtcacaactggggagatgctactagcatctagtacgtcctgcagcgcacaggacaactcccctgcggcattgacagcccaaaatgtccatagtgcccaggcagagaaaccctggtttaaattcatactagaccatttcagtaatttggatgacagatcatcagcaaaatttccctggtccttcttggaagtgtcagttatgcccacaaattgttaggcagggaaggaggatgggccctgtctttctctaaggttggcactgggctctgttaggagcttggtcattgcttcctactgaactgagcctgtggtttgaggtgaccttccctccctgatttcctgaaccatcgctctttttaaccagctcccacgctcccctgtatttgagctgccttctggtggaagcatgtcttctttgtgtgttttaaatagctataactgtctaaataataaaacctaaacaatgtagttcagattgcatctagctttctcaagagtagagaaagcttccttcctcccgctccttcagcattattatcctgtcccactacactttaatcccccattgtgataacaccgcaggcacagacgctgttgctttaacaatgcagcctttcggggctgatgactgggagtggggaatgcatgcttgggccctactctacacggactgaatcacagttggtggaggggggtgagttcctggattttgcatttttaatcatctgcctcacagtaattctgttgctgattaaagtatgagaactcctctagtaggttccttatttaaaacaacaacaacaaaaacttgtctgaaacctttggcacacctacctcactcagcccaaccagtcagcctagtcagtctcattaagtcctgtggcttctgcctgccaatgttctcaaatttgttgctcatcacctgttccttactttagtttcctggctacagtctccccatttgtctccgtttggggatgggcccgatcattaggaactcaacaggatccctgtcccttttcccatttaaaaactcttccgtgggtccctattaccccatggatgaagtctaaactctgtatcaacacatacaaggtcaatttctacccggtttttcctcttcccccagtatattccttgtgcttcccggtagccaggaagcacctggactcaggatttgacagctttggagaagacttttttgtgtgctttacataggaattctcatgcgttaattgtgtttgaaaatattttatgggctgcttccgggagatcccttgttggcattgccttcctttggcatgcgcttttgctttgtgattttttttttaaatgctcttttcccaactctgcaaaagattcttaattgcacaggttatgctctatatgactccaggctgaataacctcatgttgccgggaattagttttgtgggcttgccattaaaaaattgagtaaaccacaatgattctttttagattgtagtttccaagttataccgatttccttaaacctatggaggtagcatatggtaagattttagtttctacttcatatctgtaatcctcatctagttctcattgggtagttcagtatttaaaatgctttggaagggatgacagctgtttaagaaattgactccataatcaaggcgctaggagtgacccccatcctggctaacaagagaggggtactttttcaagtaatctgaagccccgcatgagacattctaatttaataaccagtagtcagtcaatgtgtctttttttttttttttttaagaaagtcacttttgcatttg

SEQ ID NO: 136547 - DNA, 1062 bp, Homo sapiens
caatgtaggaaagagctcttcaccttagccaaggcactattgacacaattgagaacaggcactgtttagtttcagtgggtttgcctgtagtgcagtaattgccgataggtggctggctgtcaaggagagggtagtcttcctcccctggaagtgagtgactttgtcgttcatccaatgccatgggtggctcactctcacctcactccccaccatcagccaggggtggaagaggcttcctccaagtcctgttcgcctgctctctagcagttgtcctgattggtgcttcacattttacaatttacaagaaaaaccctctagaatgcctcacattctgaaagctgaatttgttcacatggaaggtgaagaagtggttaaatgaagagttgtcaggatgacatgaatttatgggagtttgccttttcaatctcggtgttctttatagatgttagtattccctcatagaaagccttgttaacttgtaacaggtttagactgtactcttggaagctggtgagcagggaagggaaagagactcataagagtacgtcaggccgcatatcccagcattttacatgtctacagctgtacatcatggcgttttaatgttgaacactactgtgtttgagaacacatgactcacgcagttgtgttatgtatgcagtgagctctcgttttctttgtgtttgggttagacttgccaagccccttttccaggtcttttttttcctgtcatttagtgtcctctgctggtaccttctagtacattcatcctgtgaaaaataccgggtatttacaaaagaatgaatgaaaaaatcatcattttgcagcctctgtagtagtaactggttcaggccagaatcttctgcatgctaaaaccactggtaaaggtttgttggggggtgaggacttctacctagtttcagagcaccaccccacagcctgcttagtaatttcagagggtgaaaaaggtacctttgcaaatggagagagcccatgaataccactttaaccaagtgatcacagacttagcatcaccaataataggacagatacacatcttgt

SEQ ID NO: 136548 - DNA, 1034 bp, Homo sapiens
attcgttttgtgcttgtcaaaagtcggcagtcatgtggctttcttttgcacactcttcatcctagctccacttgtaaggcagtgttctagtaaggtacatttctgtttttctctttttccagattaccacccatagtgcgaggaggagccatcgacagatactggcccaccgccgacgggcgcctggttgaatatgacatagatgaagtggtatatgacgaagattcaccttatcaaaatataaaaattctacactcgaagcagtttggaaatattctcatccttagtggggatgttagtaagtattccatccctgccccgatcacgtaacaaagtggtgatgtgttgaatgatggtgttttcctgacaattactactgtcgtggatttgtttgagtttgtttttgacactgctggtttttgagatgcacatttatgtcatattaacctgtggattgtctgggctttcacataaactttgtcttgacattgcttccttagtgatgagtatttggattgtatttcaaaagaaaatgcatttgcatatttaaaaaaaaaaacctttttgttacagaacaattcaaacctaagtagacaaactagtgtgatgaacccacatgtacttaccatcgagtgtgaacaattaccacctcctagccagtcttattttacctaaaccccagtccactttgtccctctcatattattttgaagcagctcacagacatcatattatttcatttgtaaagatgtaattgcttttagttattcggtatattgacacatttttaaggctggattttcttcccactgactaatgtccatttgtattaggtgtcagatgatcagggttgatgaaaaagtcctcaatggaaaaaaagcttgcaaattgttcacagttttaaaaaattgaaaatgaaaaatttacattttggtctagatcccagctcttcagtgtggtggggccaggtggtttgtgtgttaaggtagactcaccatttggatctgtttctcctccctagatttggcagagag

SEQ ID NO: 136549 - DNA, 1286 bp, Homo sapiens
ctgaataaacttttgttctcttatacacagattctaggaaaaaaatgggggtgaatatagttctgtgtcaacattttagactcttaggagaattgtagtttaaaccattgtggaaatcaggaacactatatttttgatacttcatttgtaatataatggtgaccgttattgagaaaatttcctttgaatgagttatttgtatgaatctttgcaaattgcatggttttaattcagtgagtgtcactaataagaaattggtttcactgctttctatcatttcatattctaataatttgaaatggcttggtaaatgaggtagaaggataacgagctctaatgggtctataaatagaatgcagtgtgatttgtgaaaatacagaagccttatcttgtttttaaagatgaacttttatctaaagctagaattgttctcctttattaaagaccttcagatgagtggggcccttggaaggactcaagaatcccatttgcttatctctctttgatttaggggaactgtgtcaatctgacagaagcactgtcgctctatgaagaacagctggggcgcctgtattgtcctgtggaattttcaaaggagatcgtctgtgtcccttcatacttggaattgtatcctttgaccgtgacattctgttgccagatcaaagcacccaagtaaatcatatgccaatgaaaaaatttaaatcacaataataaacaattagcttagccatagagtatataaagccctggttctccagcttaggtgcacattggaatcccctgagaagctttaaataaaatctgagattctagacttccattctcaaaagttttggggtctggcttgccacagctttccaggtgcttttaatgatcaagcactactggtctaaagcattggttctcaaaggtgttgccagacctgcagcatcgctcaagaactagttagacatggacattctcaagccccaccccaacctgctgcccaatcagaggaattctggaggtgggggcccagtgacctgttctaccagccctcccagggatttatgtgcacctgaaaagtttgagaagccctagtctaaaataaccaccctacctgtggcaggtaaaatgtctaaagacactcattctactcttacattaaaataacctgacattaatactagtttctacacttgatgctaatttgcaacagaaatcgagaactagaatgatgttggggactgcacggttaacattggtgttctctgttagttccgcttagtaaagttagtctagagaag

SEQ ID NO: 136550 - DNA, 4345 bp, Homo sapiens
atttcagcccagtcccctctttctgacttgtgatctcatagagcaacagtatctcctggtctgtttttagttctgtcactcgatgtcatttatctctttataataggatggccccggggccttttttgaacagtagtaatgacttcatttgccaccgtgctaaatgatacacaacctattacattcaccagtccttcattataccattgacctgaggctagcaagagattttgtctgactgtaaagttgaaagtcaaaagcttatttctggtcccactcttagcagtgtattagatgtggaaataaaagtcattttgggtagctgctatgaaactttctgagcagattcttggctgcaccgatgtatgacagaatttatggagaggcctatggcaatatgagcaacttgaaaactcctaaggaagtgcaggtagctaacagcttggtgtggtgtgtgtgggtaacaatccacatcaaaagtgagctttacattgacttggattgttagacatcagtgggttattctgttgtttttataaaaggtttatactgtatcaatggaatgagtcatttatgatgaatttgcaataagcaaagcattaaaaatgaaatattcagtgtccattttgaggtagaattggtgtcaacacagaacgttcttcctctcaaggtgtaggaatcaatagtatggtatttaaaaaaaaaaaaaaaaattttttttttgagacagcgtcttggtctgtcacccaggctggagcgtagtggcctgacattttttttcttaaatgagtgaatgtctactttttctttttctttctttcttttttttttttttttttttttttttgagacagtcttgctctgtcgcccaggctggagcatagtggtacaatctctgctcactgcaacctctgcctcccaggttcaagcaattctcctgcctcaggctcccgggtggctgggattacaggcgccggccaccatacccagctaatttttgtattttttagtagagacggggttttgccatattggccaagctggtcttgaactcctgacctcaggcgattggcccacgtcagcctcccaaagtgctaggattacaggtgtgagccaccacacccggccgcctactttttctttgtattagattgtcatggaagaagatgaagaagaaaggagttagtcatgttgtaattagatagacttaacttaaatttttcttgtgcacataggttaaaaatagcattagtagacattctccccatcccctccaactctactatagtgctttgcaaagctctgtgtactgtgtaagatataaaatgatggtactgttactgtagaacactgtttgggagtcaatagaattggatttttttctactttataaaagaaaccaggtatatgtacctgctgtctggatatcgtgtttttaataactgggcatgactttgtacttgaagactagcttgaggctggggcagcagatccactgataaatctgttgacacaagtcctgcaaagacctgagaggtggaaatgagtggatcaggttgtgccaggccatgggagatagattcaggagacagtaagggatgtggaataggaaagaaaggaatggaaatatctgtcttttcatttagggtgataatagtgaattttgacccaactcacttctttgtgttggagaaaggatgatgtatgttttgaacatctttgttactgttttaaaacaaaagcatgcaaactgaactctgaaaactgaaaatcccctctgcttttgctgacttttaaagaaatgttataagatctagcattgttgttttactttaatggctgtagtgttatatagtattacagtctcctttataacttaaactggaatatactgtagtatcctatagctgctttttaattagagacaagacaaatatgactgtttaaaattccatttaacacatcagcagatgtcaataatttatttaaaaagtgaaatgctgctttctcgtagaagtgtgattgattgaatattttagagacttgactaatggtgatccagcggggctagaggaaggctgggttgacagtgtttttaatgggctggagcagtgctgatgtcgaaataaaaatgtgctagtacttcctgtacagtctgcatagtcacttccttgcttgcattaactattgctgacgcaagactttgcatttctaccatctgtctcagtagatacatcaatttcattctggtcccatgactcctgggatagggtggggaattgtgggggtgtgggttttatgttaaatatcactggcctgtgttcaaggctctagagcaggaccagtcaaaagtgtagtttgtcaaccagctctttgttttctaagcgctgcacttcagctgacctgtttttcacagcaagactctcattgaaagaagcagtgtgctgatttttccccgtggcacaagctccttaccacatcttggagcagcatttttttgagaccgagttttactctgtcacccaggctggagtgcagtagcgcgatcttggctcactgcaacttccgctagagttcaagcaaatttctcgtgcctcagcttcccgagtagctgggattataggcgtgcgctaccacacctgactatttttttttatttttagtagatacggggtttcactatcttggccaggctggtctccaactcctggcctcaagtgatctgcccgccttagcctcccaaagtcctgggattacaggtgtcagccactacgtctggccttggagcagcaatatgagtactactcttccagaagccagttgggccgcattattgaatacctagttcatagataagagctgatatgtgaccttgaagaagtactctatctccttcaattaccttcttgccgcgtgtctttgtactaaatctttaaccttgctgttctttgggctaataaaccactttcatttacattatcctgctctgtcttaaaacagctttgtgaaggagatgttaataacactaggcaggctagcagtccaagtttgaaatgtgcctgagggtcccgtgaatccgggttccagcattcttaatttctaacatggatgcttccatcagaggtgcttaactgtttttgtaccttggactcattcagcagctgcctggtgaaacctgtgaactccttctcagaaacattttaaatacataaaataggattccaagaaacaagttaaattttccaaaaacttacgatagaatatttgtgctgctttatttgttacatagctagatcaagtggtgggtcacacaccataattgtgaagtagtaatacgcataagatctgtagcaactgaaatgtgatgaaaacacatttgatttgttgacaaagttacaggaactgctgtgtactaacgtggtttgtcacccgtgttcatgcttaaaggaaatgctaaatttcagtgggagttagtaaagataaagatagaaacattttcccatccaagtttatggggtcacagaattctgtccataggccccaggttaagaaatcctgacctacagtttttgcttccattgttttcattgtatttgagcggtgggggaagggtaggtgggatcccttcaccgttctgtcagaacctgaaatcaacactggcagatcagttctcctcagccagaaccatttaaaatctcaattacctcatgtagtcatcctactgatttctgctttactcattatttcaaaaatgaaaaatagaacatgggcaagaaatagcccagtgcttttggaaagctatttgaatcctcttggatgtgatttccctgggaaattggatgataaatgtgactggacaggtagacttagctcctgtatctgggggtcctgggatgctcaggccaactaattaatgcagacagttttcccatgtaccaaccaaccatgtgatcatttcagtgagcaatttttttatgatgaagcatcagggaatagacccttctctgtgcaactttgcacaggaatgtaaaaataagtgaattaggcagcctttctaggaaagaagcaggccaggtatattttaatggaaggcctccaatatccagagaagggagggttgggggttgctccaccccatttcctaaaaaagactggcaggaggtcagtctctgtagcccttggctttgaccatagagttacttattagagatcattcctagttccacctattagggaatacttttttcttgactttgttctaaaatagtcctaatcttggtaagtgattatgatggtagcttaggttcttgctgagtgattcagactgctcctgtctgttcattgc

SEQ ID NO: 136551 - DNA, 1045 bp, Homo sapiens
gtgaagcaagatgacaaaaggcccttaagaatgtcccccagtctaaggagactaactcacaggcataaaacagtgggctgctgtctcctgatgctgcgtggtgtgccccatggacatttgaaacaatacaagtaaccatgtaaaatggccaaaaaagggctgggtgtggcagctcatgcctgtaatcccagcactttgggaggcagaggcaggaggatcgctagagcccaggggtttgagaccagcctgggtaacatagtgagacccccatctctacaaaatatcaaaaaatgacctgggtgtagtggcgcatacctgtagtttcagctactcaggaggctgaagcaagaggattgcttgagtctgggaggtcaaggctgcaatgagccatgattgcgccactgcactccagcctgggtgacagagtgagaccctgtctcaaaataaaatggccaaaaagggacagaggaaggagagcgtgagtgcttttaagcactcgaacggaaactctgatggttaggtggaagatacagtcaagggatagctgtatatttcccatgtttcttttttcctttttaaattcatcatccttttagatagaaatgtttaggggaaacagcagggaagggctgccaggaacatagcaatttggtttaccaagatcattatatttagtactttaatgtctagcttttgaggtgggggtgaggggtgttggatttaagaaaaagtaaacagttgttcttaattataccatactatgagacttggtgtgctagcttcaaacaaaataatacagtcttttcaccattacaggaacatcagtgactaaacagaatcgatcatctgggtggttatgattggaagttattgcagttaaataatgctaagtctttgagacaagcagtaaactccaaatggaattcatggctaatatcagtgaggcagtctactgtgtaatgtagtatttatcacctcctttggaagacgaatgatcttttcggtttgcataatgtattacatttttgaaattcatatatcatct

SEQ ID NO: 136552 - DNA, 1040 bp, Homo sapiens
tccaggatctctgtgagtctcttctggggcttcatttctctgagagttacactgaatatcaaggagctcaagaatttgaaagtattttgtaaatataacttttaaatatttagatagatgacatatgaacttctgtttccattagccttcactgtgaggcaaaccacccaaaccatagaggcctggaacaaaaatgattggatatttctcatgattttgtggatttggtggatggtttctctgccgatttttgcctaggctcatttgtgccactgcattcagctagatgggcgcctggactggaaggcgaatgatggcctcagtcaatgcctggcagttgtgctggcttggttcttctctatgtgtcctcttgtcctccaggaggctgcttcaaagggcagctaaagggctccattcaaagggagttaatatggaaggtgcaaggcctcttaaggcttagctttgaaactcacagaaagttacttctgccaattctgttggtcaaagcaagtgacaaggtcagtccaaattccaggcaggggaaatagactctaccacttgatgggaagagcagcaaggtcactttgcagaaggacaagcaggatagaagaaatagtcacagttatctttgcaaacaattgaccacacgctctatttgtattcttgtcccataccccacagatgttagggatggccctgcaaaaaccagtgatgataataccaccaaacttttatccattccctttttttttttttttttttttgagagacaggttcactctgtcaccccaggctggactgcagtggtgcgatctcagctcactgcaacctctgcctcctaggtttaagtaattctcctgcctcagcctctgagtagctgggattacaggcatgcatcaccatatctggctaatttttgtatttttagtagagatgggttttcaccatgttggccagactggtctcaaactcctgacctgaggtggtccacctgcctcggcctcctaaagtgctgggattacaggcatgagcccttgcac

SEQ ID NO: 136553 - DNA, 1017 bp, Homo sapiens
gattcacaccgagccaggaggctgtttgtaagttacatgtggtctctcctgtggagggtgaagaaagggaagctaaggacactgaagcatttagcaaagaggggccagacgtctgccagtcagccctctgtaatttttaccttgaaaaatcactgctagtaatgctcacttccatatcttacactacacatcactaggtacttttaaaattagtgggatacatagtcctatggaaacttctgaagctgggaagacaagacagtccagcccagccaaatacgtccttgtaattacaaccagggaagcatatacttaaccaatccagctagagagatgtgtgcacaaggagaggttttattgatggagtagcccttgtgattggaaccaagtggagtgtaattggaaaggcttgctagatgcagtgagtcttgggcagtcctgagtcatagttcaaaccatggaggtggtgatggtggataggagatgcaagagtcggagagtcatgtgtgcagtgggaaggtggcaagtttaatgcaagggaattagatgatggaaggcccgaaggcaaagtcatgacgtgattgaggggtggatatgtgagctactgctggtcaatggaagtgattaagatgatccttgaggaagataatcattgctgctgttcttaggttaaacatagtggaggctagaagctcagatttggtgttggccaaatggccaagagcatgagtattaggaattgaaagagtatagagccagggctagagagaggcaagttttgaaatgtgtgtccaggcggtgactaaatccatacccccagcaatggggctagggaaatctcaaggccaaagagacaagaggggaaatgagggaatgagctgttgacaaaatgatcacggggaacagtggcatccagatagtcttgtgttcatcagtgaaaatttgcccctagaggtgaagggatggtctgtggttcatgaaatattgaaatcattatctggagaccacaggtgacaa

SEQ ID NO: 136554 - DNA, 1064 bp, Homo sapiens
gcgttggtttcccctgaaggctacagggcaacgatgcattattaggcaaaagtgggtaggacctggtggtgctgataagggctcatgcagtaatttctgaacctctttacatacatgctgctcttcaaacatcttccttttcctagaaaattaaatttagctgattatatcttttaacagaagatccatgatgttcatctcaaagcaaatttcaaaggagggcctcacaagcttttatagatacgtttcgttgcgatcacctaaaatgaagtgtaagtaggtccctttgataattgatccaggctgttaacaaaacaattcttgatttattccggaatcatctatttaaagtgaagaatcagtacagcccagtacttatgataatgacatcatctttataggactttataggttagaaatatacagtatgtttaaatacagtaaattgggaaaaatgctatatcccattttacatatgagaaaactacttcttagaagttaactgacttgtccatgggaaaaaatacaaggctagaaccaggactggactggacccagggttttggactccaagcccagtgtgcttttcattgtaatttactttcatatgatacactactggaatgatttaaaatgtacatttttgttatccaaatgaagtacagttgaccaaagttttatatcccatcccatccagttgttctaatagtggtaattggatcataagaatatttttcttgactgattctgtctagtgtcaattaaaatccacatacagaaactccaaatacccaaagtaaagcataagatatttataattaacaatatacaaggatagaaagaagatttttttggaaaaaaaatctctggatgattgaatgtagctgcttcctgattgagtgctgctcattggcagggtccaggttgactgaactttagtgccttacacactccctggcacataatagctactcaataaatacttgttgaatagaccctccctagtttactcagacatttatgtgatgagttaaagaaaattccataaaaacgaatttgaaatg

SEQ ID NO: 136555 - DNA, 1001 bp, Homo sapiens
gggcagcataactgctagctcggggtcacaaagactgggtagctagatcaagatcatagtttttccaaatgctgtctcaacacttgcaatcactatgggaatcaccatcatttcttcctccacaatctaaggatcagcaaatttcagcctagtttttaacgtagactgagtttttacagttttaaaagattataaacacaacaaaacaaaaaccaagaaagctatatagcagaaattgtggctcgcgaagcccgagagatttgctatctgtacattcaaagttcctatgttgtattctaaaatgtcattactagagcactttcaagaagttaatactgtgaatctgtaaggcagtagttctcaaccggggctgactgtgcacccacccaggggacatctggcaatggctggagacatttttggttgtcacaacttggggaagaggcatgtgctactggcatctagtgggtagaggcacagcgtagcccccacaacaacaaaattacccagccccaaatgttaatagtgccaaggtggagaaactctctgctttgcatgtttcttttgttttataaagattctttttttgctactttgattatgtaaaatgaaaaaatgccaaagagaagttcatagaactctggggacaactattatgacctctgaggtgatgctctcttgggcagttgagcagagaccagattttccagtgtaatcgtccccaaaatgcagttatcttgctctcttcgatggctctgtcccttcaggtctaaatcccacctgctgtagaggagcccaagaaactgaatgcagtataactgcttgaatgacgaaggggctaagttgacactggcctttgagacttgtccattactagagtgcccattattggcatgccttaagcatcagtcagcagcagtcgcccacttaggtcgggcttcttctgacagtgtgtaagaccccactgtgagcagcgacctgaggaggcaggaggcagtgct

SEQ ID NO: 136556 - DNA, 1018 bp, Homo sapiens
aggacagtcaagcattgaactgatgactccttaaaaatacgagaaggagaagtaagctaacagaagttatttgttttctacctgagtgtttccagtcccttggcacaaaagccagggaaatgtgagatgctggtgagctgatcaactttgactttgtgggatgtgccatctggtacctgatttcggggctcagtgtgagccccaagtgatacttgagataggcttaaagcagacctttgaagtcacctgcttgatagcacatcacagcaagcaggcctgtctgcagcactgcctgtgtctccgccacatacccggaaggccacagaactaccgaggaatcctgccagactgatttaatgaccagcaggggaggtgagtaatcgctaacctttaaaagacaagaaaaggaaaaaaagaaaatcaacaccagttgttatttcttacgggaagccctgaataatatgttgtgcttgcaacttctgaattcatattttgaacaaaaggaggcagtgaggaactagaaaaagctatttttatcttcttgctctctaagaaatcctcttgagaatattgtttctgctattttgaaagatccccattgttaggtcttccactttaggtttaattcataggcttcaagtacagttaagatgatttatgtaagtgcagtcggttatcttgggaggtgatatcagaaaaggctgataggggagtggggaagtaaaacagtgagtagcaggaagccaatcaagagagtattattaagcaagtgtctactgtgggcaactggggctcagtctcactagggaactctgggagacactgtagaatgtgttggagaaatctcagttgtggataaagaagctgaatattttctccccaactccagccatcatcggctgattcaactacatttagaagcattaaatttctggcattttcatatgctgtgtttctccctatatatatatatatatatatatatatatatatatatatatatatttttttttttttt

SEQ ID NO: 136557 - DNA, 1072 bp, Homo sapiens
tgggaactgcaagtctgcatttctaacaagatctgaggtgatgctgatgctacagatcagcagaacacacttggagtagcaaggctcaaatttaactgttgtaaacagaaaactggatttagaatcaggaaagccaagttcaagttccagttctcctaagtatgtatctttgggcaagtcacctaacctccctgagaaacacgctccttatttgcactgggtgtaatagcatctctttcacccacttaaggtaaagatagaatgagataaagtatgtgaaggcactgtgtaaccatagccttctgtaaagtgtgttatcattattactatttactttgaaaatgactgctatttcctcacatgtgccagctctttcaaagccattattgcctgttgagtaatacacatgtagccacttttttctttgatccaacaggcaataatgggtgctcaagctacattcaatactcatattgccaatttgttggtctttaatgactccatctgagtcattacagacaattggattcaacctactgctgagcatgcagctcctctacctgcagaaagttcttaggcaggcagagctgcggatggggatgggtgcattgcattccagcacaccaacgtggttcctctgggctcagaacctactcttcatgcctgatggggctttgcacacaaaaaaagccttcacttcctgcccagggaagtgccttttgaattaaaggttctgagaggctgcgggctctggtttcagggctctcctcaccacatctcacagcacagcatgccaaagagggattctccagtgatttaggtgagaacgttgatcattctcctctcttactgaatttacatgactacagtgtttccctgggaaatctcgtccacataagtagatctgcaagcacttcacagggaagagtgtcatcagaattgccagagatcaggagcaccaggcaaagtgataattgtaaagtcctttgaaactggaatgttgcgaaattttgcagactgtgaattttgatcatttagttcagtgtgcttccccacctacccctttagaaaa

SEQ ID NO: 136558 - DNA, 1086 bp, Homo sapiens
gaggccaggagttcataaccaccctgggcaacatagcaagaccccgtctctacaaaaaaatttaaaaaatattaacagggcatggtggtacatgcctgtagtcctagattcttgggaagctgagacaggagggtcatttgaccccaggagtttgaggctgcagtgagctttgatcacaccactacattccagcctgggtaacagagtgagatcctgtctcaaaaaaaataaagtaacaatgattaatatgttaagggctttagtggaaaaagtagacatcaagaccacatgggtaatgtaagcagagaagtggaaacttaggatgaatcaaaaggaaatgctagagataaacactggaacagaaatgaagaaaggctttgatgaactcatcagtagacttaactgccaaggaaagaatcagtgagcttgaatatagggcaatataaacatcacaaactgaaacacaaagagttaaaagagaaaaaaaaaaaaacccaaacggaacatctaaaaattgtgagacagggttatcaaaatatatgacatacacataattggaataccagaaggagaagaatgaagcagaagacgtttgaagtaacaatggccaaaaactttctaaaattaaagacaccaaaccacagatccaggtagctcaaagaacaccaagacagataagtactcataaaaccacacttaggtgtatcataatcaaactacagaaaaccaaagacaaagaggaaatcttgaaagaagccagggtcggggggacaccttatatatagaggaacaaggaaaagaattacattagagttgtcagagaaaaaactgcaagaagagaatgaagataaatagttaaagggttaaaatgaaaaaaaaatcaacctaaaatgcaatagccagcaaaattatgcttcaaagtgaaggagatataaagactttctcagacagaaactgaatgagttcatcgccagcagtgttgtcccgcaaaaagtgttataagaagttgtttaagaaaaaggaaaattatataggtcagaaactcagatctatataaagaagagtattagagaaggaataaatgaa

SEQ ID NO: 136559 - DNA, 1001 bp, Homo sapiens
aaggtggaagagttagactaccatcccagcagtacagaacatccaacaatggtgagtaccaagaagaagaaaggcagcctgaatcttggcagacaaatcagcccagttttagtgacatccaactcactgccatcgtggggactttcagcacctgtactggcagcaatgccgatgcatggagaatttgtctccatcagcacatactccccaggcacatcactgcctgggaaggaatccagtgaacacatcagctgtctctcccacacacctactgccataacagcagaaatccagaaatgtaaagatagggactttcatccaacttgggcaatattccagcatttgctgtcaacagagaacactgaagcctgagaccttacctgttgagatgatccggaaggttgcaaagaggcttctaactatgtctctaagcttttattccaaataaagtaaaagccaaacaaatgcctgcttcctttatcatcagccagaagaaaaataagagatcatgccatctcacagctctccattcctggcaggatgcaggtctaagtacttcttgaagagttacggtacattctcatcagcagtgtaccctagacccaacaagtgattagccttaagccttaatgaaaagactggactgtgtcccaaatgagggtgaagtgcagttgacagcatcaggccatctacactcgtgaacttgtttgggccacttggagaaatatttattgcatacctactgtgttcatcgtcataaaaatgtgcctaccatcaaaagattgagtatgaagagaagctcacaagatcctagctttattccctaacggttgagtgttgtgtgttcaaatatggctgtgtgaaaataatacaagacattggggagttggttttagaatggcttagtgttttgaggacactaggaaactcgaattccagaggctatgagaattattggacattttcttagtttgtgtttcagaagccaatcctgaaacaag

SEQ ID NO: 136560 - DNA, 1010 bp, Homo sapiens
aatatataaaatatatttgaataggatatgccatatatacatatgtttatatatcacatttgtattctatacgaaaagaaattaagcaatgaccatagcatatattatgggccacatttatacttatacacactggtcttatataatgtacatacacacaatatctaaatactttaaacaaggaagagctataagcaaattcatttctagggctctcttttacagctatctagtgaagaaaaatcattcctaagactaaaacccaatgctctggttagaattttcaaaatgtgacaagtctctagtacaaagaataagatgtgtgtgttccccctgatgtgagcatctgtctttacttaaacagagtacacctttattcttactcttaactctgagacaaaacaggctgcaataaaccaaacaattcagcttgtaaagtaaatgtttataactggcaaagtgtaaatgtaacccaattaataaacttctccctgaaaatagatgttactcaacccagacatatatacactttaaatttcttctcaaaaacacaaaaatcatgaatttatgtggatgacattgaaaaacaggcatcttataaacatgagctacttagtgaagcttttctaagaataaaataggctttaagcagattttgcttatggattatagtctctgaatttttgagacgaatgtagtaattttatttccatatatgaaatttggcactgcccaggcatgctataaacagcttcattgactcatgatattaaatgttttcacactgaaactgaaagatcatccatcaatcagcaagccatcccatttcctccttcttagccattccttactttgaggaactcaggatgaggaaatcctgctagtgtggagaggtttaaaatgtgagtagcacccagcggcatctctcagctgctgtgttgtggctatgtatactgggacaggcgcgaaaatctgggactgaagaaaaatctgacttacaaaatccagaa

SEQ ID NO: 136561 - DNA, 1034 bp, Homo sapiens
gaccgatcttctgcactcccaccctcagcactgttttagaccctgttcatccttctgggcccatcttgtacacaaaacttcgcaggtgactggcctcgcgccctcagcactgttgtaggccttctcatccttcacacctatttcttccacaaagcttcgcccatggctgtcttcccaccattgaagtgccaacgaccctcgccgccagcacttgttagacatccttccacgcccatctctcccaaaaagcctcctcatcccacgccacccccgcccctcaaagggaaactgacctttctgcctctgaatagctcgcgttttatccctctaacagacatttcttattcttttccttgcagtgatctttgtgaacagccatgactcctctctcaagtcggagcccttttcaggtccccagaaaacttggagaagaaaagtctaacctgaaaagccatatccctagaccatttcttctcttccagctggaaaggaactatggggcaaacaggcaatgttgcaacttaaccctgtgttaggttgtttttttttttttttttttttttagacagagtctcgctctgtcgcacaggctggagtgcagtggcaatctcggctcactgcaacctccacctcccaggttcaagtaattctcctgcctcggcctgccgagtagctgggattacaggtgcgcgccaccatgcccagctaattgtgatccgcccaccttggcctcccaaagtgctgggattacaggcatgagcctgtatgatcccagggtgccctctgtcctcctgcaagtgcttgttatctttctttttaaattaaaaaaaattttttgtggctacatagtaggtatatgtatatatatatgtatatgtatatatatatatttatggggtatatgggatattttgattcaggcacacagtgtgtaacaatcacatcatggcaaatgggttatccatcacctcaagcatttatcatttgtgttacaaacaatccaattatactcttttagttattttagggtatac

SEQ ID NO: 136562 - DNA, 1784 bp, Homo sapiens
ataatttttaaaaacgttaagtgactttttaaaaagcttattagaagtataaaatgcaagccattcacaagcatataggttagattccgcttgtgaggggcttgtgtgcagtggtgaggctttgtggaagagatggacgtggaaagatgtctaaaacagcgcggaggtcaggagaccttgtcgctgccttcacagagttgggcaacgctcccggtcctggtcagccgcgggacgcaggcgcaaatgcaggcttgggatgggggaggtgcggccggcgcccacgtggcggggcggggagcagatagggggggtagggggaggagctggtctcgcgaggccgcgccccggttcgcgcgggcgtcgtgcacgcggttgtagctgcccggcggcggcagaagcggcgctcgcgccaagggacgtgtttctgcgctcgcgtggtcatggaggcgctgccgctgctagccgcgacaactccggaccacggccgccaccgaaggctgcttctgctgccgctactgctgttcctgctgccggctggagctgtgcagggctgggagacagaggagaggccccggactcgcgaagaggagtgccacttctacgcgggtggacaagtgtacccgggagaggcatcccgggtatcggtcgccgaccactccctgcacctaagcaaagcgaagagtaggtggtgtcccgccaaagggtgggaggggagattccggagacacgtgtaccccggttacacccccggaatctgggcttgggcggcaccccctgggctgcctccgggccctgggcgggcctggttctcacctaggagggcggggaggggaataaaggggagttctagctgtgaagaaaggtatggtttccactgatcagattttagaagaggtagtggttaccccaaaagccgcagctgagggaaagtgggtggccctagtcccgagtttgcatcgaggatgttgggcaaactgaaacagttcctgaaacatctcaaagtgccttcagcacatcctgtctttttcaggtactatttcagcgaaggaagacattgataggttgaataatgattcacaaaaagtttgattaaacagaaaagttgctaaacacagtgctcgggaggtcaaacatttcatttttctttcttcctttttgtttgcatcttacaaagattattactgaaagccaccttccccaaagcctgtgtagttaatggatattccttatgtttctcagacatgaagaacctattacagagtgtacttttgagggaaatgggggaaaaggttagaagtatgcatttgggttgatgataaacctcgtggcaaatttgtgtcctgccaatttggtttttgattatttgcatttctgtccagtgtacaaagctaatggccactttcaggaatgacacgtcagacgaagtagatactgtgaaagttgtagcctgctacatctggatgttaaaattaaccaaaagtgaacagtggctatagataaaggctgtctcttgcttgctattcagtaacctgcttttcctgcagatcatttgacattctgtaggtgtgtagttggtttttatggttcagttacagcatgttccatgccagtattcagtgaaaaaagtaatgcttcaaattctgaatccctagagttaaatggaatgttgttatgacttaggatgggttggttgggagtgataaatgagaaaaactgttttgtcctcttaaacatttacagttcttacttgctgaaagtaagtactttcagttaaccactttggg

SEQ ID NO: 136563 - DNA, 1115 bp, Homo sapiens
gaataggggaaaaaagtatttattttcactaatccccatctgaaatttagtgtttccttctattatgaatgtcagcaacaaactacactatcttcagcagcacttgcttgtacctttcaccaatagaatcacttattttcttgctacatatggttatcgcaggtatcctgaaacaccattttcactcatcattatcttacgtagttgtcagattacaactagatcttgcagttttgaagtgttatagagcacatgtattatgatatcaccaattttttttaatatttttataattgcatttaaatacaattggtttcttttgtaattctatgtattttcctttttgcattcaataacactcttttaagaagtctgtaagcttcaccagactgccaaagagatctaaaggtagccctgatttttagtgattttctaaagatgtccttctaccattccaccaactttctcagtgttacagaacatcatgtattttattttcttagtttccaagccagcgccctactgggaaggaacagctgtgatcgatggagaatttaaggagctgaagttaactgattatcgtgggaaatacttggttttcttcttctacccacttgatttgtaagtaatacatgtaaatagctagtaaaatctcagtctttatcaattatttttcaggagtatcaaacaaattattttgttcagctcttggtttttaaaaaggcaagctgaagtaaagaaatgtatttaaaaaggtaacatctaccatatatttcagagtcataacacaccgacctcaatacttatgtctacatgattatgttataatggaataattagaggaaagctacaatatattcattaagctatacctactaaggcaagaaaatggactgataatatattagaaagcatttaatagcaagacctatgccataattctttttactgtatctctcttgattagaaaattaattctgtaatcccagcactttgggaggccaaggcaggtggattacaaggtcaagagatcgagaccatcctggccaacatggtaaaaccccatctctactaaaaatgcaaaaattagctgggcgtggtggtacgcgcctgta

SEQ ID NO: 136564 - DNA, 1025 bp, Homo sapiens
atattttttagaactcagttaatttaaggagtccctaccacggtttgaaaaaatgccaccctagtaatattctgtaaacatggcctgacaacatgagggtattaaggtataaaatccctggctgcacaggactggtagacaaggtggaagaggaccttatcaagaaaggaggggtgggggtactggaaaacattgcctcctctccaaaatacacatagatgcatctaattcatagggttggtataggaatattaaaaaaaaaatagtgaaatgacataaaatttgtatagatcctttgaaagctataaaatactatataaataaaaggtattattaaataaaagtaataaaatgaggggtggctattgctataagggagaagggaacattggttgactactgatctattaagttgtaataagaaagtttattgagatgtagttgggaactctgtaatatgtttctgtcttaaatatttgattaaatgacagtcttttagactactccattttgaaaaggttcaaatataaaattgttcttaatgtgcatttttattattaaaggtatttgtaaaaattgtcatttgaaagtttaggtatatgcttatttggagaatactgaatatttttttttttttacctttcagcacatttgtgtgtccaactgaaattatcgcttttggcgacagacttgaagaattcagatctataaatactgaagtggtagcatgctctgttgattcacagtttacccatttggcctggtcagtatcttacacttatattcgtagaaaaaaaagaatggatttactcttaaagcatggacagataactcttgatatgatataagaatatagtcatttatcagacaattcaggaatagctttatctaagagtaatacatgtaactacacattttccaggttaaaaaaagagagaagagtaatataatcagctgctataataaaaatgcttaaggattttataggacatttcaaaataaggggaaaagttaaatgcaataga

SEQ ID NO: 136565 - DNA, 1103 bp, Homo sapiens
agcactttgggagggtgaagcaggaggattgcttgaagccaggagttcgagaccagcctgggtaacaaagccacaccccatctctacaaaaaagtgtttaaaacattagcccagtgggatggtgcacacctgtagtcccagcttctcagggggctgaggcaagaggatcgcttgagcctagaagttttaggctacgctgagctatgatcacgtcactgccctgcagcctgggagacagagcaagaccctgtctcaaaaacataaaataaaaatgtgttgtgtatatatatttttaatgtttaaaggatatgaatatattaaatgggaaaagcaagaaaatagaaagtatattagcctgtttttgttagtgaaagaatgtgtgtatttcatgtgtgtgcgtgtgcatgtatagagaaagagtgctgttttaatatatgccgtttacttagctctgagaggtaagcgttctgtttgttacaggattaatacccctcgaagacaaggaggacttgggccaataaggattccacttctttcagatttgacccatcagatctcaaaggactatggtgtatacctagaggactcaggccacactcttaggtacctttcagtggttttatattatgacaaatccaagcgtgtttataatcctccttgaaatagatgttatttatgaaatagaagaacaaattttgatcaagaaatataattttgaggccaggcacggtagctcaagcctgtaatcctggcactttgggaggccacggtgggcagattacttgaggtcaggagtttgagaccagcctggccaacatggtgaaaccctgtctctaccaaaaaatataaaaattacccaggcatggtggcgtatgcctgtagtcccagctactcgggaggctgaggtgggagaattgcttgaacctgggaggcggaggtttcagtgagcccagatcatgccactgcactccagcctgggcgacagagtgaaaaaaaaaaaaaagaaataattggctgggcatggtggctcacgcctataatcccagcactttgggaggccgaggggggcagatcatgatgtcaagatatcgagactatcctgg

SEQ ID NO: 136566 - DNA, 1096 bp, Homo sapiens
tctattcagtttcatatagaaacagaaaaagtcagttgctgaaggtaactgaattctgtttttaaaatgtcttctgcctctttttgtttcttttagtctgccctgctggctggaaacctggtagtgaaacagtaagtatatatatatgtttttatgttgagttgatggttagagttgaaaaaaatgctggccgggcgcagtggctcacgcctgtaatcccagcactttgggaggctgaggcgggcagatcacgaggtcaggagatggagaccatcctggctaacatggtgaaatccgtctctactaaaatacaaaaaaaaaaaattagccgggcatggtggtgggtgcctgtagtcccagctactcgggaggctgaggcaggagaatggcatgaacccgggaggtggaggttgcagtgagccgagatcatgccactgcactccatgctgggcgacagagcaagactccttctcaaaaaaaaaaaaaaaaaaatgctaaccttagaataatcttcccttgttactagaactgtcttgattttgtaaatgaagtaaacattgctaagcagaaatcagagtacagacattctttggcctgtaggaagagtagctgaaaccggagaaagcagaatatggggcgtgatgctgtgaattttaaagccaggtatacagataaatacaccgttcgaaaaaaaaaagtagggcagagtggagacttggtagaataattcagaggtcttataggtcatgtatcgaatttcttcctgtattgggacaaagaaaacagtcacaagcaaaacctttctatgcatagtaagaggttttgagaaaatctagctcaattaatactgaagataatgattctctccttgtcatgaagaaagaaaagattgaaacacgtatattctttcatttaggaggctgtataatttttttttcttttttgagacggagtcttgctctgtcgcccagactggagtgcagtggcatgatctgggctcactgcaacctccgcctccagggttcatgcaattctcatgcctcagccccctaagtagctgggactacaagcctgcaccaccacacccagctaattt

SEQ ID NO: 136567 - DNA, 1655 bp, Homo sapiens
aaaaaaaaaaactgatccagccaaaggaaggggacaggagtcatggcctgctcctttgggaatgtggcacaccccggcccaacagtgtatcttgttctgtcccagtgttcccaagtagtcttgtgtttgtatgatgatatgatggttttctacggtattacaagtttctccaaggttctctttcttgtgtttcagagtccatgttgtacttagatgggcagcggcatttcaactccatgagtggcccagcgaccttgagaaaggactaccttgtggagccctaagaacaccacatttgttgaaaactagcactctacccacagtgacgtggtatctgatgaagacctgatcgagtgtattgattttagtattgcttcgtgtcctccacacaggaggaggatgtattcagcctttaggatgatcagaaaagcagaaagagagagtggccggatggggctgaggggagaaagaattattaaacaataaatactttcaagacaattttaattgtgaacctaccatgttgcctcccatcttctgaaaaaacaaaaaaattgagaggctgggcgtggtggctcatgcctataatcccagcactttgggaggctgaggcgggcggatcatgaagtcaggagatcaagaccatcctggccaacatggtgaaaccctgtctctactaaaaatacagaaaattagccgtggtggcatgtgcctgtagtcccagctacttgggaggctgaggcaggagaattgcttgaacccaggaggtggaggttgcagtgagctgagattgcaccattgcactccagcctgggcgacagagagagactgtctcaaaaattaattaattaattaattaattgaggataccattggatgcattcttttcttacacatattgcaactgtcagtatacaaggtttcctgccagggtatttggatgacgttctttaaacctaaccacttgctctgtgctgtctaaatcccatcagccgtacatgattcctttgcttccctctatttcccagcttttgttgtcagagggtagatgaaaagttggggcgaagggatttaacaaaagttactgcatccgtaaagatttgtgggaagatttaggtctgaaaccataccattagaaggtgtttagagatgatctagataaggaaatacaggaccatttggtcattctttcattcaccagacagctatttagcacattctgctagtggctccgcaggatatatctgatttaaaaaataggaaccacaataataatagctgcttatgcttatggagcattgccatgtgctagataggcaccatcctcagcccttggcaggtctgagctcctttatttcttccaatcaacactatgaggcaggttctgtaaccccccttagggttaggccactcgggaaactgaagcacagagagtttaagtaacttcctggaggtccgacgcgtaacatgtggaggtgctgggattcaaaaccaggcaatgtgggtcccgggcactcttgaccagtgcctgtacttcttccaaggaatagagcaagggaggtcataccgaatatcacagtgtcacctaggaagcccaagggaggtattcccgttaatctgcagccaaggccgggcgcggtagctcatgcctgtaa

SEQ ID NO: 136568 - DNA, 1938 bp, Homo sapiens
ggactataggcacgtgccaccatgcctggctaattaaaatttttctttgtagagacaggggtctcactatgttgcccaggctggtcttgaactcctggactcaagcaatcctcctgcctccgcctcccaaagtgttgggattacaggcatgagccactgcacctggcctgttttctccgttttaatgaagtgagaaatgcatctcaatgggataactgcaggtcagggctctggatcaggatgatatcaagtgatctcacactgaaccaatataatttccatgtggaaccaaagactcactgggagttttatgtggcctctgcagttttctcttggatacgtgtataattttcagtgagattttgaaaggcatcccaggtcagaataccgtgtgctgtagtgcgaccgtcctgatcattgctccttattctcccttgttccagtgaacaaggggagaagaattgccttcagctccacgtcgttactgaaaatggcccccagcgctgaggagaggaccaccatacatgagatgtttctcagcacactggatccaaagtaaggatggtgagattccacgttgggaaaacatttaaaccttggccttttttttttttttttttttttgagacggagtttcgctcttgttacccaggctggagtgcaatggcacgatcttggctcactgcaacctctgcctcccgggttcaagtgattctcctgcctcagcctccgagtagctgggattataggcatgcacctccacgcctggttaattttgtatttttagtagagacggggtttctccatgttggtcaggcttgtcttgaactcctgacctcaggtgatctgcctgtctccacctcccaaagtgctgggattacaggcgtgagccaccacacccgaccttttttgtttttgagatggagtcttaccctgttgcccaggctggaatgcagtggcgtgatcttggctcactacaacctctgcctcccgggttcaagcaattctcctgtctcagcctcccaagtagctgggattacaggcgcccgccaccacgcctgctaattattttgtatttttagtagagacggggtttcaccacgttggccaggctggtctcaagctcctgacctcatgtgatctgcctgcctcggcctcccaaagtgttgggattacaggcgtgagccaccgcgcctggcctaaaccttggccttctccagagccacagttgtctgagtgtattgggagtgacttgcaaatgtttttacttttcaacaagagaaccatggcattaacagggtttaataaatattcatttgtacaggactataagttttcggagtcgagttttaccctctaatgcagtgtggatggagaattcaaaactgaagagtttggaaatttgccaccctcaggtattataatttagtgagaaatccgaataggatagcttccgttcatgatatttgtccaagatttgacacacctttaaactggcctttgtcctgtggcattgttaattcctctgttctgtatacaaaggtggccataagttttgtatttattgatatttatttatgtcctgtaggagcggaacattttcaatcggatctttggtggtttccttatgaggaaggcatatgaacttgcgtgggctactgcttgtagctttgggtgagttacatgtaaggcagccttaacttctgagaagcaatttatatcaccccactgaaatgaaacatttcggaccagtctgggtgtgtgtgggaatatgttatgtttttgaatgaataccacactgataccagctgaatttgatcttcattttagaaggttgtttctctgactttgtaagttcatacattaaaaaaactactgagaaaatacagtgatgatatgtagaaaggaaaagatatagttattttggccctaatctgc

SEQ ID NO: 136569 - DNA, 1166 bp, Homo sapiens
tagatggaaggatttacacttactcaacaagtatttattgagccacatatcttgtctgagagtttgtgatacaaatttgaatggatcatgggggaagcagggagccaatcaacatataatcatacaacttttttttttttttttttttttttgagacagtcttgctctgttgccaggctggagtgcagtggtacgatctcggctcactgcaacctctgcctcctgggttcaattgattctcctgcctcagcctcctgagtaactgggacgccaccacgcccggctaatttttgtatttttagtagacatggggtttcaccatgtcagccaggatggtctcgatctctcgacctcgtgatccgcctgccttggcctcccaaagtgctgggattacaggctgagccgccgcgcccggcccaacgtataattatacgactttaaatgagttgatatctgtaaggtgcatgaaccatgcatggcacatataaatgcttgttaaaatatggaaagtatacagataaccacagggtggtataggagtcaagggtgttatggggaaggagggataactgagtgaaataattgtttcatgattaattaggacaaagccaggaggaaaacaggtagccaagtccttgtgctttgtttctctttcctgaagatgtttgatactgtcagactcatgtgctgagttcttactctgatttgggcactgagtctctgtggagtggtaacaagctgtctggtgggtctgggcttgcttcgggctttgatttcttcaccaaatcttaaaattgagggggcagtcagattggaggatctcccaaatccttcaatttataaaagtgtttgatcctaggataagatgatcaatggaatattaggggctggatcttccaagcgagacaaggcttttcatggatctcagggaggaaattttaaatgttgggaaataattctgcctttttaaaatttggtacactcctgtttccctgcagttcttatttgttacatgcacaacaaaatccactccgccaagatgtctcctttatcgatagttacagccctggtggataagattggtaagtgatatcattttctatgcatacttagaattcttagtaatttcaagatattattgagattacaggacgtactctcctttt

SEQ ID NO: 136570 - DNA, 1349 bp, Homo sapiens
cgggaggctgaggcaggagaatcacttgaacccgggaggcggaggttgcagtgagctgagatcgtgctattgcactccaggctgggcaacaagagcgaaactctgtctcaaacaaaacaaaacaaaacaaaactacaaaaattagccgggtgtggtggcacagcgcctgtaatcccagctacttgggagactgaggcaggagaatcgcctgaacccgggaggtggaggatgcagtgagccgagattgtgccaccgaactctagcctgggtgacagagtgagaccatctcaaaaaaaacaacaaaaaagaagataggtgggaatcctgttcatatctccatcataatggctcttactggctaacactgatacagccccattaagtgaataattgaagttatccttttttgtttgtttatataaaccctagtgattggcacaaaggtattcatttgtgcacctttaaagagacagtatagttctttcaggtttttagggagcagaggcttgatcctgtccctgagctgtttgttgtggcattaaatggaaatctatggatctttaaatcttttgagtgcatgaattgctttttgtagttcttgagctcattgccataatccgtttctcatatttctttgtttcatggaatgacctctttatttttgtttcagttcgagataagttgcgggagatagtaggagcatccacaaactggaggtatgcatctttgttttcattcattcttttcatccccaaggtattatactacactgtatttaggctcagttgatggtctcacagtggggatggggagccctatgttcagagataggttgagaagtattttgcttgggggagaaggtcaacatttcaacatactcatcagatgacacctcattgtcatgaaagaagatgatttacgtatattctgcattttcaaagtgcatttaggtgtatattacttcactgattctcataacaaaacttgtgacgtgcttacgacatatgttcctgttcctttttttacacatgaaactgaaactcagagattgaatgattaaatgtcagggtttgggacttgaacccaagtcgctaagtttctctgtttcatgcaacttgactcctttattgcttcttgtcagttcaaaattagtcaggcctcccatattgtctttctctttctcgcagtatttccttgttgtaaagtaggatcatatccctcttggtgtacataattttgaggctaaaatgagatagaaaaaacacgagtgatcactagatatataataatctattgttggtatagaaattatctaatgacttatttttaaattctttatatgaaaaatt

SEQ ID NO: 136571 - DNA, 1079 bp, Homo sapiens
agggtatttagccattcagaatcagatcccatttcttatgttggatacatttaacgtgtctattatagttcctattaatgtgttgggggtcatgatttttttgctctttcagctaatggtagcaatagaaaggattagctttttccagtgtgttctttaaaaccagatatattcagttgtagaatgctagtttcttttttgagatggagtcttgctctgttgctcaggctggaatgcaatggggccatttcagctcactgcaacctctgcctcctgggttcaagtgattctgcctcagcctccagagtagctgggactacaggtgtgcgccaccatgcctggttaatttttatgtttttaatagagatagggtttcaccatgttggccaggctggtctcggactcctgacctcaggtgatctacccacctcagcctcccaaagtgttaggattacaggcatgagccaccatgcctggctgcttgtttctgagatggaagaatgaaggaatacttactctgtttccttcagtaaggcatatgaacctatagaagatacataaaacaaaataatgaaaaaaatggaaaattcaaatcacgttctgagaaaatgcagattagatggtcaaaaacaaaaagacggccaggtgcggtggctcatgcctgtaatcccagcactttgggaggccaaggtgggcagatcacagggtcaggagtttgagaccatcctggctaacatgatgaaaccccgtctctactaaaaatacaaaaaattagccgggcgcggtggcggcgcctgtagtcccagctactcgggaggttgaggcaggagaatggcgtgaacccgggaggcagagcttgcagtgagccgagatcgcaccactgcactccagcctgggcgacagagcgagactctgtctaaaaaaaaaaaaaaagacaaatattaatctgtatacgaaagtacaggaattgaatatttatcgtgaaaaagtgaagctaaaatatttaagagagaggcttgttagctgtgtgattgaagaataaacagatccaaaaccccaaaccctccagcaagaatttt

SEQ ID NO: 136572 - DNA, 1016 bp, Homo sapiens
gcccagccactgccgccgactgcagtgacatactgcggctgatcaaggtagcggagagccagagctcctcccggggcgtggggtggaggtggctccgtttcccagagtggggtgattcacgtcttgaggtctcggccggtgtgagagcccagcctgttcccctttctgcgcccatccccggctcggccgccaccccgcccgcccgccccattccgttcccctgagctggccgggccggagcctcattttgttttctacttttttctctcctatgtgcatccccccaggagctggctaaatatgaatacatggaagaacaagtaatcttaactgaaaaaggtaattcaacagtggcgggacgggggacaagcgttcggtgcctgtcaccttcgccaaggccattaccgcccctgctcccccttcttgcagatctgctagaagatggttttggagagcaccccttttaccactgcctggttgcagaagtgccgaaagagcactggactccggaaggtaacccctcgccctttccagaagccagagagaccaagtgttatgtaagaagtagtgtcggctgtgtagaaccactgactacacaggccgaagttactgagaacttggacagaaaaaatagccagcaagtgttcaaactactgaggaaaaaaaaaaattagatatgctgcacttaagaatactagggcaggttaaaagagctgtttaagtaagtatcagagtgctgtggagactcggaagtgtttaagctgcttaagtaagtataagtgctgtggagacccggaagagttagatataatgtcatttgttgtaattcagtttcataaaatggttcttgtttgaccctaacgtaacagtttttgtaattgtgttaaatcacatttttttctttaatttgtcccaatcttcaggttacagtctctagcttcgccatgtacatggcccttccgtgtacatggatgggcggggaggtaactaaaagatcctttacacaataaagtaga

SEQ ID NO: 136573 - DNA, 1717 bp, Homo sapiens
ctgtttctgggcaatgctgcttcttctgactcaacaaatggggagagcaaattgaaaatgcgtaaattggaaggcaagttctgaaattaaacgttgtactttggcctgatgttctgacctttaaggaagcaagagtttgtaaacttccaaatatttactattctgaactgccgtgtaaacctgacgtattcccaagtcaacataccagtataccaataggatgtgaataatgtgtgtgttgagtttaaaaccatagcagttttgctctggcaagtaatgaaagcgttctcgcttcctgagtgtgagctccagcagactgcagagtggccagtccacagttgtagcctgacttcagtgagttctgatgtgtgctttttgcaaatacatgttctcagaacagtgagatcatccagcagtggcctggactgcactcacataaaaatcatgagacagccatggctacttgtttctgtaatacatgcatgtgtgttttttaaaacctatgataggcctctgattctgcagctgcaacttttatggaatgttttccttctccacatctcatgtgatgctcttattacaggacacagcattgttggttttgccatgtactattttacctatgacccgtggattggcaagttattgtatcttgaggacttcttcgtgatgagtgattatagaggtacgattgagttcggagcagagggtctgaagagagttcagagttataaatgcttacaatgactttttaaattgtactctttctttttaggctttggcataggatcagaaattctgaagaatctaagccaggtatgtcttagtttttggtttccaaatttgtaagtttactggattattttaatgatggaataaaaattgggtcttgagagcaggctgaaatgtcactgagtgtgtgttttactctctcataataggttgcaatgaggtgtcgctgcagcagcatgcacttcttggtagcagaatggaatgaaccatccatcaacttctataaaagaagaggtgcttctgatctgtccagtgaagagggttggagactgttcaagatcgacaaggagtacttgctaaaaatggcaacagaggagtgaggagtgctgctgtagatgacaacctccattctattttagaataaattcccaacttctcttgctttctatgctgtttgtagtgaaataatagaatgagcacccattccaaagctttattaccagtggcgttgttgcatgtttgaaatgaggtctgtttaaagtggcaatctcagatgcagtttggagagtcagatctttctccttgaatatctttcgataaacaacaaggtggtgtgatcttaatatatttgaaaaaaacttcattctcgtgagtcatttaaatgtgtacaatgtacacactggtacttagagtttctgtttgattcttttttaataaactactctttgatttaattgtttggtgtaagcatttttactagttctttatttcttacacatctttcttgctgttgaagacaaaaatgacccgcaaacatcattggatgaacagaattgctcaaaatagtttttaacccaatttaaagtttttatggtcatgtgttatgttagtattaacaaagtctggatagaagccagtttaccagttggctatcaaggttttatacatagcaacatgtaaaacatgacttttttttttttttgag

SEQ ID NO: 136574 - DNA, 1031 bp, Homo sapiens
ctattttgagcaattctgttcatccaatgatgtttgcgggtcatttttgtcttcaacagcaagaaagatgtgtaagaaataaagaactagtaaaaatgcttacaccaaacaattaaatcaaagagtagtttattaaaaaagaatcaaacagaaactctaagtaccagtgtgtacattgtacacatttaaatgactcacgagaatgaagtttttttcaaatatattaagatcacaccaccttgttgtttatcgaaagatattcaaggagaaagatctgactctccaaactgcatctgagattgccactttaaacagacctcatttcaaacatgcaacaacgccactggtaataaagctttggaatgggtgctcattctattatttcactacaaacagcatagaaagcaagagaagttgggaatttattctaaaatagaatggaggttgtcatctacagcagcactcctcactcctctgttgccatttttagcaagtactccttgtcgatcttgaacagtctccaaccctcttcactggacagatcagaagcacctcttcttttatagaagttgatggatggttcattccattctgctaccaagaagtgcatgctgctgcagcgacacctcattgcaacctattatgagagagtaaaacacacactcagtgacatttcagcctgctctcaagacccaatttttattccatcattaaaataatccagtaaacttacaaatttggaaaccaaaaactaagacatacctggcttagattcttcagaatttctgatcctatgccaaagcctaaaaagaaagagtacaatttaaaaagtcattgtaagcatttataactctgaactctcttcagaccctctgctccgaactcaatcgtacctctataatcactcatcacgaagaagtcctcaagatacaataacttgccaatccacgggtcataggtaaaatagtacatggcaaaaccaacaatgctgtgtcctgtaataagagcatcacatgagatgtggagaagga

SEQ ID NO: 136575 - DNA, 1056 bp, Homo sapiens
gggactacagctgcatgccaccatgcccagctaattttttttatttttagtagagacagggtcttgctaagttgcccaggctggtctcaggtcctcctgccttggcctcccaaagtgttgggattacaggtgtgagccatggcacctgaccaagataattttgaaggtaaagcggatcactgaaattagggtctcctatgtgtactgaaaaagtacacatttttttacaggaaatttgcaaacagaaaagctccagttggacacaagcataaatcagataaattaacatctcatttggagggtgaatttgtagtcctgtgttaatacaacggatttttagagcagagaaacaatagcccttaaaactgccagggggtaaagaagtaaacaagtgctttcttaaggactgaaatgaaaaagaaaaagaccatttccccctagatatgtgaactcctttcattattcatgacattggcccaaattcctaaaccgactaatttccacaataatgaaaacagtagttgataagaaccactgtagactaatgtccaagataaatgttttccaaaagaagtcagatacctgaaaacaatgctctgtatctctctgagttctccagcaaatcagtactgagctcctcagtcaaaggtaatgttgtcctgcaagcctttgtatcagtgtctgttatggcttcctagattagaaggcagccacatataaaaatgtagccctgtattatatttaatacaggagggctttgggatttattggtggctcagagagcatgccatgaaaatgggcttacagagtcaatgatcaaccaggggccctattaggcaggcaagtaactacataagagaaactctggcaaaaatgaaagggtaactaaacacaaagagccttgtggagaagtaagatattttgcaaattgtgttttggaaagtgagcctcttagaggaaaacaactacatgctgactgtggttaaatataggaataaattaaattaaccaccaagttacaatataactctttgtttcctcatctttcttagaact

SEQ ID NO: 136576 - DNA, 2054 bp, Homo sapiens
ctctgaagggacgcacagttatcgtgaagggccccagaggaaccctgcggagggacttcaatcacatcaatgtagaactcagccttcttggaaagaaaaaaaagaggctccgggttgacaaatggtggggtaacagaaaggaactggctaccgttcggactatttgtagtcatgtacagaacatgatcaagggtgttacactgggcttccgttacaagatgaggtctgtgtatgctcacttccccatcaacgttgttatccaggagaatgggtctcttgttgaaatccgaaattttttgggtgaaaaatacatccgcagggttcggatgagaccaggtgttgcttgttcagtatctcaagcccagaaagatgaattaatccttgaaggaaatgacattgagcttgtttcaaattcagcggctttgattcagcaagccacaacagttaaaaacaaggatatcaggaaatttttggatggtatctatgtctctgaaaaaggaactgttcagcaggctgatgaataagatctaagagttacctggctacagaaagaagatgccagatgacacttaagacctacttgtgatatttaaatgatgcaataaaagacctattgatttggggaaaaaaaaaaaaaaaagaaattaggctggggctgggcgtggtggctcacgcctgtggtcccagcactttgggaagctgaggtgggcggatcatgaggttaggagtttgagactagcctggccaatatggtgaaaccctgtctctactaaaaatacaaaaattagccagacatggtggcgtgcgcctgtagtcccagctactcgggaggccgaggcaggggaatcgcttgaacccgaaaggcggaggttgcagtgagccgagatcacgccactgcactccagcctgggtgacagagtgagactctgtctcaaaaaaaaaagaaaaaagaaaaaaaggaaattaaggccgggcatggtggctcatgcctgtagttcaaactactcaggaggctgaggcaggagaattgcttgaacccgggaggtagaggttgcagtgagccaagatcgtgccactgcacactcccagcctgggcaacagagagagactccgtctcaaagaaagaaagaaattgcactaattccttaacatcatctaatatccagttcaatgtacacattttcctggttgtttcatgaataactttttacagttggttcgtttgaaccaggatccaaacaagatctgcctgttgtgtttgactgataggtctcttagaactgtaatagtttccgctccctcattgtcccttgctatttatctgttgaaaaacctggcttatttgtcctttagaattcctgttttctacaaggattgagctgggaggggaaaaaaagaatttctcatgttctggctgtggccgaatgtatccatttagtatcattctgtttatctcttggtttctttcttctctatatttcccataaacttatagttggatccgaaggcttaattagacttaggttcattttttttttttgccatagacagtactatattaatctatgctgatgaatgaatgaacttgttttacataacatattgtgtaagtatttccctgtcagtacttaatagagctacgcattccttctctagttgcttaatgatttcctagtatggactaccatgatctacttaatccttaccaacataggttgtttccagtttttagtttttaacaatgcaataaatctatcaaattcctggggaagacaaaagcagattaataaactgagatagaaaaaataagctagtagtttacatgtttaagaatttttggttgtatattaaaagatcaagtgaatagtcactggcctctaaaatatttagaaatctccaattgtgccgggcacggtggctcatacctgtaatcccagcactttgggaggctgaggcgggtgaatcacctcaggtcaggagttcgagaccagcctgcccaacatggtgaaaccacatctctactaaaaatacaaaaaattagccgggcgtggtgg

SEQ ID NO: 136577 - DNA, 1025 bp, Homo sapiens
ttcaggaaataaaaggaagatatattgattttttaattagaatcaactgtttggctgaatctgcataatgaggattaatggagctttatttcctgctctctctgcccaagtcactctacagtagggccctcagagagccctagtaacttcttcaatttactgacagatggatcactttgcagtaaaataatatttaatggtcggtaactgcgagaatgtgggatctcattgtcctcctcagcctttcttcaacaaccccccaagtcctcaataaaatggtttgaccctgtcccccataataatttttaatgttcatgttcagccaaatactcaggacactaaggagttgcactatttcttttcaaactgcattcaagctctttcttttgttttaaaagccaggaaatgtgaagaattcacctggaactaagtagaaaactccatgctctgccatcttaatcaggtaaaaaacaagaaatttctgtgattattttcagcattgtagtgccagctgaaatgacttgtttttaattaatttaatttaattaattataacagtttcaatttgatgtgaaaatattttattccatcttttagtttctgggcttaaatgctgtgacttacttatttgtgtttgttccactaatgttacctgggttttttagacaagctagaaccagacagttgggatttgtctacaaatgtatttcaaacaattgaaaagtgtcattattccttaggtttttttcaaacaacactttattatagtaagtacacttgtatttatctaatactcagtgaacactggaatgcatgactgttacagagaggctcaaaacactagttatattgtttgtgtatatatgaaaaattgtataatagcacttgtgatttcctggtaattagaagactgtaattgaatttggaagcaacctagatattcaactacaggaaaatggcttaattatggtatatctataaagaagaatattattattctgtttctacagtatttaattgcatgg

SEQ ID NO: 136578 - DNA, 1028 bp, Homo sapiens
aggtcccaaatctggccacaaatcagaattattcaaggagacagtttccaagcccctgcgcatggttctgactgactttttagttggcgtccaggaactgctagttttgaaaaagccccccaaggtgattatgaaactttcatttcagaagctcacaatgcacttaccagcacagacattaaaggtccgttaacgatgcagtgggtctcaaccttgactgcatgttagagccacctggggagcttttaaaagtcccgatgcccagtctagaacctataccaatgacatcaagaatctctaggggtaggattaggcatctagtttttggagcaagcagccagccttgagatctactgacttagagggaagagcaacagcagggggcatcagaaggctttatagagaagaacatgcctatgctgatctttggagctaggcagacaaggttgaaagggccttccaaacagagaagaaaagcacatgcaaggacacagaagtgtgagagtgttcagaacagtgttaagaccttgggcttcactgtgttccttgtgagagatactaaagttttctgtagctgcttcctcatttgtaaaacaaggatgagatgcttaccaacctcaaattattgtgtggattaaattcattcctacgcaaagcttagaacagtgcttggcccaaagtaagggctgaagaaatgtgagctgttacttttagttggcatcttgtaagatggcatcttgtaactacctgtgttacggtggtgcacggtcttggggctctccaaaagtattttttatttcaaaacttggtagtcagttggatgtggtagatgagggagaaggataaattaaggtttctgcccaggcttttgacttttgactgtgggatctattcattgaggtgggaactattcattgaggtgggaaagtggaagaaggttgaatttggtttgagggggaggtgatggtttggttttgaacaggttgggcttgctgaaatatctgggcattggaagggggaaatcagtt

SEQ ID NO: 136579 - DNA, 1021 bp, Homo sapiens
tggaagaaatgctactggtttttaaaaagcaaagcttaactaatagaattattagcttttcttgagacagctttctgtgtcctcattactctgctctgtgtgagtgttactagaatttgtgaaatactgactgagcccttcacttatcttttctaaagcagcacctttggacacctcattctgggaagcctgctcgagtcatagtaaaggacacacgctttatgtggggagaagtggtaaaaatggagttttgtcttaattacatgaaactaagctttaaaatattttataacagattatttgagctgcataatctaaacatgtcaaacgttcagtgggactatttttatatatgtatatgtgggtgtaggtcataacatttcagtttataatataaattgttatttcagtttataagctatctctcagaggagactagctcttttgagaattcataatttaaagttttagactgaagtaaaatgcaacatagataatagtgtaaatcagatataattgagggctatatggcagtaaaactgctagtgccagttttcttgtttgcctgttatacatttttgatttttgtttttgtattctgaacattttgagagatcatatgtttgttcaattacatttagagttggtttgggaataaatatcttctaaaaagagatttatcttaaaaatggaagtcctaaaaattagtttatccagagtttataaagtcaaatattcagtaggcatagactggaatagataaattcatggaaatcatatcctttcagtacaccgtataacttcaatattacacaagtaacattgaggagaatgccatcagctttgttctcccttaaattctttggttttctttttacattttgggaacaactgcatttaaaatgttattagtcagtatatagtaaggattaggtgtttgctttctgaaggaatggtccagtgaggtgattgggagaggttattttctacctaacttgtatatgccctatacctcttgggc

SEQ ID NO: 136580 - DNA, 2049 bp, Homo sapiens
tggaatcacctcatcttccacctccaagcaagtgtgcgtgtttgaccccagcaaagaagggaccatagaacaacggaccaggagaactcaagtggttaccaactgttgggagaataagagcaagatgaattacgcgagatgctttcacaagatgatttcttacaatggcaagctttatgtcttcggtggtgtctgtgtgatcttgagggcctctttcgaatctcagggatgcccttctacagaagtatacaacccagagactgatcagtggaccatcttggcatccatgccgattggtagaagtggccatggtgtgactgtgctggacaaacaaataatggttcttggaggcctttgttataatggtcattacagcgattccatcctcacttttgatccggatgaaaacaagtggaaggaagatgagtaccctcggatgccctgcaagctggatggtttacaagtatgcaacctgcattttccggactatgtactggatgaggtcaggcgttgcaactaatgacatcctcctccctaaaaaaagaggcaaacaaagtatttgtttgcacagagtaattaattaaaacatataaagaaaaacctcaccagttttactatcaaagccattggtctaacattgtaagaatttttcattctgtgctagcatcctttttttcttttcagtggcctcaaactcatgcaataagttaattctaagtgctagctcttgaaactacttccagaagcagttgaatagaatgctccacttatctgggatattgattttctgctttaaacatttctttcagatgttagcgtaggagtcatgtgtcttctaagagaagacccgataagtgtcactggatgtgatttcagtctctgtctctatctgaaacctttttgaagatttatttcagtgtatttcagtctgttatactttttagttttattatttaaaagtttaaaactcttgacctttttgcatggctttttgctgaaaatgcaaaaatataaattttctacaaaattaactttttatattcaaaacactatttctaagctgccttctcttatccgcattgtgttagtgaaagcatattcatactcgcatacaacctataaatacacaaggcacatcccttttatgcgtggttaggattctatatttttaagctagtgcacttacttgcacacacagttcgccatacttgttgaattttagatgtaacgtcttttcacatattaacatttttagaaagttgaaataactggagtcctcatttgctatcaaagtagcctatcttcagtccatactgattcagtaatatttgaactccttatatttctgaaacatgtatggttatgaaaactaacactttatattttattttcaaaagtaaatgttagtgttctttgtcgatgtatgtcttttctttttgaaaatgtttttctttgcagtctgtttaacgttaccctgtttttagtgagaatcggagtggtatatgacaagttctggccctgcagcatgcaagcacttttaaagagcatttaggtaataccagactcctaaatcaaggccccttaaaagtaagtgcaactcccattttttacattcagtaaggctgctgcatttgttattgaatggaaggtagaaactcttagaaaatttgacctcagttttgacttagaggtaagaaatagaattataatgttactggttttatctacttgtttattttgtacaaaatacccagcgacactagggatgtaagccctcagtttttgttttatttactgaaagctattagcatgaaggatagtaaccacaaagttcagaatggatcaagaatagctgtttaaaagcatttataataagtgttttaggattagctgcacctttcaactctttaaatgcagaggaaaaaacatagttgacaaagttaagcaagaataacctgggagtggatcattgaaattgatgccatttgcgcatgagtagtctatatctgatacagactagatctatactggcaaaacttgccagatctt

SEQ ID NO: 136581 - DNA, 1010 bp, Homo sapiens
ctaaaatttaaaaaaaaaaaattttttttttttttttttttttttgagacagagtctcactctgttgaccaggctgaagtggaatggcacaatctcagctccctgcaacctccacctcccgggttcaagtgattctcctgcctcagcctcccgagtagctgggactacgggtgcacaccaccacgcccagataatttttgtatttttagtagagatgtggttttaccatgttggccaggctggtcttgaactcctgagctcaggtgttcacctgcctccctaagtgctaagtctacaggcgtgagccaccccgcctggccaaaaattttatttttttagagacgaggttttgccttgttgcccaggctgcagtgcagtggcaccatcatagctcactgctgccttgaatccctgggctcaagtgatcctcccaccttggcctcctgagtagctgggactacaggggcacaccactatgcccagccttttacatttctaatagtgttctattactattgcactgaaatttgaaggaaattagactttgtaagcacatttattctttaagtattttttactctctaaaagggttgaagggatagagaactttaccaaattgtgctaaaactctcttgccctgagggcacctctccctcacccctatttaccctggtcactttacttctgaagttcacttctgaagttcagttcatttttgactttgcctgcttggagagaagagggtgagtaaattcttactacgatttatctttatttaccatttggtattgactataaatacagtatgactgaaaggatttatgcttagcatgaactgatttttcatagctttatccttggtcattaactcagtttttcaggacaaagggattgattaaaggcatattgcacctagctttttttgtgatgattttgttttacgtaaatcaatataagctttagttctgagcaagattttacaaataaagacttctcataccagggtacat

SEQ ID NO: 136582 - DNA, 1073 bp, Homo sapiens
ggattacaggcatgagccaccgcgccaggcctctctttttaaattaaagatgaaaacaagcataggacaattggaaattaaaaaggaagacgtggaacagggacagctttcttgacatttaaaaggagaaaaccgtggccaagcgcagtggctcacgcctgtaatcccagcactttgggaggccaaggtgggcagatcacctgaggtcaggcgtttgagaccagcctggccaacatggtgaaactccgtctctactaaaaatacaaataaatttgctgggcttggtggcaggcgcctgtaatcccagctacacgggaggctgaggcaggagaatccgcttgaacccaggaggcggaggttgcagtgagccgagactgcaccactgcactccagcctgggcagcaagagcgaaactccgtctcaatcaataaataaatacatttaaaaaaatgaggaaactcttaagaaattggaagaaaaaaacaaatgataagcagaaattgaaaaggatcagagagtctggaaatgactggagaaaaggtttggagcaggaaaggaagaaggggaagtactatgagttaaggcttttaagttttagttccaaatttattattcagaaaatgccacttgtgtaataggtaagcattgttcattcaaaagttagttttaggatgaaaccttttatttggctttcctgttctatcataaataggaaaataaaatccctcataagttgtgaattctagaacttagttgtactatctaaatattaatataaccagaaaataaaaagatggtcctaagtcacacctgtaatcccagcactttgggacgccgaggcgggcagatcacgagttcaggagatcgagaccatcctggctaacacagtgaaaccccgtctctactaaaaaatacaaaaaattagccgggcatggtggtgggcacctgtagtcccagctactcgggaggctgaggcaggagaatggcatgaacccaggaggtggagcatgcagtgagccaagatcgcgccactgcactccagcctgggcaacagcaagactccgtctcacaca

SEQ ID NO: 136583 - DNA, 1026 bp, Homo sapiens
agcaaaaattgttaaaactctaagttaatattttcttctgaatgcatggaagtgtttaacattgttgtctttgatttttttccaggtgattcatggcaggggacgtggaaggattctgttcctccatccacgacaccagtgtctctgctgggttcagagcactgtatgaggagggattgcttcttgatgtcactctggttattgaagatcatcagttccaggcccataaagcactcttggccacccagagtgattacttcagaattatgtttactgcagacatgagggaacgagatcaggacaaaattcatttaaaaggtctaacagctaccggtttcagccatgtcctgcaatttatgtactatggaactatagagctgagtatgaataccgttcatgagattcttcaggctgccatgtatgttcaacttatagaagtggtgaagttctgctgctcttttctcttagcgaagatctgcctagaaaattgtgcagaaattatgagactcttagatgatttcggcgtaaacatcgagggagtcagggagaagttagacacctttctgctagacaactttgtgccactcatgtctaggcctgactttctgtcctatctgagctttgagaagctcatgtcttacttggataatgatcatctgagcaggttcccagagatagagctgtacgaggctgtgcagtcttggctgcggcatgatagaagacgctggagacataccgataccatcattcagaatatccggttttgcttgatgaccccaaccagcgtttttgagaaggttagtgcatttgaaagcaatagacagtactcatcatttagttaaggcagtgtatgtctttatagataagattcacagacttaagagccaagaatgaataacttcattttgttatttcttatgttattcaagaatgaataacataagagtactttatgtataagaagcctgatttgttgtgcatttaggttttgtaaaatacattttgtgggtgaaagataaaccacgt

SEQ ID NO: 136584 - DNA, 1038 bp, Homo sapiens
gggaaggcattgacagagtggtgacactggcagtgacagcctccctaaagaaggaggtgtagagcaagtgacagcagttgactgtagtgtccgctgcttctctggagggctcggggtccatataaatacctaaccaggggaaggacagaacttgggagattgggtcccagcagtgtcactggtggaaattcagagccgtagatgttggctgccacatccttagtgctcttttaggctagtgtggtttgtaggtcatgttctagaaaatagctgcaacatatgattccaagtcatgagatattctagaaagtgcttaaaaatggctgtagtatcccagagatttgtccatatctgctgtccttagtttgggaacatctttgatagtgcttcagtgttataccagcagggaatgcctcacaactgttcggtggacgaaactgccaagaggcactgaagattggcccaagattaaaggaccagttggcatagtttttgtttagcagggcagggatggaggacaggcagagagttaagggaaatgaaggccctggtaagaaagtggttgctctgatatggtaaggtctaagctggagaaggacagaggttaagttaggagatgatagaccaagtgaaaagagagtaggaaggttaagtaggaagttgacagttaagatttcagatgtagaccagttttggatcaggaacaggtccaagtggggtgggagtagggtttgcaatggaataagtggggaggttgtaggagttgagatggtcagggagttttgacttacagtttttggatggctgatcttatgtgaacattgaagaggtgtgaaagatgacttagccaggtgttgaagtctttttttttttttttttttgagatggagtcttgctctgttgcccaggctggagtgcagtggtgcgatcttggctcactgcagcctccgtctcccaggttccagcgattctcctgcctcagcctcccaagtagctgggattacatgtgccagccaccacacccagctaattttggta

SEQ ID NO: 136585 - DNA, 1073 bp, Homo sapiens
tatgttgagaagttggctgctttgagattgtcaaatttacatttttttactttatgggttacagaagtgagaaatgttatgactcagaaattaattctgtttttatccgtagtaagcctttgcattctcttttcgatatgcaactgtggcattttctgcataggcatcaattttggtaggagaacagtttggggatgaagatagtatgaaatcatttaaatttttcattgagggtaagtatattatatcaacctctgagaatctagcttttgcattgaataccttaagcttttgtatgaattttcaagcagctgtggaaggaatgtgaaagcaataaattattgcttatggcacaaacatagaggttaattttgaaatgtcttttaattgcctataattttgccttcacatcagaatggcagccttataactgaaaaggaagcatttaatttctttgcctttaatttcctgtccagttttacccccaccaaacttctttttttactggtcactagagagtttgaagtgttcaaaaattctgtgatataaatagcagtaatagtcttccagggcagaggtaggaagaggttgaggtttgtgcgtgcacgtgtgtgtgtgtgtgtgtgtgttgtcacttatctcttacactttcagttgttctcaagcctgtggtctcaggacttctttgtacttatttgtactcttaaaaattagtgggggccgggcttggtggctcacacctgtaatcccagcactttgagaggccgaggcgggtggatcgcttgaggccaggagttcgagaccagcctgggcaacatggtgaaactccgtctctactaaaaataaaaaaatgagctgggcgtggtggtgggctcctgtaatcccagctactcaggaggctgaggcaggagaatcgcttgaaccccggagcagaggttgcagagatcatgccactgtactccagcctgggtgcagagtgagactgtctcaaaaaataaataaacaaataaaaattaattctattacatggtaacctaaataacatttttttatgaaaaataacttttctaaaa

SEQ ID NO: 136586 - DNA, 1043 bp, Homo sapiens
cgagctaggcacgaattcgccggccctctctgcacggacccgagtcaaacatttggtagacgccgggacctcgtttgtcttcgagtttacttaaattgtttgaaatgtaatttttttttccagagagagcgagaaagaaaaaggaagaagcataattcagccattttttgcagcacacagctgcaggtaccatgattattttttgcctaacccgttccttccctttaacaattcaatttatgcctgaaatagaactatgcaaaatgcgaggcataaaactaggaatcggaaggtctgggttcgacttgggtgactctgagaaaaaatcgcgtaccgagccttggtttcttatctatgaaatatagtcggtactaccaacatcgcagggttgagaggactatatgaggtcatatatgtgaaaataatccttaactgtagagtgttgtaagaatgcaaggccgttttttaagtaacctttggtagagtggttaatgtagtggctaactgttgctgcctctttatttctatattataaatataagcaaataagtacggaataatagtaaagcagtgctgtgaatccatagatctgtaatagtcacgttgcttggccttcctcctacgaagtgctaactgcttatttaaataacggtattctttaattcaaatgtaacgttaccgtaggggctttgcttttcatcgttctaggccgctttaggccccttttcttactccaaatatttaacaccttacatttgttagtcttttctgttttccgaatttgtttgcctttgttaatctgattaagtggtaatttagaaaatgctttgcagacatatatgccctaattttaatgcctgtttttcatatctagggagcaggatgcttgaatacttctactaatttgaaaattggttttgaagagcttatcaatgcattcatgtttcagtaatccttaatagatctagaaatgtatagaacatttcaactttttagcacttaatgtaattatataattttattctcatttttaatcacaacac

SEQ ID NO: 136587 - DNA, 1056 bp, Homo sapiens
ataattatctctttctagcaaacttgaacataccatctttcccaagaggccaaaatagcacacggtgtactgttttgctgaagtagactacttcgtgggagagataacacaatcacttcaatcttttggaaatacgcttccttattccgatttaaactataacaagctttaaaaaaactgtaagacactgaaattcccaagttgttcacactttctttccatcttttccaatagctcctttaagatatttctgttcattatttaaaaatccctgcttgccatatttgtatctattactacatgacaaattaccccagaatttcacattaaaacaaatttttaaaattaaatcataaaataaactttaaaaatgcatacattccacttctgaatatttaaatgttcatgcattattcccgaacatctaaacgctgagtttggatttttgtacattaactaacattttaagctatacattactatgtggcactgacctgtctaaagagaggcttctgttcttgattcaagcaagagttgaaacgtttctgcgctctttgtaccaggtataaatgtagtgagtgtatgtcataagccattgtgtgatcaccgtgcttcccgtccctccttattttgacattgcaaggtctcgtggaatttcaaatgtgcttttttggatatttatgtagttttaaaactgggctgtgtctttcaatcaatctatacgtttactatatgaacccctccccaagttatcttcaatcaatgatgcctctttcactcttatttcttatttttatgttattattattattttttttttgagacagtctcactctcggccaggctggagggcagaggcatgatctcagctcactgcagccttgacctcccgggctcaagcaatccttccacctcagcctcccgaatagctaggaccacagacgtgccccaccatgctcggctaacttttcttttcttgtttttgtttgtttgtttgttttgtttttgtttgcttgtttttttctgagatggagtctgtcgctcaggctggggtgc

SEQ ID NO: 136588 - DNA, 1008 bp, Homo sapiens
gcccctactcggccttcccgtctccgcttccccgccccgcactaggacccctgcagatgatcaggcggcagccggggtgatttccttcctcttttggcaacatggcgggcggagaagctggagtgactctagggcagccgcatctttcgcgtcaggatctcaccaccttggtgaggttttgcttggggaggatgcagagtgagctcaggagtggaggtgaccgagcctcccggtggtattgggactagtcagtgtcgggagcatgggtcaggagcctgggtcaggagggagacctggaactgggcgccctaagccatgctcgcgccgcctgtacccaggccagtccacgatctgggcgcaggcgtgtacggtcgtgggacttctagcttctggagggttcggctggaaagtcttgatgttgattgtcatggtttcagcctctgaacgtctgggaagggggtgtcctgtctgcattacttttagtgctaatgttcccaagattggggggatctctgacttccagatatcccctaatagttgagtggaggtgtagtctgttgtgtaatgatgaagggctcttaacagcttcccagccataggagtacaaagttactgatagggaaaaggagctttagaagtagtggaaagctgtgcagatggtggcaagatgtagatagcaaacgtaaagtcaaaggaaaagttctcatttgttttacgtgcagtgttttaaaatatatttcattgcaggatgttaccaagttgacgccactttcacacgaagttatcagcagacaagccacaattaacataggtaagagtaacttaagagacctaaccttggtctccaacaattaattttaacctcactttttgtgtgattacttgaatagtatgaggattcagatattcaagaaatagatactgagtccttgtgaataaagcatctgctacatttgcggtgcagggggagcacaaagaatgctgcccacatgtagcttacagactcgg

SEQ ID NO: 136589 - DNA, 1059 bp, Homo sapiens
ccacctcctgggttcaagtgattcttttgcctcagcctccccagtagctgggactacaggcatgcgccaccacgcccagctaatttttgtatttttagtagagatggggtttcaccatgttggccaggatggtcttgctctcttgaccttgtgatccacccacctcggcctcccaaagtgctgggattactggcgtgagccaccgtgtccagctggctttgggttttctactcttaacactatttgaaaaaatatttggtatgtaattaaatacacatgaattaattttttgaactttgtccataggtacaattggtcatgtagctcatgggaaatccacagtcgtcaaagctatttctggagttcatactgtcaggttcaaaaatgaactagaaagaaatattacaatcaagcttggatatgctaatgctaaggtaagctgtgtactgtggaacgagaaactaactttaattgttgtgcagataacaaatcaaaatctttttttattgaaattttagatttataagcttgatgacccaagttgccctcggccagaatgttatagatcttgtgggagcagtacacctgacgagtttcctacggacattccagggaccaaagggaacttcaaattagtcaggtgacctctcttttgctacaaacactacactttatattttattgtcttctgttttgtgctttttgaaatatcgaggtgttaaacggtgaacctaatggctaaatggttttgttgtttttccattgtttatgtttttatgggaaatctgaaaagtcaagcatctaaacctaagttaaaatacttacatgcaatttctccaaactaaaagtatcacttaaacaaaacagaaaaacaactcattggattgaagggattctttttctaggcttcctgaatttcttttaaacagcgctgtttctgtatgttaaataggagagaaacagagccatttctaattacttctctaaaacacttgaacttgttccccatctgttttctgaatatgattgcatacctgtttttttatcaggatactgaca

SEQ ID NO: 136590 - DNA, 1152 bp, Homo sapiens
ggccaaggcaggtggatcacttgaggtgtcaggagtttgagaccagtctggccaacatggtgaaaccctgcctctattaaaaatacgaaaattagccgggtgtggtggggcacacctgtaatcacagctactcaggaggctgaggcaggagaatcgcttgaacttgggaggcggaggttgcagtgagccgaggtgacgccactgcactccagcctgggtgacagagacagagtgagactcagtctcaaaaaaaaaattttttttttaaagcatgccatgttggtatagtcaggacacttgaatatcacgacttgaggaggttgatcattagagtgctcaacaaaacatgcctatttctttataatacactgttggttatcttcacaatagcattcttccctccctcagttgaagagtagcctctgatattagtaaaaattcatagacagtattaagtgcttttcccttttaattactctctacttctcaggagcttgcctgggccagaacatttctaaaactggagagagttagagggctatacctcatacctgagcaaaagctgagtgcagaccctgagaaaagccaaacttgctgattttaagcttcttgcttaggaccaggattgggagccacacaattgggaggttccagtgaatgcaggcaacagaggatgaagcagggccaaaaggtggatacctggcaataatatcttccttattagggttagaacattcagaagtctcctttattagatgccaactttttttggggcggggagtgggtggcaaaagagactcataaaatgtaccattttatgtatttacagggtagaatttagtggcattaagcacattgacaattttctacaacatagtggttgtcatttcaccactatctagttccagaacttttgtatcagaacttttgtatcaccgcaaaaggaaaccccatgcccatgaagcgtcagtccacatgttttcctcccccagccccttgcaacccataatttgctttgtctctttatggatttgcccgcctattctggatatttccagctattcttatatgcatcttttttattcttcatcaactagctggtaatgaatcttgccctcagcctcagacatcggaacacctggctgctataga

SEQ ID NO: 136591 - DNA, 1561 bp, Homo sapiens
gagtctgtaattttatcttgacatttattgggagattaattacatgttgttagaaattttttcaactagtagagtgctctttcacaggaatgttagtattttctttatttaaataagtttatcattgtactaatattaagtatgtctactaatataatgtaacaaattttctcttacagggatttgtattcattttcaggagtaaaaacaaacaatattgccatctttctaaacagaattatccactttccacttgttgctgacatttatatggggtttaggcatctattttattatagtaatcttaattgttttatgtaacagatacatagaataaattttataaaactgtataattttgatctttctaaattttgtcatataggtacagtagcagagggagctcccattattccaatttcagctcagctgaaatacaatattgaagttgtttgtgagtacatagtaaagaaaattccagtacccccaagagactttacttcagagccccggcttattggtaagtgataggatttgcctttaactcttaatctgatcttttccacattggtgattcctcttcaaggatgtttattaatatttcctctttctgcagaggtgataattcatacaatttttttgaaatcaattctgagattgtattggcagtgctagattgtattactgaatgagggacagagtcctgaacacagtaagaactgttaacctaagccgggcgcagtggctcacgcctataatcccaatactttggggggccgaggtgggtggatcacctgagttcaggagtttgagaccagcctgatcagcatggtgaaaccctgtctctactaaacatataaaaaattaactgggcatggtggcgggtgcctgtaatcccagctactcgggaggctgaggcaggagaatggcgcgaacccgggaagcggaggttgcaatgagctgagatcgcgccattgtactccagcctgggcaacaagagtgaaactgcgtctcaaaaaaacccaaaaacaactgctaacctttctgtgcttaatatatggtacatgatcaagatggagtaatacagtattctccatggaatcataatgttttagggtgttagaacttcctgactaaaacatttacagatgattttgttgttcaattaacgaagaactgatactggtataatttgatcacctaggcttgtggttcctacacggggatgtagtagccttctcgaaacagacatttgagctcctctggctttcatccgagcttctggtgtttagtaggaaatagtctccgaagtgcaggtcatgtagtcctagtgttttatagttataaagctgaattgttcttacaggagttacagaggtctataaagaaaatgtccataatctctctgtcttcaagttctagttccttagccctaaagtcagcaaagttaacatttggtgtccattattcccacacttttctctttgttcatatcatcgtgtataaacatatacacaggctgggcatggtggctttcacctgtaatcccagcactttggga

SEQ ID NO: 136592 - DNA, 1325 bp, Homo sapiens
taccctattttttaaaggtagatcttgtgtaaattcagtgggtgccaaataaactatactatatatagttcaaattcctttacaatgaaatttctatagaattttttttatgattgacatatttcccaatagtatttggtaaattcttacttacatttggaaagcattttcttgattttggggtttatttttccctaatttatttttctaggttcaaaagctgtctaagaatgaagtgctcatggtgaacataggatccctgtcaacaggagggagagttagtgctgtcaaggccgatttgggtaaaattgttttgaccaatccagtgtgcacagaggtaggagaaaaaattgcccttagccgaagagttgaaaaacactggcggtaagtttgttagtctttgccactgtctaattaaaaaaagacacagtcttgtacagaaaaaaaagcacacaatcttccttgaggacaacagttactgtggctttcagtctcaactatttatttggatgactttgaaaactatacttcggccgggtgcggtggctcacgcctgtaatcccagcactttgggaggcctaggcgggtggatcatgaggtcaggagatcaagaccatcctggctaacatggtgaaaccccgtctctactaaaaaatacaaaaaattagccgggcgtggtggcgggcgcctgtagtcccagctactcgggaggctgaggcaggagaatggcgtgaacctgggagtcggagcttgcagtgagccgagatggcgccactgcactccagcctgggcgacagagcgagactccgtctcagaaaaaactacaaccttgactatagtcccatattttagtccaaatactgtgattggcttctcttcctgttagacacaacctatgcaaaaccaaatgaatttgggttcggtatttctatcgtcattggctttggaaatcatttcacacttaatagaaaaattgtaagagttttacagaaaactcctctatagctttttcctagattgacaaacacacatacagatttatttacatatataagtttttttctgaaccatttgagtgtaggctatatatgttatgcttcttgatctcttaatacttcagtgtatatttcccatcaaaaaaggatattcttatgtaaccacttagaaatttaacattggcaaaatactgaaatctacagtgcatgtttcagttttattacttgtcccaataatgtactttatgttcctcctgtttagaatcttgaattgcatttaatttcatgtctctttgatctttaatctggagctttttcagcctttgtctt

SEQ ID NO: 136593 - DNA, 1353 bp, Homo sapiens
tgagcccttaagccacacactctccccaaggagaataattttaaaataaacaatgactggcaaataggtgattttcaagcagtgctttttacatgagtcattagtcgaacaagacattgtttaattcctgaaaataatagccaaattcttcatggattataaatcacagggcacagcaaacaaactagctccactaaagagataaaaaaatcaatatagaggcctagaaacaatgagcagtagcagtgagcacccctggtgtccaagttggggcctctacagtttcccaccaaaggaaagggagaagtgattgattccagggctggagcaggaaagtataagataagccaggaacatctccttatagcagaaagcaaaagaagaaagtgtccaagcttactaggttgtctaacattaagaaaatttggatgtcaaaaaaaattgctatggagtgaaacatagtggatatgttaatgaatttatgagactttaaaaatgatcaactagtggtgatggttgcacaactttgtaaatgtactagaaattagtgacgtatgtatgctttaaaagggtgaatttgatagtataagagtcatatttcaattttttaagtgatcacttttggagaatgctagggaaccaactcaatattttgaaaactagtgaaggaaaagagatgaagcctgtaagatctactcctcagagtaaccaaatagttgacgaagggaccttccttttaatagaagtattccaactaatacatgaagaagtcctgatgaaattagaatatcaccattttggattttgtcgactgcaaaatatcaccattttgcaacatctaatgaattaatggaccttggcaatgatcatcagtggctgctaagcagagagaaaaccagaaacatgcctcaagatggaaggacaaaatgctactagacaaaaaaaaaaaaaaaaaaaaatcgaacctgagtttgatcaaccttctagctctaactaccagtttacaggaaatacaggaaacagagaaacatatcaatgaaaccacagggatgcggtcgacaaaatccagttgatgagaaactctaaaggacaaatgaaagataagaataaacaaataaattataagaaaacaaattataagaaaaattcaacatttaacaaatacatttcttcaacaaacaacttattagaaaaaaataggaggggaatcaatagattagaaaagacttaaaagacatgttcatcaatggcagtgtatgaacttcatttcatttttttttcttgtggcagggtctctctctgttgcccaggctggagtgtagtagtgcaatcacggcacactgcagcctcgac

SEQ ID NO: 136594 - DNA, 1064 bp, Homo sapiens
tgactggctgcagtttccgctgcgtttcagctgagctgccgcaggcggccaccgccgccgcccggacgccgggaccgtttcaccctcagcgcccctggccctgcgccttcccccgcgcctgtagccacccgagggcagtcggggcaggtggcattccggacacctgggcttaccagggcatacgggaccccaggaaatgttatttttgcttaagtcaaatcatatgtggctgctaaggtgctttcgatgcagttgtttttccaacaatctttgccgccccgagtatctgaataaaggaagaaaaataaagattgatgggaaagtttttgccattcttttgtcctatagggaaaaaaattgcacaacacgagagcggaggaataaaattttgaatcattcgtactcatttatgtggaaacaactttcttgaaaaacgatttaagtagtgatctgttggtggtatttttttaaatcgaggaataagggcagacttttttattttcttattggaggacaacttagtgtggtgcatatttattgtgcatttgcctgtcatggtatttcgatttttcatttgtgaagttttaaggcggagtttcatcccctaacgtacttttttgattgcacactgtgcaactttcttgataaactcggagcctactgttagcgatgcaccgtgctagatgctaagaaacattaaaaaggttcttgtaatgcagacggtggctgcaagaagtctcatgtttagaggtaggtggggcaaggtgaaatgcagtaaagtgagaggtacaactaattactgggatttccgagggaagcaaggttgccattggaggatcagggagggacgggttcctgaagtattaataggtggcattttgagaaggttaccgagggatgggtaggactttgttaggtagaggtggaggtggagaaaggacgtttcaagggtgaagcttcttcagtaaacagtaagtatttacagtttggcaaaagtggatggtataggtaggggagtggtgggaattcaggctagaaaagttagattgcagaagggcttgctt

SEQ ID NO: 136595 - DNA, 1805 bp, Homo sapiens
agcggtgctccatgaaagggctggagggaatgagagtctcatgtttattataaagggctatggtttagaaaagttcgagaaacagtgcattgcatgaggctgactagaagcaagttgagaaggcgggctgtggttgttgaggtgttaagggtaaacataaacttagaagaaccaggtgcttttatattttgacagctgggaaagacatagaagaactattaagaagatagaattgttttgctgcgcagtacagcaacagtggatgttcaagattaagattagagtcaagttgtgtgattaagacaggtaagtgtgtagtttagtttcaattagaaatggttaaatataaaattatttttgcctgaaagggtagaccttgaaactttggaaaactgactggtggaacaccttcgaacccaaccaccctggatgaataaggtgttagtttttaatttctgtgtatttttcagatagatgcagatttctttttttaaaaaaacatgctcacgaatgtgttacaaatttttttttccacattgctttttgtaaatgcttactctcattgcaaatgcttactctcacttaacccatttagactgattctgtcactgataatcttctttgtattatttgttcttgtgtacactggcaattccaaactttttttcactcttaaaactactcaacgggtccttgaaatctctcatcttcagcaaagattacccagtctttcacttcactgagaagggtagatggccatctgataaagagccaagtctcccctcccttccccttcatgcctttcctgtcttcacctaggccttcctccttttgccgcaggggaggttgcaggagggattgctgtctcacaagccccactgctgctctgagcctgctcttcaccctggctgcctccttagggaccaagctctgtgcgtgatgccgtctcttgcatcattaacctctctttacaaatattcctaggtttgctcatcttacaaaagcctcacctgtcttcactttctttgcaccccacttattcttaaatccagtattacccaaattgggaaacttgcacagcatgttaacaggtgtgttatataaaagtgctctgtgtttcagaaactctctgtgccttctctgtcttctatggtgggattccccttaatttatcatttaatgtattatatttgaactgtgtgtttatattttttccttctacactgtgaatatagagacaagttctgatttatctttgtctccaagcagtacctggcatatggaccattatctctcaaagcaataatttcggttactgggtacagagaattctacgtagttaatagttttcagctgttcaaaaatcaggtatccagtcagtgtgttttttgactcagggacatacatattaaggcacacttattagggcaccaggtcaaggagtaacccctcccaccaccccttatctgattggaatatggccagcctattcttattcctgccaagttatttttccagacaacattttataaaacccaggtatcttgtaattgtattttactcaaaggaagtatactctaaggaaattgtgtggccttgaggtacacagccattaggcatttaaaaaatatatttaaaaagttttatggaatatttttaaattactgaaaatcagaatcacccagatttaagagatcttaatattttgctacatatttgattcatatctttttgttgtttaaagaaataaaatctcacagattcaaagggtccctccccatccccttcctgtcttcttttctcca

SEQ ID NO: 136596 - DNA, 1687 bp, Homo sapiens
cttttaaatatctcagttttaatttctagtatgataaacatctatagatacgacccacgtaaaaactctttgtggttcttaatttttgttttttgttttgttttttaaattttattgtgatccttaatttttaagagtgcaaaggagtcctgagaccacgaagtttgaaaactactgattccattcattttatttgtatttcagtgtataaataaatatactgtggtttatttatcttttcttcttggagggaccgatagaaactgtttgcagtttctgaatttcaaacactactgctatgaacatccttatacatggtttgtctttcttgggattatatacatatagtagaagtagaattgcttcatttaagaagtctgtgcattatcaactttactgggaattgccaaaatggcaaattgtcttctatttgacactcccgctgtgtttgatcccgtttctccaaatcactgccaaaggattagattttgcaattttttcccaatctgttgggtataaatggcatctccttgctattttcattttgcatttctaagattactagtgaggttgaccttttttccccatgtatttatcggccatcagagttttctattaattgcttgtgcatacctttggttcatttttctgttggattgttgcctcctccttattggtatatgggttttatttatttatttatttatttgagatggagtcttgctctgttgcccaggctggagtgcagtggcacgtggtctgggctcactgtagcctctgcctcccaggttcaagcaattgtcctgcctcagcctcctgagtagctgggataacagacgcctgccaccatgcccggttaatttttgtgctttaagtagagacggggtttcaccatgttggccaggcttgtctcgaactcctgacctcaagtgatcggccctccttggcctctgaaagtgctgggattacaggtgtgagccactgtggctggctggtttatgggttttatattctggatactaatttgtgattatatacactgaaaatatcttttcctggtctgtggcttggcttttagctctgtttgtggaaagttttttatgtaggacttcataatatgatggtagccagttctcagtttttttcatttatggcttgtgttttcttatgtcttcaatacattcttcccttaccccaaggttgtaatgatactgtgctgtttcatatttaggtcgttaattcaccggagttttttgtatattgtgtgacgtaggaatctaatatctttttcatgtggatttatcaaatggttcagcgtttctccccactgatttataatgcaactcctgagatatatcatattcccacatatgtatctgtttttagtttctctcttttggtttcattggtctgtttgcctatctctatatctatactatcctgatttaataatagcctttttttttttggagacggagttttgctctgtcgcccaggctggagtgcagtggtgcgatctcagctcactgcaagcttcacctcctgggctcacgccattctcctgcctcagcctcccgagtagctgggactacaggcgcccgcaaccacgcccggctaattttttgtatttttagtagagacggggtttcaccgtgttagccaggatggtctcgatctcctgacctca

SEQ ID NO: 136597 - DNA, 1133 bp, Homo sapiens
ctaatagagctgggatttgaattctgggtatgtgctactacttttcataaagctcttgcacaacttttgttagatatttttgttagatactgtgtaatttttgttgtcattgtgaataggattttcttttagttatagttgctattattgctgatgtataaggatcactgttgacttatatgtattgatcacgtaaccttgctgaactctcatcatatttcatagattctgaggtacacttttcccccctacatcttcacatatctgaagtcaaaatagatctttgatggtgtcccataatcactgttgtctaggcagcagtcatgatgtagttatcattgcttgcacatgcacaaacttggtcagggctcttcattttgtcatcactttaaatgagtatgtgcattgctgtattgttatttcatgccaaacaataaaactggaggcggaagaaattgcaaagtgggtgtctgccttgaaagaaaatcccataaataataatggatcattttaagaagtgctgcatcaccaacactcttattggcagagcacaatattgttagcaacagttgaacagttttgagtggaagagcaatccatagtaggaccttgaatgtgaagttgtaggaataccttaccaatttattttgcttcttttttttctgtcgcccaggctggagtgcagtggcacgatctcagctcactgcaacctccgcctcccgggttcaagcaattctcctgcctcagcgtcccgagtagctgggactacaggtgcacgctgccacgcccagctaattttttgtattttagtcgagacaggttttcactgtgtttcccaggctgttctcgaactcctgaacccaggcaatctgcccgcctcggcctcccaaagtgctaggattacaggcatgagccactgtgcccggccaatttcttttgcttctgtatacacaagatatgataaaagtctgtctaaataagtctgaattgtcttgataaatctagaatgaaaatcctagataataagaaaatactgtatcagtttaattggcaatgtttttttcttagtcatgtaaaataagggtacagcttacaattggtatcttcagagtcagtgaaatgtagtagtaata

SEQ ID NO: 136598 - DNA, 1191 bp, Homo sapiens
acagttgctgtttaatagagacaatctgtttcttttcttttttggagacagaatctctctcttgtcgcccaggctggagtgcagtggcacgatctcggctcactgcaatctctgcctccctggttcaagtgattctcctgcctcagcctcctgagtagctggattacaggtgcccgccaccatgcctggctaatttttgtagtttttagtagagatgggtttcaccatgttggccaggcctcaggtctggtctcgaactcctgacctcaggtgatgggcctaccttgacctcccaaagtgctgggattacagacatgagccaccgtgtccgagcgagacgatctgtttcttaaaagtaagaacccatctgtgagattatctgtgcttggtgtcttttgagtgtaaatttgtggtttctgatttgttaattgtttctttcatgatgataagtcttgttttagctgttcttgagtttttttggtcatttatacaaaatgaacaattttctagaaaaatattaaatttcaaatgcattattataaaatacagatttccctgatgacttttaaaaacctaattttgttagtttgttcctttttttctgatcagtattgccagtaactgcctttattattggattttttaacatagttatttttattgatcctttctatttctactcctgtggttaatattttccttctgctttatttgcattcattctgacatttaaaaatgtaagttagaggcttagctcattcatatttaatctatttttataatatatatactaaaaactataaaattttctctagactataattggatgctatttaaaaaaattgaaatgcttttttttttttttttttgagagcgggtctcgctctgtcgcccaaggtggagtgcagtggcgcactctcggctcactgtaacctttgcctcccgggttcaagcgattctcttgcctcagcctcctgagtcgctgggattacagacgtgcaccagcacacctggctaatttttgtatttttagtagagacggggtttcaccatgttagccaggctggtttcaaactcctgacctcaggtgatccacctgcctcggcctcacaaagtgctgggattacaggtgtgagccactgagcccagccgaaatacacgtatttatggggtagagtgattatgtacatg

SEQ ID NO: 136599 - DNA, 1356 bp, Homo sapiens
aactccagaggggttacaaagttgaggtatagtcatctctgtttagaatgtttgaatttttgtaatgacaaaaccgaagggaaaatgaccaggcaaaacaatagtttgttgaataattactgctcacttaagatgagatgagcgggcacccccatgtaggccagaatatctattaggaaatgcacgtgatgtaaaaggatgggaagaaagcaaatcagtctgttaatggtagcttgggttaatactgcagagcctttgagtattgaggaactgctgaagtgttcagagcagggaagtagtatgatcaaagcagtgcttcaggagggttaatttgcctacagattgcagaaatgcctcaatacttggcaccagcccttacgtgtagttttagggtttctagtcatttgttgtgggagtggcagaaaggagcaaggccagtccagaggctattttcatcccccagggatcaggaaatatgaagctgagtgggaatgctaactaggaattaaaaaaaaaaaaaaaagattcttgagaagttgagaattgacaagatctggcaatctgactgtgagcagagaagaagaaaaaggccatagtggtcatatcaggagaaggctgggttttatccggatgagaatattcaacagtctgttggacatgttaggatgattgtaggaatcattgttgtggaaatagtagttgaaaccatgggaataaagagaaagcagaagaggagagggttgagcacacacctgggctgagccgcagtaaggggtgaggggagggtgagcagccagcagttaagaagagggaagagaactagaagtcacttaaagcaacagaggaaggagagcacttcacaaattagggagttgattgtttaatagaaatgccaaggaggatgaatgccaagaaaagttgttctgcaagttgagaatccgtagagctgatgggattgggtttatgtagggaaatttgtgcggtgaggggcttaaataccttaatgtatcccctttattgccttcttaattggcttgctttaatgtcatagtgtttcataatgcttagaatttttttttttttttttgagacagagtctcgctctgttgcccaggctggagtgcagtgtcgcaatcttggctcactgcaacctccacctcccggattcaagtagttctccctgcctcaacctcctgagtagctgggattacaggcacctaccaccacgcctggctaatttttgtatttttagtagcaatggggttgcgccatgttggccaggctggtctcgaactcctgacctcaggtgatccacccgtctcagcctcccaaagtgctgggattacagatgtgagc

SEQ ID NO: 136600 - DNA, 1347 bp, Homo sapiens
taatttctaatattctttggcctttgattttttttttttttttttttttgagacagtcttactctgtcgcccaggctggagtgcagtgatacaatctcggctcaatgcaacctccgtctcctgggttcaaggattctcctgcttcagcctcccgagtagctgggattacaggcatgcaccactacgcctggttaatttttatatttttagtagagacggggtttcacaatgttggccaggctggtctcgaacccttgacttcaggtaatctgcccaccttggcctccctaagtgctgggattacaaggcgtgagccaccacgccagacctgatcatttttggttgttgattaagctgtgtatttctctgagggcctggccagtgacacatagtcattgagttaggcacctggttggactcagcctggtctgagtcaaccagaggcactaatctactgaatagctatgtaggtaagacttataaaactttctttgcttttctgtagaacagaagccaagatattttatttatttatttattaattattgagacggagtcttgctctgtcacccaggctggagtgcagtggctcaatctcggcttactgcaacctctgcctcttgggttcaagcaattctcctgcctcagcctccctagtagctgggaccacaggcacgtgccaccacacccagctaattttttgtattttttgtagagacagggtttcacagtgttaggcaggatggtctcgatctcctgacctcgggatctgcccacttcggcctcccaaagtgctgggattacaggcgtgagccactgtgcccagccttcttttattttattttatatttttgataaggatatttgattctatttccatttgtgacattcattcagaataatattttctgagcaccatacactgtgcaaactgtgtgatcttggttaagtcatttaatctcactgggcttcaactgattcagtcctctaccttcattccttaactgcaaaatggactagagtaggggaactatgttccgaggaactgccttgggagttcgggtctagggggacgggaggaggctagatggaggcaacgtaccctggtgaagttggggcagctcctgctccaactactctcaacctccaccactccagcgcagctgcacttgtatttatcctatcagtctccagagcctcctcaacccagttgtctttcctcctcaactgtggtctttagtccctcttttaatttatcctttgatccttgtatgtcctagattcagaggatgatttctaaatttctatagccatagatggagcatattggtggtatattgcaccaga

SEQ ID NO: 136601 - DNA, 1135 bp, Homo sapiens
agttgggattataggcttgtgctacccatgcccggctaatttttgtgtttttagtagagatggggtttcacaatgttacccaggctggtctcaaactcttggcttcaagtgatctgcccaccttggcttcccaaagtggtgggaatacaggtgtgaagccattgcacctggctatatatggattttattagtgtgcctaaaattttactttcatgtatgtattttttctgtgactgcctcaattgctttgttctcctaatttttaaaaatctattgatttgagatgattacaaaagttcttgggttaaaaacatgtgattcaaaaatagattccctctttatttctttaatctatcttaatgtttaagaaaactgaggagctaatctgttttcccagtagaaattaagtaacatttacgttaattgtagtcatgcatacttacctgaaatttgtcattttaattttttttttaaggagctgatggtacacacatggatggtgatcaaattgttgtggaagtacaagaaactgtttttgtttcagatgttgtggattcagacataactgtgcataactttgttcctgatgacccagattcagttgtaatccaagatgttattgaggacgttgttatagaagatgttcagtgcccagatatcatggaagaagcagatgtgtctgaaacggtcatcattcctgagcaagtgctggactcagatgtaactgaagaagtttctttagcacattgcacagtcccagatgatgttttagcttctgacattacttcagcctcaatgtctatgccagaacacgtcttgacgggtgattctatacatgtgtctgacgttggacatgttggacatgttggacatgttgaacatgtggttcatgatagtgtagtggaagcagaaattgtcactgatcctctgactaccgacgtagtttcagaagaagtattggtagcagactgtgcctctgaagcagtcatagatgccaatgggatccctgtggaccagcaggatgatgacaaaggcaactgtgaggactaccttatgatttcctgtaagtcttggggtacagtgattgtcaaaggtgtttttgtaggctgcctcttctaatttacatcaggggtga

SEQ ID NO: 136602 - DNA, 1983 bp, Homo sapiens
gtgtattaaaaaagaaaaaagttctggcctttgctgatattgctgataatgatgggaactttaggatacacttttatatctttgtgtacgttctattttattccttagaataaatttgtagaaatagaattgatagatcaaagggtgtacacatttacaagtttggttatgcttgaagtttggttaaattctcttggtattttgccttaatattcccttcaccaagttgatgagaatgttcatttccctacactggaaccaacacagagtattatttttctttttagttttcgccattctgatagggaaaaatacgttaccctgtttcaattttgaatttattttaggatgatgatccttgtatgtggaataagacttaagtgagggagagattagtggcagtgaactgttgaaatggttcatatataagatgatctgaagtacgttaataatagtaaaggggacagagaggtagctgcattcaagagagattaggaagaaaaatggatgagattcgatgatagataaaagaggctaggggtttgaggaagaaagataattcaaggatgaccctaagtgttctaccttgggagattggatgcctagtcatgccattacctgaaaggaggagtaggtttggtgggggaaggtgggggaagggggaagatttaggatctgttacagtttgaattgcttgttggtggatgtttcttctaggcagttgaaaatatgactttggtgcttttgagagagtttgttgctagaggaagaaatttaggacaacagaatgtaggcagtatcatatatggaaatggatggtagtctccagagcatgcttgtcgagtgagagtgtcaagtatggctcctttaggtatttaagaagtaggcagaaaagagtccttgaaaaatcaggaggttttgggaagagaaggaggagaaaaagtatttccaacactgttaaggatagagtttctacaagttatcagccactgaggagaaagcaggcttttttgtttggcatttaggaggtcattggtatctaaattagagtaggttcagtaaggcatgggctattggagaggagatggaagagatgagctgtgatggattgagaagttagtggaagtagagttaggtgaagcggtttggataaattgccattttggtcagcaaagggactaaagaggtgggagtatagcttttgatggttgcctggatggcgaaagtaagttgaacatgtttatagacttaagggaaaaaaaaaatcactggacagagagaacctgaagataaagaaaggatgggctagtggagcaggttccagagaaggggaagggactggggtccagggctgcaggagatggctgttaggtaagtcctggagagggaaagtgagtccccttctctgagacaggaagacagttaaggatgaggcccctttccagggacagaaggtaaaaggagtacttgaatgttgggagctattttgtctgtgaagcaggttcatctgcacatatggaaggactgcagaggctgggtggaaagctgaaggataatggcaaagggttgaaaagctttagtctttaggggatgggccagtgtaggaagccaagaatttatgagatagattgctgaaccgcattgaggggccagctgaggttaggagtctattttattttattttatttttgagatggagtctcactctgttgcccaggctggagtgcaatggcgccatcttggcttactgcaacctccgcctcccgggttcaagcgattctcatgccttggcctcccgagtagctgggattacaggcactcgccaccatgcccagctaatttttgtattgtttagtagagacggggtttcaccatgttgcctaggctggtcttgaactcctgacctcaggtgatcccacccgcctcggcctcccaaagtgctgggattacggacgtgagctaccacgcctggccgaaaatgct

SEQ ID NO: 136603 - DNA, 1077 bp, Homo sapiens
ttttctgtatcagtttattaaagattgcattagagggttcaacattaatgtcatcttacaatatacataaataagcttttgcttttttctcataaatgaccttcatttcaatttatgtaggaaaaagtataatttatcaacaagtgcatttttaagtgacttgtttggttttgaaactgaaggtatattaaaatgtagtttgttgattagtgatatcaaaaatagaccaaaacaacaactgctttcagtgacccagagtttgggaatcttgaactttgcatttgaaacaagctgattaaattttataatttttatgtttgtaaatgacaaaggtttggggctgccattttcaagcttttctttgcaagtaatttgggatgtggatggtcttgattctcagtaagtcagaagttaagttgacaaattgtcactgtatttttgctttttaatgttggcttttgagatattagattcatcttgatgttctgtgtaagaattttgattaggtaaacacagtttttggatctgatggagatcacgacagaactttgcagaagtatcatttcaaagacgtcagaatctgagttctgtcttggtataactggtgtaaattacacaagggatgactgtgaattttaaaagttatagtggtcagaaccaccaccacctagccttggttgcaatactgattatgcctgcctgagtcatgagcacattcatttgtttttcacgaaaagaaagcatgtttagatagttacactattttctgatttttcaaaaatcacagttgcctctaccaatttaaaccccatgctccatattccagaagttgacgagccctgattgggactaacgtagcttgagatctgaattgcgtgactccagataagttactcaacctctctaaacttcagtttgctttgctgtgaaatgtagagaatattgtaccacctgcctcacagggttgttgtaggtattaagtagtacttaccataatcacttagtaaatggtagctgcattattattactacatttaaaaatactcacctgtttacttgtccactttgccataagac

SEQ ID NO: 136604 - DNA, 2540 bp, Homo sapiens
gaatcttctagttgtctaggtaaaatccaattttatgtgaatcaagttagagattatatttgtaaaagaacttttgccgggcgcagtggctcacacctgtaacccagcactttgggaggctgaggtgggcagatcacgaggtcaggagatcgagatcatcctggctaaaatggtgaaaccctgtctctactaaaaatacaaaaaattagccgggcgtggtggtaggcgcctgtagtcccagctcctcgggaggctgaggcaggagaatggcttgaacctgggaggcggaggttgcagtcagtgagctgagatcgcgccactgcactccagcctgggtgacagtgagactccgtctcaaaaaaaaaaatttttttttttttttttgcgaatagtaacattttatttaaatatctgttactatttgtgatttatttccttcctttttagtggatgatgctggcaaaatagaacacgatggttcttctggaatgaccatggacacagagtcggaaattgatccttgtaaagtggatggcacttgccctgaggtcatcaaggtgtacatttttaaagctgaccctggagaagatgacttaggtaagaagaagtgtttagacattatacatcctcatccaaatgtttcagcctgattacttttgggttatttagattgagaacatttggagtctcttctgaagtaacttttatgtaagaattccggtgtagtaataccaaagtttgtaaaaagtaataagaaaattatgtaaaaagaaataggtggaaatgcagttttcaaataaattattgaagctgtcttcttccctgattgataggtggaactgtagacattgtggagagtgagcctgagaatgatcatggagttgaactgcttgatcagaacagcagtattcgtgttcccagggaaaagatggtttatatgactgtcaatgactctcagccagaagatgaagatttaagtaagtaggtggcctttttgtgggagaaaattttatgtttctggagcttttaagtggccagtgtttgaaataagtagcattattttagagattattatgctactacattccaagggaaacatctttgactcttttatatatgcttatgatgttgctttaaaaccaagttatggtgaaagccaagaagtaaatgattcattcaacaaatatgtattgagtgcttactacgtgaaagctatgttctaggtatgtaatatttggaccatctttccattttgtctattaactgaattcaaataaaaacgtgtttcctgtgatctctgtaaacctggtcacagaagtttttgtaactttctacttagatgttgctgaaatcgctgacgaagtttatatggaagtgatcgtaggagaggaggatgctgcagcagcagcggcagccgccgccgtgcacgagcagcaaatggatgacaatgaaatcaaaaccttcatgccgattgcatgggcagcagcttatggtaagttgcccagcagctcttagcattgaagaagttggttcttaaacatgaatccatgattgaaaaatggtttctgtggtcttaggtttcagaagtctgaaataccagtatcctgtaaggattatttgaattgaattagagtataaagtctactttttgtctttatttttaacaggaatttccttcatgtgtatattatgtagaaggaagtactgcaagaagtacacaggctttcaggctgaaagttttcatcttgattatgtttggcccatgactttttcattttgggagacaacaagggagtccatggcgcaaaaatgctgacatgtgttttttagctttggaagctaggcgtttcctacggtctcgcgataataaatgtgctcataaaacccatgacctagaatggggaatttctgtcattcatgagtatcatggcttacttttcgttgttgtagttaatgaagaattcctaattctttaaaatttataatactgtataattttgttttttaatacacattgttaggtaataattctgatggaattgaaaaccggaatggcactgcaagtgccctcttgcacatagatgagtctgctggcctcggcagactggctaaacaaaaaccaaagaaaaggagaagacctgattccaggcagtaccaaacaggtgagggcgcacgagttccatggcgcagcgtgctctgcgagctctcagaggaaactctagtatgtatccacaggggtgtcacaatggcattttagctgctagaccatatatagctttgtctattgaacttgaaaatataattttcagaattcagtgatattcatgaatgatttccttggataaaaagaaacaggacatggctgaaacatggatgagaaaaattgaaaacttggatgatttttatgtgtacatggaatgaaatccctcaaatatgttataagcattaactttttaaataaattaatacatttagagaatctatgtcagcataaagcaggcataatttacagagcagcaggataagtactttagttcata

SEQ ID NO: 136605 - DNA, 3835 bp, Homo sapiens
ttcacaggccttcagaactcaagaaacacgtggctgcccacaagggcaaaaaaatgcaccagtgtagacattgtgactttaagattgcagatccatttgttctaagtcgccatattctctcagttcacacaaaggatcttccatttaggtgcaagagatgtagaaagggatttaggcaacagagtgagcttaaaaagcatatgaagacacacagtggcaggaaagtgtatcagtgtgagtactgtgagtatagcactacagatgcctcaggctttaaacggcacgttatttccattcacacgaaagactatcctcaccggtgtgagtactgcaagaaaggcttccgaagaccttcagaaaagaaccagcacataatgcgacatcataaagaagttggcctgccctaacaatacttctacagaacgtttgtagagatattggccttgaagcagaaaattcattttaaagccaatcagtctcattcacatacaatactgtatattgatttatgctgtgtacaaatagaattattacttctagttgacttttttttaaatatacattttgctcagtagtgtgttctgaattctattcagtttgtttaataaatagggaaaactggcaacatgctagttacttttaataaagtaatccctgattctataccgaagttttatatcttagaattttatatttatttaaatatttaccttgcttaccttgatggtactcttctaagaccattaacttaaggtaactttatattggtaactctgaaagtattcatgttgactcatttttttccccatacatttctcacaataaaattgtcagagacatctactaatataaatgggagattttacagtcaggtctaattatcataacatggaagtcatttacttgtcttgcttaatattttcagaccacttgacagtgaaagtttccatttgagctgttgcgtccctggctttgctgagtaaagagcagtggctgggttcgtgtttacttttcaaatatacttcttttggctttctttggattatttacatcttttgtcagcgtagcaaacttttagaaaaccttattgaaaaactgtgcttgctcatgttgtattttgattattctgtctgtgcggcttcatcttggaatggttgtgtgctacaaatgacacttactgaggactgcattttggaatctcctagaggtaactcatggcttataggatcttttgcaactttatgtatgtaaatgtaccctgaattatatatatacacatatatatcatgtacctgtgtgtattgcttattttacatatttatacacacaaccccaagtagtagttgtttaaaatctataatgaaaagtattaaatttacaataacatgaaagatccagggatgcatgagagagcattttgtaagtcatgctcttcagagagactactcaggtgaagaattagaaggaaaataaggacactagtatttttaaagagtaaagatattttcttttaaatatctttggtaattgaaacatagaggttaagatgtttctaggtagaatgttttcatacaatttcacctccatgtctttatgtttttctgaaaagcaaatgagtatccagacatgactcccacagttctctttgagaagcctgagagggaactctgtcttacctagtgagggggatggaaaagaagtgatggctctgtggaccagagaacgggtgctaattatgacttcacactcggcaagttcaggctgatctgttatttctcagttacagttagcaaactttaaaaacttaacactcaagttggctttgattaaaaggtaaagatgtgttttaagtggataaggaaagtctgaggccttatttggaacatcactaagtcttccacaggttttttgtttgtttgtttttttttgttgtttttttttcttaagacggagtcttgctctgttgcccaggctggactgcagtggtgtgatcactgcaacctctgcagctcactgcaacctctgcttcctgggttcaagcaattatctgcctcagcctctcgagtagctgggattacaggcgcccaccaccacgcccggctaattttttgtatttttaatagagatggggtttcaccatcttggccaggctggtcttgaaccctgacctcgtgatccacctgcctcggccttccatagtgctgggtttacaggcgtgagccaccgtgcccagacaccacataggtctgaatcagtgtcatacattcataaaacaaactcggttaattagaacttggttatgttaagacgaatctgggagaacagaaaacagtttttggggtcccttcagttggctattggtccgtatgcatctagcacattgtaggagatttagaaattgtcttcccacccgatagctgccttgtcacctcattatggtgctccatcccctgtgtgcttaggtttttacctttcatctttctctttgccattgatgtttgtattcaagagttatatttttagggttagaaatcaaaatatttggtgtttggcaaacctctgaagtgctagactgatttagtctagttttaaaccaagtgctttaggcaggtgtgaactccagcccaaatgccagtcaaagtcaaggcatgggttttcctagcctatcttataggaaattcctgtaccttcttggcccccataatgtgttttttttttttttttttttttaaactaacttacaattttgtgatccgtgattcattgccctgcgattcttgaaagctctgtctgtttttttgtgagaacctttaaaatctcccttaatttttattttcccagaaataatgtaaaaacacttaaatgaaagtggaaatgtattaattttaaatcctataaaattaatacagaaaatataaatgattgggtcatttaactatatttttttaaataaactgaaagataaagaacacaacacttcacacattttatatttctcttacatactccggaatcatacacagttctttttaaagcacaacattaaaacctttaaaaggtatttaagggtttggtcaagtgaatatgataaaacatacttgtctgtataaagagaaaatgaaattgtagtcactgttatgtactgacattagttacaacctagttttaattcttaaaacaattttgattagcaaagctaaaaaaaaatggatgtttcagttaaatgttttaaagaggtacagatttttacaaggacataatataagttattgttctgtagaaatatcctattaaatattgtatgtccctccctctgtacactttgtaaagaaagtaaaatacataaaaagaaaatcatatagggatgtgtgacattattgtaattgtgtacttgagaataacgtgcaaaaataaaaatcagaatattttcctgttattgaatgtttagtctatttgataccagtactaagttaatgctttttctcaaggaaaaaaaatgtacagtttttgtaaacctaataaacatcaaaagcagtggattattttcatccccccatttcttaatttctttttcacagcagtggaatgcaaagtgcttgattgctttgaattttgtgactcggatgcaaatactggtaatatttcagttctgtgaatttgcaagtaatatttcagagaagttaagaggtgattggtgagtcctttgatgagcatgtccttggaattcattttttcttttatcttcataaaggatttgttttattagcatctccaattcccctgagataaattactcatgcataaagtggtttttgagagcacttaaagttcattt

SEQ ID NO: 136606 - DNA, 1031 bp, Homo sapiens
cctcttgagttctaaccacattgaagatagacaagaaaccaccaattaagtgtgcgatttattctagtaaggctggattgggagacccagaggctgagatgagtctgtttccaatctctttccctccaatgtaggccttgactgatgcagccagtcatttgaaggcatggggcctaccttccactcctttgtgagctatcaggagactagttctgtcatcagagaaagggagcatctactccagccctcccaggctagaacacaggaaaagggggagagttcccttacatcatcctaataaaggttagtccaattctggattgccctctgacattagcacactagcaacatgtgaggtttcgccattagccttgcatgtttgtgtccacttttattgatttttactgttcccccttgaagtggtggttgtggcagactttctaaagttcctttctctctcaaggcagtatgctttggtggttcttcagaaaattaatttttaaagggcaaatgtacttactatacaaagatggaaatcttgcaagttatttttattgcatgctttcgtaacaaaaattgggaaaatgatcacccacaaggccaccacctttattaaagggattgcttgtctttgttctcttctagtcttagtccatacacataaatcttttatctgtcttgtaaccacaatatcaattctattctgggttcagggattttctttttcaaacatcaaatgtaattcatgtgtctacaccagtatatgggagagttcgttcccctcaaccttacaaacagtgggtgttacagctaatctcacaggttaaaaaaagaatatgtcattgctgtttcaatttgctttgactggactcctagtggggtttaatacttgtatgtatataatagcactttaagttgtcgctctgataaactgcctattcaaatcctgtgccccattttctatttggagttctttgtacattaagcctattaactttccaatacatttgctgcacatttttgtagtccat

SEQ ID NO: 136607 - DNA, 1378 bp, Homo sapiens
tcctttgcagagaccattcggctgccttatgaagaaagggcattgctggactacttggatgcagaagaattaccccctgctttgggtgatgtcctggataaagcttcggttaacatttttcatagtgggtgtgtcatagtagaagttcgtgactacaggcagtccagtaatatgcaacctcctggttaccaaagcaggcatattcttctacgtccaaccatgcagactttagcccctgaggtgaagacgatgacaagagatggcgagaaatggagccaggaagacaaatttcctcttgagagtcaactgatcttagcgacagctgaaccactgtgtcttgatccttctgtagcagttgcctgcactgcaaacaggctgctgtacaacaagcaaaagatgaataccgacccgatggaacagtgcctccagaggtattcgtggccctctgtaaagccacagcaggagcagtctgactgtccacctcctcctgagctgagagtgtcgacttctggccaaaaagaagaaagaaaagtaggtcagccttgtgagctgaacattactaaagcgggaagttgtgtagacacgtggaaaggcagaccctgtgatttggccgtgccttcagaagtggatgtggagaaacttgctaaagggtatcagtccgtcacagctgctgacccacagctcccagtctggccagcccaggaggtagaagaccctttcagacatgcatgggaagctggctgtcaggcctgggacaccaagccaaacatcatgcagtcgtttaatgatccgcttctctgtggtaaaatacggccacgtaaaaaagccaggcagaagagccagaagtctccctggcagcccttcccagatgaccattcagcttgtctcaggcctgggtcagagactgatgctgggagggcagtgagtcaggcccaggaatcggtgcagagcaaagtcaaaggtccaggcaagatgtcacacagctccagtggcccagccagtgtcagtcagctctcttcatggaaaacaccagaacagcctgatcctgtgtgggtccagtcttcagtatccgggaagggagagaaacatccacctccccgcacccaacttccctcaagctcaggaaagatttcctcaggtaacagttttcccccacaacaggcaggcagccctcttaagcgtccatttcctgctgctgctcctgctgtagctgctgctgctcctgctcctgctcctgctcctgctgctgctcctgctttagctgctgctgctgtggcggcggcggccggtggggcggcaccaagccattctcagaagccctctgtgcctcttattaaagctagcaggcgccgtccagctgccgggcgccccaccagat

SEQ ID NO: 136608 - DNA, 1032 bp, Homo sapiens
tcttccagggccataggcaaaacacaacactttcccaaatattctcccttccttgtttttgattcaagcaaaaacaacttacaagagaattgaacacttttgccattagtaaccaccagaaaacacattgagcttcaaattattcaataaattttgacagaaaaaagtcaattgtggttgtctctggttttcactgaaatgggagtggtctgtcttagaagtagaccccacccaaagaccagcctcacaacttcatatggccccttccatcagggagagagaggcccccacacctcccccttcatccccatccatggagatgtgggtcctttaggtgacccattaggagccattggtactgaatattccagaatgaaaaatcatgtttggcccacttggttatcttcatagttaaaaagggactatctaattaaatagtttctttttaattatgtctggcataatttataccattcaaaagtttcaaaaaataaagagtgaaaagtaaacttttgctgacaaagaactgttatcctccaaaatatacaaagaactcttaagactcaacaataaggaaatgaacaacctgattaaaatatgggcaaaagacttgaatggatacctcaccagaaaagatatacacatggcaaataaccatatgaaaagatgctcaacatgtatgtcatctgggaattgtaaattaaaacaaggaggcccagcaccagtggctcatgcatgtaatcagcactttgggaggcctagatgggcagatcacttgagcccaggagtccaagaccagcctgggcaacatggtaaaaccccttttttacaaaaaagcacaaaaattagctgggcatggtggcatgggcctgtggtcccagctacttgggagactgaggtgggaggatcgcctgagcctgggaggtcaaggctgcagtgagcagtgatcgtaccactgcactccagcctgggcaacacaccaagaccctgtctcaaacaaaaaacaaaacaaaaacaaagagataccactac

SEQ ID NO: 136609 - DNA, 1035 bp, Homo sapiens
tctgtaaagccacagcaggagcagtctgactgtccacctcctcctgagctgagagtgtcgacttctggccaaaaagaagaaagaaaagtaggtcagccttgtgagctgaacattgctaaagcaggaagttgtgtagacacgtggaaaggcagaccctgtgatttggccgtgccttcagaagtggatgtggagaaacttgctaaagggtatcagtccgtcacagctgctgacccacagctcccagtctggccagcccaggaggtagaagacccttttggatttgcgttggaagctggctgtcaggcctgggacaccaagccaagcatcatgcagtcgtttaatgatccgcttctctgtggtaaaatacggccacgtaaaaaagccaggcagaagagccagaagtctccctggcagcccttcccagatgaccattcagcttgtctcaggcctgggtcagagactgatgctgggagggcagtgagtcaggcccaggaatcggtgcagagcaaagtcaaaggtccaggcaagatgtcacacagctccagtggcccagccagtgtcagtcagctctcttcatggaaaacaccagaacagcctgatcctgtgtgggtccagtcttcagtatcggggaagggagagaaacatccacctccccgcacccaacttccctcaagctcaggaaagatttcctcaggtaacagttttcccccacaacaggcaggcagccctcttaagcgtccattttctgctgctgctgctattgctgctgctgctgctgctgctgctgctgctgctgctgctgctgctgctgctgctcctgctcctgctctagctgctgctgctgctcctgctctagctgctgctgctgctcctgctctagctgctgctgctgctcctgctcctgctcctgccgctgctcctgctgtagctgctgctcctgctgctgctgcttctgcggcaccaagtcattctcagaagccctctgtgcctctcattcaagctagcaggccctgtccagctgcccagccccccacc

SEQ ID NO: 136610 - DNA, 2000 bp, Homo sapiens
ttggatagctgagatagttgtcactgaacagtcttaattttccctgtgacatttgtccccccccttcttcttgagtaggttagttgatgatttattgggttggatttattagttttatgacttttgttatctagtttattgtctgatttgactttaataattccttctggtctcaggtttattttgttcttttaaaaattaggtgctttctgttctcactcataagtgggagttgaacaatgagaacacatggacacggcaaggggaacatcacacaccagggcctgtcgggaggtgggggggctaggggagagatagcattaggagaaatacctaatgtagatgacaagttgatgggtgcagcaaaccaccatggcacgtgtatacctatgtaacaaacctgcacgttctgcacatgtaccccagaacttaaagtataataaaaaaaattaaatgctttcttctttgtcttgtttatttcaatgtttaaggttagttattcctctgagcactgctttagcagctgatgtgtgtatttggtcttttttctcttagctcttctgtgtcttcaggtttttattttcctatgaatgaagagttgtttggaggagttaaaaatttccagtgaaggtgcattctgcattttaattttatttatgtctagttttgttgcactgtgattacagaatgttgtctgaattattctctaatttattgatgttaactttgaagctcattatatggttgttttctgtgaatgttccttgggcagcgaaaagaaggttatactctcttctcaggttgcagagtgtgatatgtcagctctgcaatattatgttatttaggttttgtgtaactttactttttttatccacctgatttgtcatggatcaaacacaagagaagttaaagtctcctaataatgattctctttctccgtatagctcctattgtttttgctttatgactatcagtgttatgtttgatgcttattaactcacatcctcattgtgagatatacccattagcattagagtgctgcccttttactagttgaaggctttttggcctggattcgtccttatttgacattgagatctagttccctattttcttgtttacatttcctgggatagcattgccatccttttattttcagtttttctgaattacttcgctctaaatatgtctctaaatgtagtgtaaagttgggttttgctttgtgaatcagtctttttcatgtggtaagtttaacctatttatacttactggtatgatagatctgtcatctgtaatgataagcatttgtaattttctgttgctttctgtttttaatacctcagttttcctatgttatatatttgctttgttttgccatatttattttaataaataactaggcttgaatttttggttctagtggttatctttatagttattactttatttctatagacctttgtcccatatgggtcaccacttgtcagccaggagacctttgagcacttgaaatgtggctagtgtggccgaaaaactgaattgacttaatttaaatttaaaatggatacttgatgcagttaatttttacatctgtgtagaataacttggatatggaatccactttatcacctgtaaattttaggaaatctctttataggtcaattatttctgatagaaatttagcctctgaattgagatgtgctttcagtataaaatacacactggatttcaaagacttaatataaaaatagtaaaatatcagtacatcttatattgattgcatgttgaaatggtaatattttagatatgttgggttaaatggaatattatcaaaaactttatttcttttttatgttaatgtggctactaggaaattttaaattatatatatggcttacatatttctttctttcttttttttttttttttttttttttttgtgagacggagtttttgctcatgttgcccaggctggagtgcaatggtgcgatctgggctca

SEQ ID NO: 136611 - DNA, 1423 bp, Homo sapiens
ggtttcctttttatctagtgcacagtctgagttttcatatgctcagtgttacctatatcatttacggtgcttttatcatggtcagatttgtcacctatagcagagtttgtaagtagttattaaatctctctggaatctattgccattttctgatgagcctttgtagctaactcatttttaccctgttctgctgtcaagttgcccaacaattattaagacctcaagtttttctcttgaaacttggctgtttctcttttatcttggccgtttctctttgatcatatgctaagctctcagagtagtttgtatttgtggattctagtcaacatggcaacttttctgattttaactaaatatcacattttaactttgtaatttatgttgaaatttggtgagggcagttccttatttattactttacattttaaataattcttgcttttcttgtgtactaattcttcttgataaattagtcattgtgcaccttgaatagcatatcatcaaaagtgtgctaagggaactgtggatgggttacgtggtgttttagggtttacatctttgccatgtacttggcattgaaactggcattgaggccgggcatggtggctcatgcctgtaatctcagcactttgggaggacaaggtgggtgaatcacttgaggtcaggagttcgagaccagcctggccaacatggtgaaaccccatatctactaaaaaaaaatacaatacaatacaaaaaatcagctgggagtggtggctcatatctgtagtcccagctactcaggaggctgaggcaggagaatcgtttgaacctgggaggtggaggttgcagtgagccgagatcgtgccactgcactccagcctgggtgatagaatgagactctgtcacaaacaaacaaacaaaggaaaaactagcactgaagtatcttcagttagcctatttcgcttttatggcaggaaggctagtttacgctatacttgccttcgtgggagagctgggtttgattgtgacccatggtggatgtccttcatatccctcaaggagaaccccattcctggtcattgcctcatcttaactctgagattaaaccttttgccataatgaatggcagaaaaattgtagtaaactattacatttgcacaggtcagcatttatattcgctctaattgaatacttagggttctaactcagtggtatgttatttccctaagggtcacctaaacagttgtgattttattttcattcttggacttgatctatgattctccttaaccatttgagttgtaccagtgttgctttctctcttaccagggcatggaggtcagtatataatagtctcactgttgggaagaaattatcatctctctaacattttcccataccatgaagttaaatattttgccatgtgttgctggccagaaaa

SEQ ID NO: 136612 - DNA, 1016 bp, Homo sapiens
agattcaatagattcgactagcacttactgagtacttaccaactaaaacaggatatcatctaattctcacaacagccatgcccattttaccaattaggaaactgaagttctgagcgggtaagaagatgactcacacgtataataggtagtagagccacatgtctgcccgcctgatcgtcttaccacctctttatagcagagaaagtaggtgagggattgggcgcagtgtgtgagcaaaacaaactggaggaaaggaccatcgagtgcattgtcaccgcctcccaagcattaccacatcctgaagcacagccgtttccttctcgagtttgtttagtttttatcttccccatttaagatcatctgaaagtgaaagggaaaaaaagagctgacactgaaaagtctcttacagagtacaaagatgtttgtgatcagtttcccaagaggctgaaataaaactcaaaggtgaaaataaagacaacagtacatgggtaaataaaaaattggggatgcttaatagccattgtctgggcttgaggagttctttgatttgtttaccctcattgaattttctatgattagatgctagtccatggttctcagtcctggctgctcatgagaattgtctggggagcgcctgaaatgagtgacacctgctccctacataaaccaattaaatcaattgctgcgggtaggagtctaggtgctggtgcttttgggttacccaggcgattgtgtaataatattcttccagagttaaaaccacagtgttagagctggtgaaatttttgcccaagagctatgaaccactttaggggatagagtctgtgagtgagatgccaaaggttaacaccgaagtcattctggagtccatcagcattagttgaaagttctggatttggaatgaaatggaaactaagaagcattgggaaattgccaaggcatattcattgcctttgaggagctcatagataaatgagaagctgggacaaatacataaatttacgtatgctagtcag

SEQ ID NO: 136613 - DNA, 1012 bp, Homo sapiens
gaatgggttctcagggctgaccaagcagtaactgacagttcgattgtgtatcccatggcctcagactattctgtttgagcatcatcagcgtcattagtgattgctatttaattagcccctcttctaagttttaagaatatgtgactgttaaatattgtggtttattaagtttttatttatagagatgggggtcttgccacattgcccaggctggtctcgaactcctggcctcacatgatcttcccatctcagcctcccaagtagctaggattacgggcgtgagccactgcctctggtttaaatgttaagcacatgttaaccctcaccaaatctctgtgaagtagatactgctctttttttataggtggttacaatgaagtttagaagtgtaaagaaacttacccctgctcatgaagcttgtgaatgctctagtcaagattcaaaccctgacctttgtcatcgaacttcagcacctgacctttgtcatcaacgccccgcaggaccataagcttttctctgaatcctgaactcaaaaaactctgaaaattgaatttctttttcatatatttgctgccacaactcattttgtggcaaaaccagacctgaactgacttgattccatagtccttatcctacttactggaaatgttcacgtatttcactgcagctatgttgtggctctctaatactctgtattgtacaatgtatggtatagactcctttttaccttcctaaaattgaaaaacctttaaattctgaaaccatctagatctgcaacttctagagaagagatgagaagctgactatggccacctcacacctgccagccagctctcactgctcacaacatgctcgtatcctgtgactcctaacaggctgccaacttggaaatttaaacatgtatactttcattaccctcaaaaactcataattgtgaaaaaattattagttcatactgatactaccagtttcagtttaacaccagaattcttctacttcttccctattccag

SEQ ID NO: 136614 - DNA, 1006 bp, Homo sapiens
gtggctcacacctgtaatcccaacagtttgggaggccgaggtgggcggatcacctgaggtcaggagttcaagaccagcctggccaacatggtgaaaccctatctctttgtaaaaatacaaaaattagccgggcatggtggcggatgcctttaatcccagctactccagaggctgaggcagggagaattgcttgaactcgggaggtggaggttgggtgacagagcgagaccctgtctcaaaaaaaaaaaaaaagaaaaaagaaaaaaaaattatctgatacttgttaaagatggtagggaaggctttattcaagagggaccactacagtgggagttttgcaatagtggggagagatcaggttgaactcctaatgcaacaaggacaagtggaaatttatagccaaggagcagagtgtgggtcaatgggtggaaagttactaagaggaaaaatccaggttggaggggattcttgttgaaggcaggccagcatgataagatatcgagggtagggggatcagacaccaagggtaggggattttcactaaaatgactcagcaggatttttgctgagactggactaagcaggtcaagatagaacccaaagtcgaggcctagtcagaaagaggactcagagccgggcacggtggctcatgcctgtaatcccagcactttgggaggctgagacgggaggatcgcttgagcccaggagttcgagaccagcctgggcaacatggcgaaaccccctctttactaaaaatacaaaaattagccagctgtcccacctacctgggaggctgaggtggcaggatcacttgagcccaggaggttgaggtggtagtaaaccgtgattgtaccactgcactgcagcctgggtgacagagtgagaccctgtctccaaaagcaaacaaacccagaagaaccggtttcaagtttggtcaaaggagagagtctttgtcatcccacagtgagaacatcaatgtttcttttgtgatttaaagataatttcc

SEQ ID NO: 136615 - DNA, 1023 bp, Homo sapiens
tcctggaaagccctatgaatgggagtggatttacacgttctgttacctttgtacttggcagttttcccatggtgtttatttgaaaacaagttcagattatatcccaggtcacttttgtattgccgctggtaacactaggaacgtttttgtgttaagaaaaaaaaactgctttcaaagttgcctcttgtaatgaatgttctttttctctgctaattaacttattttcttgaacttgctatttcaaaggataaaaattcaactagagactgcaggattatttaattttctctttccaaccagtagtaaccgtgctaccgtgggagcactttatttctccatctgttagactataaaatcatggaacatttttcatgtcttaatagggagagataatgcatgtgagaaaacttcatatatgtttctacgaaaggaacttcctgtgcggctggctaacacaatgagagaagttaatcttctgccggataatttacttaaccgcccttcagtgggattggttcagagttggtaagtaaacaatgtggcttaaaatggatcttcccacaatgctgtgaacatttggcagcgagaccattctctgtaaaagtgcacatactgcccgtctaggtaggaatgagtcatttgggatagctgggttttccatgcaattaaaagttgttttgttttttttcttttagagctgtttgttttaaagttgttttagtgaaaatgcttgttaagttatactagacactttcctgagtttttcttgtgtgtggtgggattgcagttcttctgacaggatatttgctgcttttatcaagtcttaaccttactcctttcgttttccttgtaaagacattccttgaagtcagtacttcttgtagaacaaattaagtcatttaaaggggaacctcagattggaaaaatatcagttccctcctttgcttcatttgctccatgaaaagtaggaaaaattttgacagagtataacataaacttaaatcagttatagctctgatgctt

SEQ ID NO: 136616 - DNA, 2912 bp, Homo sapiens
tatatgtgtaacagtcatttttagttactagagtgtcctcatcctctatccaaaggtgtagataataggattagtggcaattaaagcttagaaataattagaataaagggataattctttcaggacatgttaaaaccccaaatagagatcacatatctctaattggaatatctgaatccccaccagatccaacagatcctggctggatatagctgctgcactaatgggcctctctggatctcatttttctgtgttctccagattttaatgttggacagactgtttcttatactggccctgattgagatatggagctattcttaatccagaagctgtttctgagggtttaattggccttctttctcccccattaagtactgatgaaattaatttaactcagaaggacccttcttcacttctagtttctaagttcttggcaggcacttcagtgtcacacatgtgtttcttaaaatgtataagtacatttttggtaatcaaactgtagacttggtatataagttaggatatgtctgtttgtaagtagaaaaaatgcaaccgaacctggctcatgtcactagaaggtccagccgtagggtgagcttttggtgttggtttgattcagagattcatgaagctatcgaggccctgctttcgatggtgctggcttcattttcagactggattcccccctggtggcagaatagctgcagcagttccaggcttccaatccacacagcactgcacaaaagcagagcaggttgatttctctgccaaagtcctctagcgagtcttttctgtcattttactggcctgaattgagacagtatgtccattcctgagccattccctgtgttcaggggaatgcacacagtgataggcttagacctaaactattgggctaatgaataattagtgacaagagaaatagaattgcccagagaaaaatgggaccacccaggatctttggaggcactggcttccctgatgcacttaagccacatgggggatgcggatgggatggagacctgagtgaaattttggagtgttcttaggaagagggagaggaggggtggatgctgggcaggcaactaacatagtaactcttctttttcttttttttttttccttttaggtatatgcagagttttcttgaacttttagaatatgaaaataagagccctgaggatccacaggtcttggataagtaagtatggtaccacttagctgaaagtaaaaatatctaggtaagaaagattttggtaaatgtaattcaagtcattaagactcaaggagtatgaatgtggacaaaagcgttcattttcttaatgagtagtgactcaacattgagttttttttttttaattcgagctaagaatgtaacacaatacaaaagtaataatgacactttcagttttgcttttatgatctaatacttaatacctttacccaaggtgaactgggcagtcactataaacactgcagtaaatgttccatctagtggtagttttaagaatgcagtggcctttttatatacatgaatttatctactcaatcctttacaattaaaaaaaaaatttcaataggatattacatttgagctcaaaaactgtagtggttttattttggagaggcataaaagtatgtttttttatatagcaacctgaattctattgctccctttatgcacagactggcaaattatcatgctgatgagattcatttttatttatcccaggaacactaactctagctgtgagtatgttttcccctccaagagaaattaaatatccctttcacattaatttcttcctgtttcatgtatatgtaagtggatgcatatggtaggcctgttgtgctgagaaatttctaagtataaactagtccacatagttatgagactgaacacctgacttaatagatgttccataagaagaactagggaaacaccatgttatacaagcaaccttaggaggtatttaacccagtcctctcaatccacagataaggaaactgagttcagagatgtgaagtgacttgcccaagattgtgaccgttcatagcaaagctggacctataagctatgtttacgtctgagccatgagtagctagttctagtctagttgtaaactaaaattcaaaggaaaaacaaaagccctcacctattttatactttgttgggtgtttgtctgatggatctgtgaagtgtggaaggcagggaagcattgggttagagccccagatgtagcgttttccttgatataagccactgctgtcatttaagcgattattaaatgaattcaatccaggagctttgttttctcaaaagtcattagctggtaaccgtttggcagaaatcctaaaacctagggctgaccactgtagctccaaattttagaacaaatttgtagaagtatagttggtcctttgtactggcagtttccacatccttggattcaaccagccacagattgaaaagatattcaggaaaaaaaaaagcaataaaaaataacaatgcaacaataagaaataatacaaaattttaaaatacagtctatcaactgtttacatagcatttacattgtatcaggtattataactagtctagagatgatttaaagtatccgagaggatgtgagtaggctgtatgcactattttagataagggacttgagcatctgaggatttgggtatctgcggggatcctggaaccagtcccctgcggatactgagagacgactatacacgatgttaaatttctgctgtgtttttcccggagtcccgtctcagtttctggaacaggttatccgatgtgatttatggccacgagcctgctttgcaaactgtcagtgctgaatccagtgtgtgcttgacgatagcaataatagctgagctctcactccgtgagttttgta

SEQ ID NO: 136617 - DNA, 2849 bp, Homo sapiens
tagttttaaaaacattgacactggaaatattgaattggatgttggtgataggagccatcagttctttatttcacagtgatcagtgaagtcagattaagccagactgtcagtccataatcccgtattgagagttttagtctgctcttgagggtactaagcagatatgaaaaaaacaactaaaattccctccacacaaaaaactttttggctcatcttcagcactgtctctttggctgattttataatccttgaggaaaagcatccacatgtctagagcataattcaccctgtttgctgcatcacaaagtggacaaaccatctttattttagtaatttgatttatttggataactgaatgttatagaactattaaatgtggccttatattaaatgtatatcttcaaaatggaaatgtatgacaatttacaggaataaaagagcctaaatactgttcaactaaactacttagataactccagttgctttctgatctaaatacacatgtacacatatatacgtgcatgtttttagatcattagttaggcctacacatctctgtttttcttccccttaatcagttcgaactttattaattagcctaatgcctgtatttatcatttttcatagtttaaaatatcccctattttatttaggcatccttcttttgttagtcgcaatttttgcttgatttaaaaataagaacacctataaatatttggatgcagattgcttttttctttggggcttcttttggcttttattcagaaacaaaattttgcaaatcttgtatattgtgaaattatctgagtgtatttttaaaaatacttgaacaagtattgtttgtgtacacaacattgaaacataatctccatgggggaggcatctgaaatgctgccagcgaagacactttgcaagcttgtccaaatggtatagaccacatgttctaaatatttaatgaaagttggagtttgtgtctggagtagtactaagaaggtgggtatacttgactaaggatgaaagtaagtttcttcatccatgtcacattgggagaggaagaacggattgggcacctggcacgtgtcactgctttagaacctgctgactgcaactgacagaccttaaaccacatcctcctccttcattgaccaataagagttgttcacccatcaattgtgtgtattccattgctctaagttgctgtggatgctaaaatgatttttacacataagatatcctttctaaacataagcccctatatttccctgtgtgaccatcccagcctgctgtgttttaatcccctccctttccttttgtgttcgtctagcacttctgtttgggggtgacactaatcctgttcatcctaaacacataggaagtatcgatcccacctgtaacgtggcggatgtggtgaaaggtaaggagaccgttgtaatggtatcgatcgtagttcaaattggattgtggtttattggaggcagcttggctatagggttattttgcagtgcagtctgctgattcatcaggtcactctgggcccaagccactggatccagatgaaatgttctttctaggcagttcaggtaggcagttctttctaggcagttcagcataattggtaaggctcaaaatgtgagtttctactttattgattagagtttcatttgtagttctgtctcaaacagtaaacatttaagtaagattctgattgccactgttatctgaaaatttcagagaatccaaattcttatcataaaattaggttgaattcacgtgtctataaaatttaaacatatttctgttgttcacatctggctttagaatttatgtggcatgtaagcttcatgggttcattggactttaagctagacattgttccagtatcctccgggaagaaccaagccctatatccgtaagtccctggtacccaggcactttgaatttgaacagcagtttcctcattatttattcatttaagatcaatgctatctccaagaaaccttcctggttgtgagcgatccaccaggtacctcttcagttttcttcattgttacggttactttgtgcaacctcagatccccaaattgtccctttctgcagattgtatctcctgtgttggcctttatctcccttctttaaacgctcacctcccaagtttcatggctgcaattctctctgatcttcatcaaggatcttcattgctcttcagcagccatagcaaaggaaaacctctgtaatttgtttaccctgggcattcctaaacccagggaggaggaccagacctgttggttttagcttagcctaggattgtctggctgccctggcctctgttgagtcacaacagatttactcacattatttcagttgtaaggtgaatcagcccagcctcagctctaggaatcctattggttgctctctcacaagataactttgtggttgatcagaacctccaaaggcctccgggggcaaggaggaaagggtcagtcttatcatagcttacatgttcattaggccttagctcagtgccttttatgaaacagaaaacttggttcagacagttgattacccctttgagaaaaaggcacaatttagaaagcaaaagtgcattgtgatatatggtatgtgtgcattttctcttgaactgtaaccaatttgaggtcagggtttgtgtcttatatttgttttataacttgcatagaaccaactgtagtgcttgtgtaggtgattaataaatattccttggtttgatacattttaaatcttttgagaatatacttttaaaaacagctttattgagatacaatctcatatgataaacttcaaccatttaaaatgctcaattcagtgttttt

SEQ ID NO: 136618 - DNA, 1045 bp, Homo sapiens
caggctgtacaagaggcatggcttgggagtcctcaggaaacttacaatcatggcagaagggtgaaggggaagtaagcacgtcttcacttgatggcaggagagagacagcgaaggggaatgtgctacagacttttaaacaaccagatctcgtgggaactcactatcatgagaacagcaaggggaaaatctgcccccatgatccaatcacctcccacaaggccccaccgccaacactcaggatcactattcaacatgagatttgggtgagggtgcagagccaaaccgtatcaatgaagttttaaaaacacttgttttcatcatcttattgtttctgcacaaataaagtctttcactaatttttagggagcttttaaccaagaaccagtacaactagataagtagcagggagttttatgaaactgttaccacttctatagaacagagcgattaagtggtgctaaagtgagtcagaggtgtcagagtgtgaggaggaatcgactgtgatttgactcttaatgtgaacagaatcgatcgttttatggcacttactgtctgtgttactcttctctcatatttagtacatattacctggccttgtcattatttgtactttcttttttttttggagatggagtctcgctctgtcgtccaggctggagtgcaatggcgtgatctcggctcactgcaacctctgcctcctgggttcaagcaattctcctgcctcagcctcccaaatagctgggattacaggcacccaccatcatgcccggctaatttttgtatttttgtagagatgaggccatttgaccagatgttggccatgctggtcttgaactcctgacctcaggtgatccgcccgccttggcctcccaaagtgctgggattacaggcatgagccaccatccccagcctatttgtctctctctatctagggtgtcaatttctaaaggtctggaattattcttatacgcttttgcatcactcctcttagggtcagaagttttgtaccaaaaagtagctgaaggttatatgaagaatagttcaa

SEQ ID NO: 136619 - DNA, 1008 bp, Homo sapiens
tgcactgtggccagggccaaaaagtgcagaaggtgaatatagcccatcaaccttaccttcatcttcagatacttgcaaaatagatctcggattcaggtatggctctatgagcaagtgaatatgctgatagagggccgtgtcattggttttgacgagtctgtgaacctcatatcagatgatgcagaagcgattcattgtgaaacaaagccaagaaaacccctgggccagatcgtgctaaaggagatcatattctgccacaaaatgtctctaaccagaaatgatcaaggaagtgagacactattgagaacttgtttttttaggtgtcatttgttgggagtatagttctaaaatgcctgttcagattgtttccattatctgtatatattattaccagatgacagtaaatgctgtgggattgtttttattaaaaaataaaataaaaacaattaaaaacagcccatcagcacttttctaatgttttctggtcatttacatttacctttttgtgacactggcttcttaaacttcagctttatgattttctgtattctgttagactcaaagttagggaccttggcaccttccttttaattttttcagcactcactcaaattcatcctagtccagcctctcatattttttgtctcaaatgattgcatgcattcaagatagaggctaatatttgatagcagagttctgtggtgaattttgaataggaaaatctgatgaaacaacctccattatctgttcaattttcctgtgtgctatttcttaaaacggattcatggctagtttggttctgttgggctgattgctgtgtgaaccttcaccctgttctcagccttttaaaattttagtctaatgcatttacagtttagatattttaacctggggaagtatgtatgagccacacctgcagttttgttaattactttataatcagtaccttaaaacccttgaaaacagattcctaaaagaaggcatgtcacttatattcagtggcaataa

SEQ ID NO: 136620 - DNA, 1034 bp, Homo sapiens
taaacgggcattaatcccatccataagggctctgccctcataacctaatcacctctcacaggccccatctcctaataccatcacatcaagggttacatttcaacataggaatttgggggagacacacacaaacattccgtccataagaggcatgaatcccaacttttgaaagagggtcactagatggaagtatgctgattggtgggacagagcagaagcagccacaggggaggaggctgcagcagaggtggcaactggtttgccgaagattgtcctggagggactctgggggcagggccaggtggtgcaatggactggaatgggaagggaaggcagagggtagggttaactgaaagctggtctaagaaagagcatggagggatgacgggaggcagctgtactctggccgggttcagcctgccaacaggcaactaagtattttgttcgagaacaacctaggaagaattagggcttttcatgtgagtgttgttaccctgcagcaaagccctgttcgtttaagcatttgggggcctctctgctcagaggcccatttactacctgctcatcctcaagccaagttgaaaagtcttgaccagtccagagagctctaagtcaggcttcccacttaatggagagccccagggggatatgaacgccagctccctcatacagtgaatccggttcttcattctcaaacaagaatattgcaaccaagatggatcagaccttcagcaaaagccagcagcaagaaccaaacctaactggcattaaacttatcagctctactgttactgccagaaaccccccttttgaaattctgagagaaaatcatttcaaacctagaattctctatctagccaaacctttaatcaaatagatcagaggtgtaaagattgacagatgtgtctcccatgcatccctttctgaggtaggttacctgactgccttgatgttatgtataatatgcatctaagaaaggggaaaacattctagaacttcaatcaaaaacaactttaggatgatggctatgcagc

SEQ ID NO: 136621 - DNA, 1062 bp, Homo sapiens
ctgctctgagcgtggcatcacagttattcctagtgcttaaatgtgtattttctctctaccacctggactttcccaaagagtttttcctgtagctactccagatcttccactaaagtagtaactttttaatgacatcttgctgtggtgtgattgatgcctgtcaccgaagagcacagagcctccttacagctcttgtgccctcgtactctccatcttgttatcatagcatctgatgtcttcagtccttccaggattctgtgcgcctttcccattccagatacagcagatcgtactgttgctccttgtgaccaaataccatatttgtcccaaacctccacctagggccctgggaccctgaaagtggaagacatcaggtggccatgccctgatgatttagtcccagagccctccgtctctcccgtgcctccctccgccactctatgatttagacttttgccttcttccatctgatcggattctcattgtgagatgtggtgactttcatgttagatcttcttcattgatgccttggttttattttaaaattcatttgtatatgtctgttgattaaagcattcgaaatgttatcttagaatttttcacccaactgcttggtttcaaagatcttaagtgaaaaactgcctcctggtcaataccaaatttgtacagagtgtgaagtggagtttttatgcttctgtcaaacttccatccatctaatactgtacctgtgtcatattttattcctttgtagtcttctaaggaattggaagtttctgtatgatgcgctttactagttgtaaaatagactatcagagggaaaaggcctctctagtttatttttgaaaaatgctccaggtcttaataattttcattttcattcatcttagttttagaattgtcacctcagtctgattttcacaatcctttttgctaaaagttggaagtgggaattagcagacgatttgggataaggaaagaggaatgatgttatatttacccttaggaatagaagtgaccgaagaatccggattgaaaccagcatcctatatacagctccacagg

SEQ ID NO: 136622 - DNA, 1045 bp, Homo sapiens
actgcaacctccgcctcccaggttcaagcaattcttgtgcctcagcctcccgaatagctgggattacaggcatgcaccaccacgcccagctagtttttgtatttttttgtagagacggggtttcaccatgttggccaggctggtctcgaactcctgacctcaagtgacctacccacctcagcctcccatagtgctgggattacaggttcgagccactgcgcccagccgaccctagcttccttataaacatgagataatatcttcctaggcctcaatttccaacgatactcctttatgctttcaagtgtgatacactgtaggagagaggaggcagcagtttagggggtgctgcctactgcctgactctgacagcgtttctcttgtttgaggaaggcccatcgatcaccacatcctcacaagcagtaccatgtaaggggccgaatatggataatatggtgtagaaaaatctcatcacattcttccctttacaagtgtttttcaaaagtaaagattgatttcagtgtcttcatgacttaatcggtagttctttactagcacgctttttggcttactcacatccatctgaccccagtacaaccttgcttctcctgtctttgttttcttcattaagaatttatctttaaccctaaagcaactgcaagaagagtttcaggaacatctgtgttcttctggcttactagcctctttacccaagtattcatttatcctgtttgtcaactgtacatgattcttttaatttaggcagagaatctggctgtttactgggtttgcctataagcaaatggtcagatttcccccatataggttgtaacacaaatagacatggaccctttttcagctaaattctttcccattcctctgtactgctctttcatttactctattttattttaagtggggactgtgtctatttaaaatagtgcctgacacatagtaggtgcttaataaacaatgttaataaataatattaaaataatgaataatattcataaatagtaggtgaatcaaagatagaaaactgtca

SEQ ID NO: 136623 - DNA, 1045 bp, Homo sapiens
gaagtggaagccacattacaaggaacaagccctagaatcaacagtacagaaaactgagtcagtcagtgaaatggaggataagacttgagaaaaaaatcatacagcatgaatgaagaaagatgagatgagtgccatctaaggaaagataactgtgaaggacagatgacagagagccaatataaaaatgaagttttcaagaagagaacagactaaactgatacaaaacgcagtgaggcttgaaatgaccatatctaatgctcactgcattccagaaaaaggcaacagacaacagtcaatcctgagatatactccaacgaagttactaaatttcaaggataaacaaagaattcaagtatccagggcaaacaatcaggtcatctacaaaaggggaagaaaaatccatcaggactcagacctgtcagcaccaccagatatggacaaccataaagtagcaataacatcctgtctccagagaattcaaggaaaaaggctgtgatccaagaatccgatagccagccaagttattgttcgtaagtaacagcaacaggaatacatttgtaaatatgcaagaaaacccaaccgaagctgtaatccagtctgcaaaaaagataaaaacatcagctctcaaatgtggagtctttgtatgaaagggctggcagtaagcactgaattcattcagacacagaattaagtctaaataactctagtaattacctacagctatccactttaagttgcctgtcatttttggtaaaagctgccaaatccatctgattatctcctctaactatgccaaaatggaaacacacaaaagaaaccctctcctgaacggaattaacttgctctacagataatttggggtttagagcttaccctttgaggaatagtatactgaagaaattcctcaaaagagataatacaaatcacctggcgtactgttccaagcacccaagtgcttgctttggcccttccattgacttaccatgccaccttggcaaactccttaattgctttgggattcatacaaaaaaccgatatacctgtg

SEQ ID NO: 136624 - DNA, 2230 bp, Homo sapiens
gcactggttttaactactctttagttcatctttgccttccaaattggttgaaaatggcaagcttagaatggaatgcatattaataacagaaccacttaatgttttaaaatattcataccttgagattctttttgagagaaaaaagaaatcttaacatccaattctagttgttttggcttttcacatatgctagacatgaaaaaggcagttacaaaagtgaaatccgattggaagtcagtggtgtccgccattgagccgtgctaaatgtcgtgtcacaaaaggagtttgtgaaaacaggatgagtagaaaatgttatactgttgtttctatcgtggcaccgctttcttataaattccatttgctttttgtcatctgaactgttacaaccatgggaaacctcagtccatatttttaaaagcactatatacttacaggaaaaaccgacttatgccttcattgaaaaaatgttgaagttaatatcccaaatgtttaatgagcatgttttagaatatttacagctaaagtctgtcactttagggatttgacaaaacttgagactgcctgccaccgaagagggaccaggcagaatcttctcagccttgtaaccagcgttaaaaaaatataaggggcttgatgagatcctagatctgctccttttctcctaggtgcctgggtaactcctggggaaagcatcatattaagtccttttcaagcaaggtgtgtgattttgaccaatgaattgagctgatatgtgattttgaccaatgaattgtgcatctatttaaaaattaccaagtgtatcttgactcttgagtggacagtcaaggcaaagtttacttaggaaatgtaaagtatggagtgttttaaaaaattcaaattgagtttattcactgttggaggaattgaattctattgcctccctcatttccattatgttcattgttacaattgtgctgctctgttctcattgtgatgcttagttctcgtgtagaactgagtgctacattgtgattagaaactggagttgtgcttgagtcagtcctggaaaacaggacccatttttaagaagaacggaacataccactttggcattctggctgaccctaatttctgcagagttccttggtgttaaaatcatttgaggtcatagttgctgcttatggtttatatacacaccatctgctgctctaagttcacatcctctcaaaagcatgcaagtgcttgaaatttaaatatttcccagatctaaaacaacttgtgactacctaagaaatgcttgaaccaaataagaaacagcactgtggaataaaatataccattgtgaacatatctgatgctgcaatgaaatgtaaagttccttactttgctgatttttcatcataactccttgactcataaaagcggtgtctaaactgggaacagctgctaatagggtaaaagtattatacatcaaataaaagttcattacaatatttgtactcataagtcaaaatctgacctggttcgctttgtgcctctgtcagcctacttacagtgataaatgtacacacaagtccagtgttgccaaggagctttgtttatagaaagaagcttggtcccctcagttctatgctgttgtgtggcctggttggtacatgccgtcatgatgaaggatgactttggtttgagataatttgtcactccacattccatggagaaaagtgtttcattttgatgttggaaaaacatgaccagagaagcatgtgactcagataatgttccccggaagttgcagagcaatctgtggtgtctgtcatagcccaactagtcctggagcacatggacaattctgtaccccaataatcagaacaataaaatggtagttgtgattcactgtgcgtcactgtggtgttttgtgagccctcgtctatttctcatcactcccacctataaacttctctctcttggtttctgaaattcagtacattaacggcaccaagcacctttgcaaattgctgggaatagacaaggatgcttgcttaaagtcttatgattgagtgaaggaaaataggttatttggagtccctagcagggaacatggagctcaccttttttggggagcatcctatgggtgaaatatagtagctgtataatagtaaactgttagagttggtatttttcaaaatatggtccatggatagaagaaagagggccatacactgtactgtctaagtcaggacacttttgagaa

SEQ ID NO: 136625 - DNA, 1158 bp, Homo sapiens
agtcacactgaacgacttgcttctggcaagcatgctcctgtgtgtcaggaccttaccaaggcaaagaaatgccaggctcaagaggagcaggacgtgagacattggcctggcttctaacctggtctgagtggaagagacacagcttagggatttcagttttgctcttaggctactagatactgttatttcaccccctgagggagggacaggaagagcacggatttattttctctccgtcttcagtacttattttagcatctagtcataccccagggagagatgcgagacggtgtcactggctcagctgaagcagatgagcccgtctctagcagagatgtgcctgtttcttaggcatccgttcagcactagtcttggccatcagatttttaaaaaagaaatagctcatgaggcatttgcaacttctcctctctagacttctttctagttttcctctgttgtgtcactgcgatgtgtccagggacaaagccataagtagagcatacatacttaagactatgctgtacatataagacaagacctgtctgggttaaagcacgaccttatgcccaagcatttactctggtgctgaataacgcgaactactggaatcagcctcccccaactctgcgcgccccctgcccccctgctcctatcccattcttgctctcaaatggaccacaccattctcaactcgtttataaataaagggatgcagaattgcactttcgtgtgtcattgtcatgtttcttaagtgtgctgctgtgtgttcctatttatgaactagctcaatggggaaaaatacaggcattgcagcagctgtcctggcccaccggctggctctgcccagctgtggccccagcccttcagaaggatgtgactgtgcaccgtgcagagcagggcaaagccttggagttgccaaaggccccacatttgacttgaaagctagttaggaacagcaccacgtggagggaagctcacatggtgaacccagtcaggaccctgcattgtaggctccactactaactgactttgtgaccttggcctaaccttttcacttctttggcctcaaggaaattatttctaaggtctcctttgcctgtaaaggtctctgaatgtatgaggcaggctgcattgccccaagcttctaccagctgtgat

SEQ ID NO: 136626 - DNA, 1004 bp, Homo sapiens
gagtgctgtctgctgtgaagcaaaactatgaggctgagctggcttggaacctctttgttcttggcactttccttctccaggactctgggaagcactcatatgggacagagggctggcaggaacatggcatgtgaagaagaaaacttctttttgcagtcaagggccacccagaatattgctcttcagagagggacaagggcctcattcttccatttggtctctgtcttccatcatgcactcaggtcaagccatgcaagtctgcctaccatttgagttagttggcacttgtagcagtgaaggatgaggccagccaggcaagggaaggtggcgggaacaagggaagagaaaaggaggaaagaagttcctggagggaggaaaggaggataaagaaaatctgctctcataaaaccatttcaggacctcactttacaggtgagactctcttgggaaggcctttgtgcccctgctccatggcccagggcagatagattcacttttacctgaatcttatactctggagcaaatagtgtatcaggctgactatacatttgcaggccttacacgccatactgacaggtgccacttacgtgactcatcagataatgtcaccattgctgccaattatgggaaataactaatgcctattccagggatgagcccaaaccacacataaatgggttctaaatctcaccctcctaacctgcagtgagtccccccgttccaccctcttgaggctgcaaatctactgagaaggaatgggaaggattctacaacccaacttttgatactttttggccatctctcagtctctcccagcccctacccccacaccacctccctgctcccaggcagagaccgggttgcactttgttagggccagcaggtcaactgtaatggccaagagtgagttaaggctggaatgagaaatatgccccaagcttggaggggtaagcaggaataacacaaagcaaggaaagagattctttttgccctagtgaggaaag

SEQ ID NO: 136627 - DNA, 1048 bp, Homo sapiens
acacagagttacttttgccacgttcatttggtacaagcaagtcactgaggccagcccagattccaggggaagggaattgggccatctttaatgcaccacaatgccctttccaaattgaatagtcaggtagcattttacttgccctagtagcacaggctaagactcgatgtaacttttcctatgtgcaaggacccttccttgtgctccatcaaatctgctctgctgattccttagcaggagggagaatcacagtaatgatctatttgggacccaggtagagaaggccagaattcatcatgggagaaagatgctcagaaatggcctcagcatccatatttggctttcatactcaaatcatggcttattttgaaagtcaaaagtctctttaaatgaaaccagagatatcaagggcatgacttaagctttacaacactctgctctgcttgtcagaactatgtgtcaaaatcctctagcaaagctggatgaaaagatggagcttaaattaaatagactgtaaggtccacattactcatcaccattctaatattgcctactactgttgaaagtttccttcattaacatgtgctttgctgcttcttaaaatagctccataaccaaatgccgcaattctgaaaagcatgataaaaaaggttctctgatcatgctcattaccgaatatttttagcagagcaataattaggatttgaaggaagccgggtatctcattatgtcaacagaggacttggcttctttcagagacctacctcccaaccagccaaagcaaatctctccctaagccaaatctactttcagttactcaaacacagagacttcaccttctggcttcaaagaaagggtaagctcatggcatcaatgtcttacatgacttgctaaaatccattagtcactagagaatcgtcttattatttcagcaggaggggtgtgggtaaaatatctgcctgctgaaagatgggatggatttctcaccagaatgttccccactgttcccacaaaggtggggatgtcgtctgagggttcccccacccac

SEQ ID NO: 136628 - DNA, 1043 bp, Homo sapiens
ccatgcacacctctgtctactctgtcctcttgaatgatttgaaacaaaatcccagacttcctagaattctgtgtatatgtctgaaaaataagagctctggttttattaaacataaccactgtatcatgatcttacctgaaaaaacaataattccttgatatcaccaaatattcagtgttccaatttctaattatcttatgtcatcatttatatatagcttgtttgaacccaataatgtccatactttacagtaggttgatatgtttttaaaatctctttcaatctgcagatccccctttcatttctctttttctttctctctctctcttttttgccttgaagtttatttgttgaagagatgaaagatcagggtccttttttggcagggaggggagtcctggagaatttcccacagtctggaaattgctgacacaccacaatttttaaaagtgagcttattgcaaaatcaactttgtaaatactcttcagatttactaaatggcctttttctcagtaattacgtcttctttctttacttttctttcctccctgcttcctgaattcatttctcttgatcacctctgaatcaataacaaaaagttttacaaaactgccatctgctttcccctggggtttatatcttaaaacaaattttcctcaattgaattcacattgaataagaacattgaaagcaaggctccctcattagacagtttgttatttcaaagcattttctatttactgtgccttatttagaatacagtataatcctatgaaggcaattctgtttgttcaaatttgtgtataattggaaataattgcaattccctatctgacataaagtctctcaactttttttattagagaaatttaatttattagaaacattgtatcatctgaatctattaatgtaacatttctttatgttccaaattaatgaggttgcattgcatcaagaaataatcacaattttaaatctaagtcttaaagatcatttaacagaagttggcattgatttcttttttaaatttatttttataaca

SEQ ID NO: 136629 - DNA, 1052 bp, Homo sapiens
agattgacaaatatatttattttattattgagtttaaagtctgtatttgtctttatcaattatcattctcactcctgtgactttaaattcccccattcagcaaatattcttaaggaccttctatatgccaggtactgccctggggaatagggatatagcaatgagtagacagaccaagtccttgctttcttagagcttccctaatagcagggagagacggagcttaaatatacaatgtttcctcatctgatgacctggacctctcttctacctgcatccatgccctgagctgaatgagtgaatctagtctaatggctttatatatcacatactctctcagtttctaaacctgcatctctagcttagtcctttctcccaaacaccagacttatacatccaactgtctacctgacatctccacttggagatctaataggtgtgtcaaaccaaatctgtgagaatggaattgttaatttccccatccttgttgtccctcccacccctagacctactcttccagtgttttacccctcctagggaatggcaatgccatccttccagttcttcaggccagtagctttggaattatcctgattcctctcattctttcacaccctacatccaatctgtttcaagttttatggatccaaaatctatccagaatctgaccacttcttaccacctccgctgcgatcaccctgacccctgcctctgtcttcttttgcctgattattacaccagacacctcagtggttttcttgtttctacctttgacctcttacagtttattctcaacacattagccagatggtcttgttaaagctaagtcagatcattatcatgccttgttcaaaacgctctgatgcccagcactttggaaggctgaagcaggtagatcacctgaggtcaggcgttcgagaccagcatggcgaaaccctgtctctacttaaaatacaaaaattaggcaggtgtggtggcacacgcctgtagtcccagctagttgggaggctgaggcaggagaatctcttgaacccaggaggcggaggttgtag

SEQ ID NO: 136630 - DNA, 1003 bp, Homo sapiens
cagactgctgagaagcaaactatcaggcaaaattcagggcgcgcagcaggaggcagtcgctttcccggctctggggaaaacgatccaaccacgcccactctcctgcccgcccgcgcctcctttccgggaaaatgggctctgagaaccagagcgccctttctcccacgcgcccaaatcttttcccatcagcatgcgtgcgcttgcgcagtctccaggcggctcctttccagcgcccgaccgcttctttctcctgctctcctccggcttcccctcagctctagcttttccctaaggggtcatcacagggcgccaaacgcgcgtccgcgggaaggccgggggcggagcgcggcgcggcgcggcacgtcagtggccttccggccggaagtccgcagcctcccgagccgctgattggctttcaggctggcgcctgtctcggcccccgcgccagttttgggctggttggcgcggaatcgggagattcgggaccatggcacctgtgcacggcgacgactgtgagataggggcgagtggtgagggacaattccgcgcgcggggctccgggttgggacagtggcatgattgccggtggtgggggttctgagggaggcgcacacccgggtttgtttgggcgcagaccttggtcgtccccggcgggggcccttctggcgtcggaccgggcttcctttaggcgcggtttgctcttggaggaccagagcctggagggatttttgtttgggaggctgtctcacctctgccactgagagtctccacagtcgattgcgtttctatttcttttggtgagttgcacccacgtgctgggtataactttattgagactggccccgtggggccgaaagtatttcactgcgatctccctaagtatccacttgaaggcttgaacagaacagatctgtgtccctttttgtaggaacttccaggaaaattttatacattgtaactaagcaggaaagaaagctctaagtgctgtcatcggggaataacg

SEQ ID NO: 136631 - DNA, 1777 bp, Homo sapiens
tcggatcccctgtatatcactccgtttgtcaggggtgtcttttatttccaaaaatagaatacaaaaatgcaaatagatttgtctgattttttaagtgttcaactaaagcgtgacttcagttaacttctaacttaaaatcagatgcttcactttgttagctcaagcgtcacctctcctgtcattcagatacatcaccattaatgagaactcgcttcctaatcagcttcctttgcattcacctagttgtgagtcacagatttcaatttgttctagccgttcgttttttaagactattttggagagtcgacctgcctggattacagataggatgttgggtgtaagtatgtgaacgaacagtctttgcaggcctctatcagtgatttgccactaagccctttcttcatcctaaaaactacgtcatctatgaacatcaggaaatcactttggaggatactgtgcaatcttgagactcctcttaggtcatggtgttcattaagtagttgctggggacttgtgactggaatttttcctttagagcagactgaaggattgttacctgaaagactgctgtaagctagtgtctgtctgcttttggggaggatagagatactccagatggtaattttgaaacaaatatttaaacctttgtagctggatttttttcatgcttattctttttttgctaagttacctacgtgaagcattggagacatactccaaaaaacaaaatgtaggcttttttttttcttcagtattagcaggcagggcaccttgataatggcagtgaaaagttgaaaggtctgtaactagctgttactatatatgaaaaaagatcagggaatttttatttatttatttatttttgagacaaagcttccctcttgttgcccagactggagtgcagtgacgtgatctcagctggctgcaacctctgcctcctgggttcaagcagttctgcctcagcctcccgagttgctgggattacaggtgcccaccaccacaccggctaattttttgtattttcagtagagacagggtttcaccatgttggccaggctggtcttgaactcctgatgtcaggtgatccacctgtctcttcctcccaaagtgatgagattacaggcatgagccactgcgcccggccagggaaagtttaatgatcaaaaaagcaggtacagtggttcattcattggttcattcagcaaatatttattatatacctactaggtataagccttctgccaggctctggcattatgatggtgggtaggctggacatggtttgtcttcatgaagtacagatggtaaacatctaatcatatgcagaaaacggctttgctttgtttttgccttctaaagctagaccttggtactcttaggtatggtgtgtgtggggtatgtggatgtgtgtttgacttcacacgcggaagcgttacatgagccgctcctatattgctaagtgcaaagtaagataggcatcttcatgtaatccttaacagattttgaagcagacatgattatccccatttcacagatgtggaccctgaggctctgcatcagtcagagcccctatctgtaagctgcaggaaccaactctaccagattggttagaatttgttagaagaatattgtgttcacagaaactccaggaggactagtaagccagtctgggagctgtttagccaggaacagtgagtgaaattgtgccacaaaaatgggccagtgaggaggtcattgccaaccacgagcaagtacttgatgctatagctcatacctt

SEQ ID NO: 136632 - DNA, 3353 bp, Homo sapiens
ttcatccctttgtaatttggctcatgcctcttcttttgcttgtgccactttttactttgttctctgtgaaatttgactcctttttctaggcctgtattggaaacctctcctgtgaagccttccttgattttccaggcaaaattaacagctctctcctctgtacatttcctcagtactgagttcttaccttttctatggcaccatgtttatattgtgatggtaatttcaggtactttgctttacttgactgggggcctcttttggacaggcagctctgtcttatttgtgattgtaccctaaaccctgtgtagtggaacattgttgcctgtgtagtgggacgttgcctgtgtagtggaacattgttgcctgtgtagtggaacattgttgcctatggagtaagtgcatttgaagacctacagatgtcaggcatcaagggagtcttgaggggaatcgcttttcactttcaggggtcatgttcagtaatcttcaaagccttttcatgtaggcctgttcacgatttttgaaatcatttgagtgacatccaagtttttgtggctgtcatcattaagtacctttattccttaatttttacttaatgtctttctgaaaatggatttaaaagtcaaatgtgaaagtcaaacaatagagtgtgatattataaagagagattccatttctagaaagctagaaaaaaataagatctctaattatgccttacctttaggctatagtttccagcagtttattgccagcatttggtacatgttctttaaattgtatcttctatttcagtcaaacacttagtcaagcagcttaatgttgttatgaacattctagtggggttggagttttaggctgcctcttatccatacttcttttctttgcctgctcctttttataaattaattagcaccaaacacagtaaaatactagatttcacagacatagatggcaatcatgctgagcctaaactcgtagttgacaggcagcactgttatgcttgacttagtttttcatcagtgggtatgtgaaagtctttaattctgtggatgaatttttttttttttttttgagatagagtctcgctctgtcacccaggctggagtgcagtggtgcaatctcggctcactgcaacctccatctcctgggtttaagggattctcctgcctcagcctcctaagcagttgggattacaggtgcctgccatcacacccagctaatttttgtatttttagtagagttggggtttcaccatgttggtcaggctggtctcaaactcctgacctcaggtgatccacccacctcagcctcccaaagtgctgggattacaggcgtgagccactgcatccgcttgaatttttttcagtgtgtgtgtggaacggtcagtttatgatgatcggagcatgaataattcaaaagttgaatgaataaacgctgaagtcctctgatatttcagtaatttttgacaaaccatttaagtccctgtagttgttttagtaatgtcctgtgtcataaccaactgaggccttgaaataagtgatataccaataatcccctcagagccatctttgttaaatttctccagccctcaatctgttccttctttgaatttccgggtgctttggctgaatctcttttaaggcatttattatctctaaatattgtttagagccagttgctacttgtctcccatgttagatagtaagttctgtgagtacagagaccatgtcttttttatctttttttgttgttgttgttttttgtttttgttttttgttttttgagatggagtttctctctttttgcccaggctggagtgcaatggtgcgatctcagctcgctgcagcctccgcctcccgggttcaagtgtttctcctgcctcagcctcccaagtagctggggttacaggcatgcaccatcatgcctggctaattttgtatttttagtagagatggggtttcaccatgttggccaggctggtctcgaactcctgacctcgggtgatctgcctgcctcagcctcccaaagtgctgggattacaggtgtgagccaccacgcccagcctgtctttgtgtctcatagtgcctagtactttgcaaagagtagatgctccttgaagccttttagatattgattgacagattgcaaaatgaatagtgcttttataacccactggattacttctggctggtcatttctaatggaaaggtgataaattagctaacagctgatctcccttgtttagtgtctccgcaggatatcagttgaattgggaattttcctctttttagagaaaaaaataacagtgactttaattgttttaacaggatcttggaggaactttctggcgagtcatgtatatttggatatgtatgtttggccatgagctttgtgaattatttacattataaacattatctacttgtatattactaaaattgtatgttattgttggctagaaacttttcctttgtgtttgagggaagatggctgacaattttgtaacatctgttgtaaattttttttcttttttcagctctgtcagattcagggagttttgtatcttctcgagcccggcgagaaaaaaaatcaaagaaggggcgccaagaagccctagaaagactgaaaaaggctaaagctggtgagaagtataaatatgaagtaagtaaccatttttcttctttattcttcctgtgcatcatctaattcatagcctgcaggtagtcttatgtcacctttgccccagattagaaatactcatatattttaaactttttgtaatgggaatttattagtattggacaagcatgggtatgaggtagatttacagatcatggagaatgttcgacccttaaagttcctataaggtattttaaagatgattttaaaattccaaaatgaaagtacatagtcatatctatatttttccttattgagcatgctgtatctatggtaagtcccatgggtttgttggggtcatttagagatgcttttacttactcttaaggtattgagcagtctaagtgctacttcttggagagaactgttcttcctaatctcatttgcaagggtagtggcagtggagacttggaccttaacttctgccgtgttctgcttgtaagattgaatgtgatgctcttttggttttcctctacccactgtttatggcctgcaggtcaaaaacagagtggccaccatctgcataaatattgtctagcatcaccttcagggcttcctgagtatcttaattgccttatggccagaaagtgattaaccaatactagaaaataacaaccataactgatagactttttgaactaacatattattctaagtgtgtttaccaatgtgtt

SEQ ID NO: 136633 - DNA, 2220 bp, Homo sapiens
ggaaggggatggatgagggagattttccttctgaattgtatttggttgattgaacaggcatgaaaattatcgtctatttgcagagcgtacatcagctagtggagagggaagtggcatgccttacaggtttgctaagtgtaggagaaaccagtctagaaattacaagtgaataattccccaaagcagctaatgaagaattggctataattcagtttgttttttatgaaatagatgagtaattgatggtatgacaagtgtattatgctaatggaatcatttaatatcttatgttaacacccacctaaaaggaatactaagttaattgatgtctatttaaggaaaaccctgtagtggtgttgaatgtcagaactcatgatttggttgcagctactccttcagtctgccattccagtttcaatttgacaattttttcatcagaattatttaacactttgactcctctatttgaagcttttttcctgaaacttgtataatggtaggtcgaggacttcacaggtgtttatgaagaagttgatgaagaacagtattcgaagctggttcaggcacgccaggatgatgactggattgtggatgatggtaggtggggcggaggtgggggcggggatgttgcttcctaggcactgtgttagttgcttcttgtagattctcactcatgtggtggagttgctgctttgcctgggcaaatgtaaggcactgttaggatcttacctttggtttggattttcctttaattatttgaggatgaggaagcagaatagcaggacatttatttggggatattttggagaatctaggcacatacctcaggatgtagtataaatcctccaggtaatggctgtgtaagaattgggaggagccccttgtctgtggggccaatgcacagcgcttggaattaaggaatgcaggttcgggatccatcattcctactttccaattctatgaccttggacaagtcacttaatctctctgcgccttagagtcttcatctgtaatatggggatgagaaaactaccttctcccagagttgtgaggtgtatatgaggttctaggtatgaaaattaacttggtcagtagaaagcaccatacaaaggctggtcctaatgtcctgtgccccttctgaaagctcattggttctcacttgtagggtctgacttcatggccatgtgaatgctgaccacagggagcatgtagattgtgcctgtgactatttatgtttctacttgtgtagttggattcagctatattgccagttttcccttgtagactgggatatctctctgggcttgtggtaatcttgattcttttactttttattcttctggtagagtaaaactgctataaagcatcctattgtggcagactttgatcctttgggccaaatcgtttcctgaggtcacctgactaggtataatatatatcatttggttttgactccacacctgctgtgtggatgctgtgcattgtctgacacctgtgtgaacagaattctgctgcacttaaaaatagcacaggccaggaaaacatctgagcaggtataaaaggtttttttggtcatggctaaaatattattggccacttttagaaatttgatcccagtattaaattttgtccctgcagatggtattggctatgtggaagatggccgagagatttttgatgatgaccttgaagatgatgcccttgatgctgatgagaaaggtacctaccttttgttttccagggtgttgttttgagatttaaagaattctctaaaattagagatgacttgatactctgatagtttacctttgagagaaggacctaactaccattgtttttagatacggaatatgttctaagatgaagagaagtatggttttgtggaaaattaaacataaaaagcagaaacaacatcaggaaatgaagtttcatgtctctgttattcaagtagtgtggtctttacttattttgaagttttcaatcccgtggtcatttaaaacttgctgattttgagggctgcaacagtaattgatcttttttaattcctactgaagttatatacttagaattttagctctttgctaattgtatagcacaataacaaggtttagaactagagtaatcagcttgctttgtctaattgaaatttaaaataatatggtgaatgtgtcagattgtcttagctgtacaatcattggcaatttttttttgagtaaacaa

SEQ ID NO: 136634 - DNA, 1047 bp, Homo sapiens
ggtgggcagatcacctgaagccaggagttcaagaccagcctggccaatatggtgaaaccccatctctactaaaaatagaaaaattagtcgggcgtggtggtgggcatctgtaaacccagctacttgggaggctgagaatctcttgatctcttaaacccgggaggcagaggttgcagtgagccaagatcgtgccactgcactccagcctgggtgacaggaataaacaaaacaaaaccatagagaaaaatatcaaccaagtcccagtgaagaaaaattagcaggaaaatgcaataaaacaaaacagaaacactaaactgtggaagaattccacctcaaatatttacttgtattcaaatttttatccttctgtctaaatcctgccaacctacagtggtgagattaaagccctctcatgaagccttccttgctattcaaacctctgttgacctcctctgttcatacactatcaagacctgaattttatatactaaacattttgactattaattacattctgttttcagagtgctccagatgatacagatctcctgtctcacatttttcacaaatgtcctacaatccttttcacaatcttaggctcatgaaaatactttttttttttttttttttaatttatttttttattgataattcttgggtgtttctcacagagggggatttggcagggtcatgggacaatagtggagggaaggtcagcagataaacaagtgaacaaaggtctctggttttcctaggcagaggaccctgcggccttccgcagtgtttgtgtccctgattacttgagattagggattggtgatgactcttaacgagcatgctgccttcaagcatctgtttaacaaagcacatcttgcaccgcccttaatccatttaaccctgagtggacacagcacatgtttcagagagcacagggttgggggtaaggtcacagatcaacaggatcccaaggcagaggaatttttcttagtgcagaacaaaatgaaaagtctcccatgtcttctactttctacacagacacggcaacca

SEQ ID NO: 136635 - DNA, 1615 bp, Homo sapiens
aaaaacatttggcccatgttttcttgaattaaactcatttaaaatattttttcctacataccttgtatagaatctcatagttttgttttgttttgttttttgagatggagtcttgctctgtcgcccaggctggagtgcagtggcgtgatcttggctcactgcaagctccaccttctgggttcacaccattctcctgcctcagcctctggagtagctgggactgcaggcgcccaccaccatgcccggctaattttttgtattttagtagggacagggtttcactgtgttagccaggatggtctcgatctcctgatctcgtgatcctcccgccttggcctcccaaagtgctgggaatacaggcatgatgtatttttaattcttaacatttttcttcccaatagagatcaagtgactaggcttttagttttccattttgatttttgctgatgcatgtttctaaataattcatattccaataggaaaagatggtaaagcacgcaataaagacaagaggaatgtaaagaagctcgcagtgacaaaaccgaacaacattaagtcaatgttcattgcttgtgctggaaagaaaactgcagatgtgagtttcatggtttccttattttttgtattttcctttgtgaggtgaatttaatatttgattatacagataacaggtgctctgtatatatttgagtaacatttttccaatttcactcactaagttggatgtagatttctaagtgaattaaggcacctcagtggttggaacttgcgaaatggaaaagagaattgaacagaaaagctgaattgagagtgtgtttaattttagtgagtagcaggaagatcatggattaagggcgaaagtagaggatgggagctatagatgtaggaatgctatatacacaggtggttgttaaaatctgtgaatgtagatgagcactcagagagtgaggaatgaagaggcaaggactaactggctaggtccttcctttcatatacatgtgtgtagttttggtgagacattttaagtgcaaggctttctcatgttacctttctttatcatttccagaaagctgtagacttgtccaaggatggtctgctaggtgacattctacaggatcttaacactgaggtaaatgaatctccaggagttgtaaaatatgcagaggacatagactgaagaaacactctagtaattatacaaaacagactattgccagaattttttctttttttttgaaacagtagcttgcactgttgcccaggctggtgtgcagtggtgcgatcttggctcgttgcaacctctgattcccaggttcctcttccctgattcctgcctcagcctcccgagtagctaggattacaggcacctgccaccacgcccggctaatattttgtatttttactagagactaggtttcactatgttggccaggctggtctcgaactccttacctcgtgatccgcctgtcttggcctcccaaagtgctgggattacaggcgtgagccactgtgcccggcctgttgacagaattttttaaaatgtaagaacgccaacaaaaaaccccccaccaaaaaacaaagaaacccccttcagattggttttatcccaccattt

SEQ ID NO: 136636 - DNA, 1395 bp, Homo sapiens
tgtgtttattataggtattacaactgtggtaaatgcaataattttcctcccagaagcaagtatttttttgtaaacctaggtaacagtaaaataattgaagctgttacattaataatacataaaatctttttataaaagggaactgtcattatctttggtcagggtaggacagttgcatatttttagtatgtaggtctaactgactaaatatttaaaaacgtttacaggcagttccttcaggaaaaattgcttcccctgtctccagaaaggagcctccattaactcctgttcctcttaaacgtgctgaatttgctggtaagtgtgatgtcaggcagaattgcaagagtgttgagtggtttctgtcaaaaatggaggccctatgatggaggaggtagaggagattttgaaggtgttgtgatggcaagtttaaatgtgaagatttgaattcataaaaatttcagtaaaagttaaaaacacccaatttggagattaaagagaaatgcaaacatagtatagaaaagggacaggctgctattttagtgttggataagcctttgtgcgcctttgtgtgcctttgtgtgcctttgtgtcatcgcaataacacatgacaagaatgtgtgatgatgcctacaggcgatgatgtacaggtcgagagtacagaagaagagcaggagtcaggggcaatggagtttgaagatggtgactttgatgagcccatggaagttgaagaggtggacctggagcctatggctgccaaggcttgggacaaagagagtgagccagcagaggaagtgaaacaagaggcggattctgggaaagggaccgtgtcctacttgtaagagcattttatgacttttctggcaaataggaccacaatttttctgttggattttgaaaggtttttgaaaatgtgatttctgcagaggaagttttctcccggatgtctcttgttgggacattgatcaagaaggtgatagcagtttctcagtgcaagaagttcaagtggattccagtcacctcccattggtaaaaggggcagatgaggaacaagtattccacttttattggttggatgcttatgaggatcagtacaaccaaccaggtaatcatatataaggtaactatatgcctttaactcagagtaggacttttcccttaaatattttattttttgtttctttttgtgtgttttgtctttttatttaatcagtttatttctgttttttttttctttatccttaaatacttgagtcactgtaattagctcaggtcaggccctgccctcacttaacatgtattgtaagagagcgacactcattcattgtaaagtgaatgcgccaccctgatggagaagagctatggtgcgaataatccttaaagatgcttattccaaaa

SEQ ID NO: 136637 - DNA, 1062 bp, Homo sapiens
gactttgaaagcctcgttaaggagtttgaatcttctaagagcaatggggtggcattggagggttttaagtacagggggtggtggtcacgtaattgggtttacattttaacaggaacagtggtttgtgtagagaataagcactgtggtgcatgtgtgcgtgtgcacacacacgtggagggatgggctggtgtagggtaatggggaagtgtggaagccctggagatcagtcaatccagggcagggctgctagttacttggaccctggtggctggagaggagagaagtaaaggcatttgacatgtcttttgacacaaacttgttaatggattggatgggggaggtgacagaaaggaggaatcaaggatgatttctaggtcatcttaatgagctaatactgtgaattcttgactcacaaaaagcccggaggctgttcggtattcttttgtgcctctttgagcccgtcttcattgtgggactgtgcattgcaagatctgtcagattaatgttaaatacagtatgcactcttaaacagagttgtctttatttagatcctttttggatctgtggtacatgcaaatagtgtatttttcaaagcggtttcctggaggctgtatctagtgaaaagagagggagtacctagatgtcagcaaagcaagcgtgtgagtaaattgaaggccacatttaccttaaagataaccaggcattgactttaattggaaaaatgttaatgatctctggcaggggtgggggcggtcagaagcattaatatgcttcagcttatcaaatatatataaactcttgagccacttgagtagcacactgccatgtgttagtttcttaggaaaagatataatcaattttagaaatgatatcttaatttactttagctaggacaaaatgatttgattataccccctcacctctttgactattttgttactctgctggaagtctggcaagtatgattacatgaggctaagcagatgatttcccatccattgctgaaacccagggctgccccattgtacaacctcagggaataccattttcacgtgactttcc

SEQ ID NO: 136638 - DNA, 4143 bp, Homo sapiens
gcttctcaccctcagtccactctgctgttctggttccgtggtacttctcaagttgtgttctctcctatggcacatcttctctgttattgatgccaacgggttaaataagatagcttaaaaaaactcctttaatctcagagtgttgaacactttcattgtgatagcaggtaatgatcactgagctttggtgaaatcaatgctgctaataaaaatgaagtactccaaaagaccctgttattgtttctcactttctaacagattctaagtaagtcagttgttgctgaatgctccataattatgaaaagaatcttactctttgcatatgggaagatatcctgtcttcattatgactttttcaaggttgaataatcctgactgcacctggtttcagctagtaactttggggggaatgtgatctttgtttaccatgatctttgttgtgtcaaatgaggcataaacagtgtcaaatgtgttgcatgaagtgtgatattagtttgacagtaaaatgagcttatttgaatctttgaatccaatattagggtctttatttttctttgcatagcattttgtttttccatctttaactgttgtgaggatgacttttaattttctgagttactgtgattttttttctttcttaatcttcccatagtccttccttccctctccctccccatccaccctccgttaccccctcaagctgaaagtctcacaactcttgtaagaattttaatcatctgcagaaatgaaaattcttagatcgtcttatttctaccaggatgtgtgaaaaaaggagtcactgatgagtagtctttcaaactggggtaattgaccttgtgaacagtagcctttgcatgtaccagaattttcttagtgtctcagataagtggctgtgttgagtggctttgttgattactgctgtctaattattcatggagcccaggattttgcacagtgaccatctcctgggttgactaacaaatgtttgcagtctgttcttcgtggccaattttcataaacaatgatttgatgtctaaaaaggtgtggttttactttatggtattcattacttaaattactgaaatagaatagaaaggaacattataaacacttacctagttagatgtcctaagtagctgtgaggtagaaaaggtgaaatagaagataatagtagtccctattgtgaggtatttattattatatggaataagaaataagaagtaaattatgttttttgtaaacacagttttacatatagaaaaacactgatgcactagttatcctgatacatgaatattggtttttataggtaaatacaagcgctaaaaaattagaattatattctcagatctgtaatctcacaagaggcttaattatgagatttgttggaaaatactttccttatgtttgtttctcttttttttttcttgagacagggttttgctgtgttgaccaggctggtctcaaactcctgagctcaagcgatctgcccacctcggccttccgaagtgctgggatcacaggcatgagccactgtgctcggcctgttttgtttctcttaatctgtataatcctggttgtggggaaagtgtttatgcaagttagagaatcattctgtcccctgtcctcccagtggtcatacactgtatcattgtgttagtgtagtatggcatcagtactgagtaaagaactggtcttggggagtgggaaatggatatatttgctgtcaaaatgagttatcatgaaggtataaatgtgtggacacattcagtgagcctctatattgttcctttaattaggtgaaattgaaatgtttcttttctcgtgattttcacttattctttcaggtgtggtatttctgtttgggaaagtttggattgaatcagccgagacccatgtgagctgttgtgtcatggtgaaaaatatcgagcgaacgctttacttccttccccgtgaaatggtaaacattagtgattagcttttagttctcagtcgttgtatctgccacacattctgtgttttgcagccagctctctctctttcaatagggctacaaattctctacaatcctgatgcttctttcttgctgcttgcctggtgaccactgattgtcagcaattctattagaggttgggaaaagtagaaaaaataaagtagaactcagtttttcaactagttagagtataaaagtttctgagatttagtatataatgctttctttctctcactcctcatttccataataatcagggttggaactataagtctctaaaatgtgacatggcatttggcccagttttcatggttttgctgcataggcagcagtgatattccctccattgccatttattaacaagttcaattctatttgcttctttttttttctttattgagacggagcctagccctgttgcccaggctggagtgcaatggcacaatctcggctcactgcaacctccgccttctgggttcaaacagttttcctgcctcagcctcccgagtagctgggattacaggcgcctgccaccacactgagctaatttttgtatttttagtagatacagggtttcaccatgttgatcaggctggtctcaaactcctgaccttgtgatctgcccgccttggcctcccaaagtgctgggattacaggcatgagccactgcgctcagtctgcttctccttttttattgggacttaacatccccatttccctctcagcccctccctatatcagttgaactgtggagtctcttggtcaggatttacaacacttattcttccattttgtagacttgatcatctttatcgctgatttgttttttatgatgccattgggaggaattgggcatttggtttagtacattttttgggtctgtttgtatctttgaacttatctgtaagactgctattaaatgtttaaatgggtgaggatgaaaattgatatagacttggatttttggtggttgagaagatcatttatgtacagatacttttttttcccctctgtccccttctctgggataacagaaaattgatctaaatacggggaaagaaacaggaactccaatttcaatgaaggatgtttatgaggaatttgatgagaaaatagcaacaaaatataaaattatgaagttcaagtctaaggtttgtatttggcgatgatttttttccagctctgtttgttgtttattttctgatttagcaaatagttattgcatattttctttgtgtaaaatgccttctgtgcagctataatttattgaatggaaatttcataggtatgaatgtaaaaacagtatattagatttgcaaaaatattttttctttctctttaaactgcttataaaataatgtttattaatttgaatagaaagacaatccatagcaaattaattgcctctggtgcttgcaacatgtcttgtgctctcattcccaagtgcagaagaaactgctctgatctcgtttatattagttgttgccaagatgttttggttagaaagttaagtaaggttttatttttaaaagtcagggactatgatacagtctgatagaatgaaaatctctggttcatgtgctagttatgatacattgtcttgattttagtgagatattgatgtctttggccataatcgtgggggctatagcctgctcaaaatactggctattaataatgatcgcaggaaggattgagttgctgaagataaggctaacagtattaactatttgagttttgaattgccgctgatgagtcaagtctttataattctagaagcaattgtgatatactggtgaagagcttaggtgctgaggccggactgcttgtggtttaagtcctagccctattacttactagcatgtaacttggacaagtgctgaatgactactttttttttttttttttttttgagatggagtcttgctctgttgtccaggttggagtgcagtggtgcgatcttggctcactgcaacctccacctcctgggtttaagcaattctcctgcctcagcctcctgagtagctgggattacaggcacccgccacaatgcccagctaattttttttgtatttttagtagagctggagtttcaccatgttggccaggctggtcttgaactccagacctcaagtgatccgcccgcctcg

SEQ ID NO: 136639 - DNA, 1448 bp, Homo sapiens
ctgactttcagttacgagtattggcagggcttctcaagcccacagttcattgaggtggatttatagtaatgaataattgaaatggataaaattaatttaagtatatagactacaggttacactgcctttctctgcttttgagtatgcatctttaaataaataagttgaaacagcacgactgtttgtcaagtggaatgaatgccacatgatggagttggacatcattagtctgctgaagtgtcccttatgagcagtggaaaggtgagagaggagtgtcagtagcattgctatagtgctgctcttgctcctgtgacaggcaaggtcattgctataggatgttaattaactggaccttaacctctttttacctctgttctagtgttttgttcccacaacgttggaaaaggaaaacttttaagaactatttctgacagtggtgatgaaaagtattttcaatgagttccactctgttgctttcattcttctaatggagtggtacttacttggctattctttatcagtaaagcatgtacagctctggacagaaattttcttttgggggagcttcttggcctatttttcttctaatgggtgtcatcaagatgcattattttgtcattgtgaattggttttgtttcctactgtgaattgttttggatttcatttgtggcaaattacatttcatatatatcaaaggggttttcttctgtgcttcatagagaggcttttgtttatttcaaatatagactttggaaaatgcaaagtaatagttttaaacaaaaagattctttttttttttcctttttcaggctgaaatgccacagcttcctcaagatttgaaaggagaaactttttctcatgtatttgggaccaacacatctagcctggaactgttcttgatgaacagaaagatcaaaggaccttgttggcttgaagtaaaaagtccacgtaaggaaaaatacatgctcagaatgctgaatagattgctgatagatgtggtttttaaaagggaagttaggaaattgatctatttattttaatgtgtctacttccttttctgtttgtttcttcagttttcgttgagtgagtatagggagtacatttggaatcaccttatctcggtaatgcctggcggtttagtctgagggaggccttagtttggggtgcatccctcattatgctgttattcatatgtacttctgacctggctgatgtggcccagctgttgtgcatagtgaactgctgacctttgaaggagaggagaatcactattcaatatggatagtgcatgtttttcctgttacctgatgtttttcagtaattgcttctatgatagtctgctttgtcttaaaaatgtttcatgattcctccaaggcagtgtttcagtttttttaaaacctattttgggtcctggatgctttggagaatctgatgaaagctatagacct

SEQ ID NO: 136640 - DNA, 1074 bp, Homo sapiens
catcttattataccagaaagcaacgacagtattaaaatctactgaagatatgtcaaaaggactcaggaatcaacttgaagagtcttctactgaacaaagatgggacaatgtgagggtaagaataagttgaacagattgcaacacatcagatccatgagttcataatgatattgtctgcaatgacaccacatcgatcacttctgaaggaagctggggaaccaactcattattttgaaaactgataaagggattgaatgaaggtttttgacttttctgaacacatgctatacctcaggcaaccaaataattgatgaggggaagtttctcttcatagacggtttccagctaataaatgaaagataaatggaatagtaccactttgtaattgccggtgaaataatggatctaggaagtgatcaccagtgggtacttatatctctaaggtagagatgagcagacattatgtgcctgtgcctttggatagaagtaatcagcgcctctaaagtattcttgccccagaattgaacctgattttgatcaagcttttagacctaactatgaatttatagacagtatggagacagaaaaacaagttaagtgacactgttgggacacaagtagtagaatccatactatggggcactctctaggacaaacagcctagtttctttagcaagtaaattataggggaatgacagatgggatagggttgtacctgtagttttacatatcagccattacaaagtatggtccttgtgtggtaaataaaattgagataattggaaaatatgaaaatttaaattctgcctggataattaatgattttaagaaattactattcatgtaattgtattaggtgagataattgtattgtgattatatttttcaaacttcttatctttcagagtggtggtggttgtcagctgggtgagattttgcctctaaggggacatttaacaatgtctggagacatttttggttgtcacaactcagggggtctgggaatggtaatactggcaactagtagggagatgctggggatgctgctaacatcatacagagcacaggacagcc

SEQ ID NO: 136641 - DNA, 1049 bp, Homo sapiens
tatgtagaagagagcaatcatgagttcatttcaacacgcatttattcacttcctctatgtacgtcactatgtgaacagctgttgtgtatggtaaggaacttacagtgtgtaataggggaagctttggtcaattttaccttttcagaaggctgaactgagtttctccgctgtatgttgcttgcggcattggtggtggtgggatttcctttgaggaagactgctaaaatcttccattctggcttcagtggatagatagcaaatgtttcatcaaagcagttttaacaactgcagggacttagggttctgtgcttgaccattcttttgaggtcatcaacatgaccagtggaagtatttgatgaccctcctaattctttagggttggggggaatatatttaagacagtttcgtttggaaacatgtactatatgattacctgaaattagactaagatgggtgttggaatctttattttttttcctttttacagttgtgtctaaaccaaaggactgtatttttccatatgctttcaaagaagtcattgagaaaaaggtaaagtgctcattatatgaagcatctgtttgtttggagcgagaaagaaaaggggggtggtatggactagtagaaaaaaggtgttttatattttattagattcattcctgccagattggactatgacatcgacccattaaaatgtattagacatacacctagaagcattatttaacaatgtttaaatgttttactacctgaaaataatgggattctgtactgtattggtggttggataggctcaaacccccctccaatagcttaattagaagcttctctaaaatgcatgatcatatgattcctgttttgggaaggtgttgggtagagtccctccccagcttgagggaagctaaatgaagttgggaatactgtggacgttaaagagccatgtattgacaaagttgacatggggttggccaaaatggatcagtgatctctaaattccagcgtgctccatgaagaagttttcatgggtccttaataaaatggggaggagtggg

SEQ ID NO: 136642 - DNA, 3169 bp, Homo sapiens
agccactgcgcccagccacttataattcttaaatatgtttgtttttagtctagtttcttatttatcagttctcatcttaccatttgggattattttatacaatccttgggatttctttgcccagtaaatacataaacagtgaagtctaccagggattatataggaaagtaatgtttttgataggtactctgattcatatgctctaaatgtgtccagatgcacaagcatgtccctgtggagggacatttctatattttatgttgctcagcacttaaaatattttgctttattcacatgcttattactagaatgagctcctcagagactttgaaattattactatgaaacctacaatcaggaatttcattgctacatttagttttgaaatggatggtttcttttaaccctaagaaatcttaccatagttgaacaagaagccaagatacagtacttgcggacagtaaagagtcgtcagtgactggtgtgtttttatctaacagaatgtgaaggttgaggttgctgcaacagaaagaacactgctaggttttttccttgcaaaagttcacaaaattgatcctgatatcattgtggtgagtagatgtttgatcatgttgtggggaagctcttcatttcttagttcttttcagtgtgactttattggtgcttttgagcagcaaataatcttttcagagtaaaatgatcctgtggactggtgggaattgctgctaataggagaaaaaaatagcaagcccactgcaagatagtttttttttttctctagtataaaagcaacctatgacttagtgttgaagttaaggattgtctggctatttatgcttagagaccagcacataaataagtaaacatgtacaaatggagttatcgccaaaatattgacttagtagttgtatagtggtcacaggagtttattaattcccttggtttggtgcaaatcacaaaactaagtattttaattttatgagttcagtggatctctatgacatattcctttgaaaactcagggctcggaattgatttttctcttgacgatccagtatatccccactagatagcttgagctaataattcattgagctattttttgccccaattcctgagagtcataaggcaacattttgttttatatatcctctggcctttctagtttgtagaatatggaattccttcatttgtcttttttctaggttaatggatcaatcatattgtttttgttttttcagaggaatgtaggctataaatgcctatattttggatgtgatatgggtaatttgggtacattaaagtcttgcaaaagtgtttgccgtattcttccctacattcatttttactcttggataccttatctggcaactgtatagctagcatcctgagttcctgtggataggaagcgatatctctgcacccacttcccttatgatatttcaagacctatctttaaagttccaaaaagattctgtccacagtgttggactgtgacattctgtctcagcaccaggccctcagtcagcctccaataacaacagtttcttggaccccaaggagatgccatgaagcctgggaaacctggcctggcttcaggtgttagagccaagtctatgcgtgagaaatctagatgtaagatggaattctgacatgaatatgggtccctgattctaggtattataatttgtaagtgagacttcctcaaggcctttgggtcttctaatttaataagcaaaactgctataaatatctagtggtaaaatacatataaaattaactatgttgaccattttatagtatacagttcagtggtattaactacactcataatgttatacaaccatcaccacgatccatctctgtaactcttttcattttgtaaaactgaaacgctgtactcattaacttcccattccccggcccctggcaaccaccattctgctttttgtttctatgattttgactactctaagtagtggtatatatttttaattaagtttaataacaagtatatttattgatgtgaattattttaaacttcatctaatttttgataaacataggaaagtgaatcatgttcacgtgttggaaattacggaaatgaaaaatctagttgcatttttgagataatttctactctatatagttttgtttctttgtttttaacaagtttcttatttgaactatttagtggtattatatatttatcttgttgcatatcaattatgagtctaaatcagtagtgtttgaactcaatttttaaaaagaagctaaatgcagttcctgagttttcgaagaagtcttacataaactgtcatacaacaccaggcaggttctgtgtttttaaggaagcaaaatggaattatttgaatttagcttttaccgatcatatgaaaagtatgggacattaaatttgcattttcctccgagaccgtaaggcatgagctgcaaattaaaagatatcatatgagccttgcatcaattaggatgaaataaagtttattccagcaatctgcttagcagccttgttaatgtcaaggctaatgagtgctgctgatgaataaattcctgaagaagaaaggacccccaatcggaggtaagtgcatgatgtcttcaattagagactagaaaaagaaagggcaaagaaattctgtgcgtatgaagataaatcctctaatttgcatttgttataacattatcagctgccttctttttctgactagggtcataatatttatgggtttgaactggaagtactactgcagagaattaatgtgtgcaaagctcctcactggtccaagataggtcgactgaagcgatccaacatgccaaagcttggggtaataataattttcaaaatcttatttatctatttattttaatttgggatagctaccaaggaacacactatactttttaaaacaggaattggttatcttgttatgggaacttcagtacattttaactttggcactaaacatcttttcctttgaattcagcattttatttgtaaaagcctctggtagttttggccgggcgcggtggctcaagcctgtaatcccagcactttgggaggccgaggcgggtggatcatgaggtcaggagatcgggaccatcctggctaacaaggtgaaaccccgtctctactaaaaatacaaaaaattag

SEQ ID NO: 136643 - DNA, 5314 bp, Homo sapiens
tcaaagttggggccactgctcttgcttcttttcttattcatatctttaaggtggtagagttgttattagcacttcatctgaacacttgcttagctttttacccccttcaagattttctttatgtggcatcttctcagtgaggtataccccattaccctatttaagatggcagtccccccgtattccttgtacccctcaccctgctgttttcccattttccatccacttgttacctcctaaaactatataatttcttgtttatgatgtctgttttttattatacatttcaaatgaggccaggaatcctttctgttttgatcactgctgtatcctgagtgcctagaataatgtcagatacatagtaaatgttcaaaaatatttgattgatgtatggaagaatgagagttttatcataattttgggccagcttcaaaataggttagaaagaaatgttctcagtgtctgctctttcatgaagtttgctttttgttcccatcttgtagggccggagtggatttggtgaaagaaatgctacctgtggtcgaatgatctgtgatgtggaaatttcagcaaaggaattgattcgttgtaaaagctaccatctgtctgaacttgttcagcagattctaaaaactgaaagggttgtaatcccaatggaaaatatacaaaatatgtacaggtatgatcctagattcttcagaattcatctgtcttgaaattaacaacagcaggacactactagtactatccttagtctggagggacatgagccagtggtgttgtagaggggaaattgtctctactactttcataatttgaactagtttacctcttgaattattgtaattgatcagtttatctccgtctccctcacctgtgttaacactatcttgatgtttcctaacagtagtttggatttagatttctactcttaattcatttattcaggaattagggtagatattttagaaatataaaaactgagcaatcattaagttagaggtattgcttgcttatttcttcctcctactcctctggccatctctcattcattcctgctagttcttcctgagttctttcttggacttctcttttctgactttgttctttctctaggtgatctcattgagtcttaggaatttaaataccatgggatggctatgcttcccacctgtgtatcttcaggttagacctccctaaattccacactcagtgtatctgttttacctattttacttgatatctaatgtgaactcccagcttgttcaaaattgagctctgatcttctatcctaggttcttcctatagtctttccttactaaattaataggtgtattttttccattatcactggaaacttccagagtcttacttagccccacatgtctgaggcatctttaattcctctctctgatatcccacagtagatgcatcagggtatcctatcagttctatcttctaaatagatctaagtctgaccacttcttttcaactgcattggacccatcctatccaagctgctatcctctttcccctggattactgggtttatatgcctatccccttacttttgcccttacccccttgtggtcgattctcaatccagaatcagagttatcctgctaaaatcaagtcagatgtgatactctgctcagaaccttccagtgactctctgtttcattcagagtaaaaactaaagtccttatttttacttacaaggtcctttacaatgtgtctctatgtcgttaactctgtccttatctcgtactgctctttccatcattctctctgatctagccatattggcctctttcctagtcctggaactgtcagatttgcacgcagctcaggacttttgaatgtgctatcctgtctgcctggaatgctctttccataaggcttgctccctcacctcttcaagatcttcattctcagtaaaatcttccactgtttcctaacaaaaatttcagtctctgcttctgatacttaatattcccgttgcttaacttttaacattatataacatactatatacttaatttctttgtttttttttatactctgtctcccccgtgaggacataagctccaggaggataggaagttttgtttgttttggtcacagccaatgcctggcatatagtaagcatgcaatacatactcactggatggaatgaatgaaaggatttaggtagttttcaggcttgtagttattatattacttcagtttttccttatgggattttgtgtgtgtgtgtgtgtgtgtgtgtgtgtgtgcgcgcgtgtgtgtgtgtgtgtgttttggagaaaagcattgggatcagtggtatgaatgaattcctagttacatactgaccttattttaaattgtttctgaagccaaggtgctgttgctctgaatttacttacacccagaattccttataatattttgtgaagttctgattataggcattgtttcttttaattacttgattctgtttcattcttacttttctgtacagtgaatcttctcaactgttatacctgttggaacacacctggaaagatgccaagttcattttgcagatcatgtgtgagctaaatgttcttccattagcattgcagatcactaacatcgctgggaacattatggtaaatttaacttagaaagggggaaaaagcatttcctgttggattcagtgtttgcttggggtagttgttatatgataatgagtctaaatgcatgcttataaaatgagtaacttggattctgaaagctggatttcttttgtaaaaggaagaactggttgggagaaggggaggaatgccaggtgcagcgtgttgaaatttgggtgaacatacggatcatctctctaacatctggatgtgtctttttagtggaatggtccatttgggagtaaataaatagccaagttgtcaatattttaagctctctttgtctcctttagctataatgcttaaagaaaacgttaggaataatttagtaccttttttttttttaaaaaaaaagcagaccgttattaggaatagttttgaaggaggtgctgtgactaaacttactgactcaaagttgcttttgttagttgtggttttgagctcaaatttaaaaaataaattccatttaatagtccaggacgctgatgggtggacgatccgagcgtaacgagttcttgttgcttcatgcattttacgaaaacaactatattgtgcctgacaagcagattttcagaaagcctcagcaaaaactggtgggtccaaaactgtgtagtattttgttttctcttaaccccccccccccttttaatacctagatagccttttttttctgtgataacatctgctttcaaaatagctaatcccttgtgtactaaagaaaccgtgtcaagtttattcccttgtttttgtgtggtcatttccttttccactttgtaaaaggaaaatgcactttgtgcagacaaaattatttgtgaaatgtgaaattctttgagggaagcattagacctctctgatgggtgaccatacatggaatgtgttctggcacctcagccctatccaaagataaatgccagttaaactttttattttcttaaacctatgagcctttatttttgtgttgcatttttctgtactagtatgaccaaggtcacccacagtcaggtttctgaagtagcctccatcactttggaactaaaacttagtttagctactgttttattagcactgatattaattaattcagaaatgggaattgaatgttagaatttgattcaggttctcatatttgcttgttttttaatgtacattatcaaaattggtatagggcatattcatttagaggactttaacttctgctgaggtattgaatgttggccagtaataaactacttaggaatggattttcagtatatggatgtacttgttttatggtgtccatattaataatagggataatgataatacctgcatgaagtattttatgtttttacatcacgaatgttagagtagtgattttaagagggctgttttataatctcaaattttatataacatgaaaagtggtatttttcaatattcattgatttaaaaatatgaaattctgtaaattcaaaaacacataaaaatagaattttcatatttgttaactcaggatatagtatttgtttaagaaattactatgcttgggattcatttggattcgtgaacatattacaataactgtctttcccaacagataggaccactaactgaaatgtttgttagaactaagtcctgcaattggaaaagagagaatcatcaaaattttaaattagttaattagttgctggctggtgaagttatctttccatttgatattagggagatgaagatgaagaaattgatggagataccaataaatacaagaaaggacgtaagaaagcagcttatgctggaggcttggttttggaccccaaagttggtaaggctgggcagtgaattggttttctcccagtattaaggaatttcttaatgtggatctaggcttgagaaactagaagactgaattatatcttatagatcagcgaataggtctcatgacttttatctttcgttcacgtgaaaatcttggttgccagtcacctgacatagacttaatgtgaattttgttatgctgtgttccaataaaatattatttatagacattgaaatttaaatttcatatagttttcatatgtcatgaaatattgtttttgatttttttccagccatttaaaaatgtaaaaaccatacttaagctcatgggtggtacaaaaataagtaggttggatttggtctgtagccgtagtttgtctaatacatagatagctgtccagtacatagatagctgtttgtcctgaccagttcagttgacagcaaagttgaaggacgtgcagacaataaccaccaaatttaactttaataggagaatatctttttccctattgtcatgaatggcaaagatgttttgtggtacacagagctagaaataatttttttttctttttttcttttttttttttggagacagagttttactctgttgcccgggctggagtgcagtggtgcgatctctactcactgcaaccttcacctcttgggttcaagcgattctcctgccttagcctcctgagtagctaggactacaggtgtgtgccagcatacccagctaatttttttgtatatataaaaaaacatttcaacccttcccaagtgtacagttcagcagtagtgttaagaatattcacattgctgtgaaggaattaatgtgaattttatctaataagttagttctgagt

SEQ ID NO: 136644 - DNA, 1937 bp, Homo sapiens
gttccactactgacatttatatatatgtgtctcttgtttgattttagctcagtttttgtacaggtaaatgtgccgtccattttattttttgaagctgttgtaaaagaataaattactctaccaggcgcggtggctcacgcctgtaatttcagcactttgggaggctgaggcaggcagatcacgaggtcaggagatcgagaccgtcctggccaacatggtgaagccccatctctactaaaatataaaaaattagccgagcacggtgttgcgcgcctgtagtcccagctattcgggaggctgaggcaaggggactcacttgaacccgggaggcagaggttgcggtgagctgagattgcgccatggcactccatcctggagacagagtgagactctgactcaaaaaaaaaaataaaaataaaaataaaccactcacttggttttatttggggtggggggtgggagagtaggtaggaggattcttcaaagaattcttgctttgaaggagagttgaacatttttttttttttaatggatgtgacacgtctcagatagctgattgggaaggtatttgctcataataatggtgtgctttggggacagctggggaaaggactggttgtagctggttctaaagagagacaggatctttttctccctcttcttttgtgatctggcttttcactaatccgcatcattttatgaaatggtagttgattctttttttccctttttgtctgtttcacagctctgggtagtgtatatggatagtatatagtttctaatatacttacagtgcttttaataatgatgttttgacaattctgcttttctttagactttttatgacgtggctttttaatttcaggtttttatgataagttcattttgcttctggacttcaacagtctatatccttccatcattcaggaatttaacatttgttttacaacagtacaaagagttgcttcagaggcacagaaagttacagaggtttgtatttaacctgggactcttgaaattgagtttaaaaaaattgcttaaagaaggaagatctgtgtctttttaaaatagttttattgtggtattattcatataccatatacttcacctgtttgaagtgtgtagttcagtggcttttagtgtattcccagagtttgcaaccatcatcacaatgagttttaggatattttcattattccccaaagaaaccttttagctgtcacctccctcaatccccatcccttccacctctaggcaactactaatctttttgcttttatagatttgtgtattctggacgtctcatataaatagaatcatacattatatggcctttcggtatctggcttatttcacttataatgttttcaaggttcatccattttgtagaatgtactagtactttattcgtttgtgttgctgaataatattccattttatatgcgtgtgtggtgtatgtgtaggtgtatacacatacaccacattttgttcttttttgtaattttttttaatacatggcagaagatgtctgtttgccctctagctcctgaatttatatgtcagttctcaccgcaagcttaggacctgtttttcaatcccaatttcatattcccagaagagagaatctgataggtttgcctaggttggtgagcactccaggtccccgttacctgtgaccacaagagtaggttcacagggcacggatctggctgctaagggtggacctttctgtgggactagtggatacttttacagagaagatactgggtagacatccccaaaaggtatgactgcattcaattaatatttgagctctgttctgctactgtgccagcatggtgataattaatattatttagcctctgcccaccaccattttgcttattggagctttccagcttggattctggatatataatagaatcattttagagttg

SEQ ID NO: 136645 - DNA, 8064 bp, Homo sapiens
gagtggattgtaaacttcctgactccacatctttcagtttactttttatctgactttcatagttgctgtaaataaattagaatgtgtaccaggatctctttaatagatttactatcatcatctgttatattggaaaacagtaggtccctattactattgtaacagtgttcacttgaagatattgatctctataaaatcagatgctttgtaaaggctaggttatcaaatggcattgacttgatgtactttaaaccaagaggtttatttttaattctgaacctttgaaagggcaaatgtgcctggcttttttctttgtagctgttaatagaatttacggaggctagggaaaaatggtctaatgcttcccctgctttttcttcctgtaaattttaatataagaagactgctggttgcttttctgaaatgttgctattcttctgccgattgcatagcaatttataggtaaaaggtactacataaatgttaagggatatgtatgtattagtttttagaaatgtcatggcctatttaaatgtgctccaagctccttttttttttttcttttttttttggagatggaatttcgctctttttgcccaggctggagtgcaatgttgtgatcttggctcactgcaacttctgcctcctgggttcaagcaattctcctgcctcagcctcccgagtagctgggattacaggcatgcgccaccatgcctagctaattttgtatttttagtagagatggggtttctccatgttggtcaggctggtcttgaactcccgacctcaggtgatccacccgcctcggcctcccaaagtgctgagattataggtgtgagccaccgctcctggctgctccgaactcttaaatttgctgatttattagcttttaattattagtctacagcatttacaataactgctatgattctccatagttttaaaattctatagcattttgtttggtagtaaaatgatttaaaatagtagtttagctgctagttattttgtttttttaatcctggaggtctgtcttagtgtttgtattttaaaaacaatttccccaaacatgttgttctccagttttgttgaagagagatagcatgtgtaaaaatgtatcccttttttttttttttttttttaagacagagtttcgctgtgtagcccaggctagagtgcagtggcgagatctccgcttactgtaagctccgcctcccgggttcacgccattctcctgcctcagcctcccaagtagctgggactacaggcgcccgccaccgcgcctggctaattttttatatttttggtagagacggggtttcaccatgttagccaggatggtctcaatctcctgacctcgtgatctgcccaccttggcttcccaaagtgctgggattacaggtgtgagccaccgtgcccggccaaatgtatccctttaaatgaaatctaaatttgtgtctaactacaggggtgggagatattgggaatgacagcctaatataattgggagagaagagggcaatcatgacctgttctacaaccctctcagctctttcttatactactcatgcattattgaccttgtataagataatagcttttcaagatgtgatcatgggggaaagctcctataaaatattactgtagaaatttatttcgcaaaagtttgatttgtgtgaaatttgttgtgtgtttatcaggatggagaacaagaacagatccctgagttgccagatccaagcttagaaatgggcattttgcccagagagatccggaaactggtagaacggagaaaacaagtcaaacagctaatgaaacagcaagacttaaatccagaccttattcttcaggtatatcttttcactaagaaacatttgagtgacagtctcagcttttacagtttgattatttatgagtaaacaggatgctgggcaattgcaggtacttattttaagtttgtggataggtgaccatttaaaaatactagagtgcctcagaatggaagccacctttgtttacaaagattgtatctgagcaagatacttctggctcctgggagctttggagtctgtgtttacttgctgcttctaggaggttagggaatcatggatccaggagaatgggttgagtatattaattcttttttattcagggatattgagggtttccctttttattggagatctagaaagacatctaatgtaatgcttaaccatctgtaaatgttgttgtttgtcttttgttctgtgtggcctgcagtatgacattcgacagaaggctttgaagctcacagcgaacagtatgtatggttgcctgggattttcctatagcagattttacgccaaaccactggctgccttggtgacatacaaaggaagggaggtaaatggcgtaataacattcacatctctagatatgagagtatttttaactatacatgttatagtgtgggagagtcaagtttattacctagttgtacagcatcaaatacagtacccctctctttggatgacaggtttgagacaaataggcatttaaataaggtttcattaattcgtgtgtgtgtgtatttattattgaacatctactgcatgccaggcattgttctaggttctcaggatagagtgtcaagcaagacctaaacgatccctgttatgaggcttacattctacccagaatgggaggggtttggggttggggacgacatgggttgggaatgtggggtggtgagagggtggtttgggaaaacagactttaaataagtaaataaacatgtataagaaataacagaaaatatgatagaagtaaatgctctgtagataattaaaacaggatggtgggctagagaatgtttggatggctggtttagattggtcagggaaggcttctttgaggaggtgacatgaatgagaatgacttaagagagtttttttttgctgatggattagcttggagtgtgagtgaaaggtagaaatcaggaggataactagtagagccttttactaagatggaggaaactgggaaagaaggattaagaattctgtcatggatgtgttgcctttggcatgagtaatagaattccagacataataaggaggccattggatgtatagatccagaattccaggaatacatcaagacaggagttatggattgagagttattggctttaataagatgggccagataccaaatagaatttaggtacatcactttatggacactgtaagcttcaactgttttagtactatgtgcatgggtttttcttaatttgtaaaagaatagttacgctgaatattaaattccatttaactccctgtctgtgggtttaagactatttagccttaaaggaggtaggtagtggtcatgggaaaaatgcttatattggggggtctgtactctgaatgctctagagcagtggttggcaaatgatggccatcggggcaaatgcagcctgccatctatttttgtaaataatgttctattggaacagagctaaactcatttatttatgtatcatctgtggctgcttttgtattacgagagcagagctgagtagaaaagatggaggctcacatggcccgcaaagcctgatatatttactctctggtcttttttagaaaaaaagtttgctgacctctgctttagagtttagatcaactctgtccagtagaactttatgatgatgaaaacgttctccatctgcactatccagtgctgtagtctctagccacaagtggccagtgagcacttggtatctggctggtgccaactagctgaggaactggatttttagattgctttaattataattaaaatgaatttaaacttaaatagacaaatgtagctagtggctactgtgttggacagtgcagatctagctggtatatgaaataaacgtcaggatgttcagaatcactcttctgttggcagccgtatctcaaagatttgtcttagggcacagtgaggaagggcaaaacatgtattgaacgccagtgatgtgatagaagctttcctatgcattatttcactgaaattacacaagaatcctttgaaatagataataacgttttcattttttagatgaggaagttaaaactcaaggagataaagtataacaagtggttattttgaatgtaaatccttttagtacagtagggttgtctcttccatctcaagatgtcatttatgactctggttctgctttatattcgacctcttattacaggaagatcatgatttttggtacccatctcaagacacaggtctctttttacatgagaaagatataggtgttttaggggctagttgaagtgagggaagggaaggatgctttcagtttcttaagctaagtttactttaaaattatttaaattttatttctttacaagtatccagtggcttctgatggaataccatcttatttttgtattagaaaatgcactcactatgccccaactgggtgataatacatgggttgactattgagattggatcaaggttactcttaagtttctcacgagaggcaatagttgacaatttactcccttggagagtgcctcttgctgctgggaaatccctgttgttacattttccacattggctcagaaatccacaagcttaaaagggcactgttgataatgataagccccaaatttgtccaatgatctcccccactctcctaatccattggattttaagggcaatggttttctttagctggatttttaatagcgagtttaaacacaattttaatttttctgttatataaaatataacaataacaaatctttaataaatgaactataaaaaaccctgttctctccactaaaaaacaaaggatttcagacgaatctagaactacttgtttgtgatttaaattcttggtatctgctttcctcttttctctttaccctttgctgtttccctcaaataaggataaataaaactctggaaagtaggcctttaaagtaatatgaggctactgagaaataataattacgcagtttctcccaggaaatcttattctagaagaagatccaaagtcacttacaaatattatttcctaatataaaaatgatttttaaagtattggtgataattgttagcactggtggatggaagtagtctatgtgatatctttctttgggttagcgtctcttaattattaaagaggtaggaggagtgaagtgaaaatgagagccagtgtgctgagattttggaatacctttgtaacttattaaactagtattttttgtgacaagatacgagtgggcagaataatatagtaacctgcagatcttacaaattctttgcttttaaagtccttgtgggataaattagattaagtttcaagtggaaattaatgagaaggaaacctggtagcatgccattgcaaaagattataaaattttgcatttggatgtggattaatacacagcctagggaggccttgaagcccccttttcctttttatttttaagtctattttgtgtttgctcagttttcctggaatcgtgcacgtttggctctagcgacctaataatttctgtaatcaaatgtattatggctgctagaatactcagagtaattactaattgtactttttaaaacaggtttataataaaagtgctagtagttgtgtcaaatgggcatcaatattgtcttttcacaggtgtgatctttcacgcttaaactcttccatgattttgaattgctttgtggtagaggaatgagctaatgggtaaggaattgtatgagggatctcacagtgtgtacgttatttaaaagtaatgaagtcagtgtttcagagtactctgtggatctatagaaataccatctgtatttgtgtttgttctcaatgtgtgtgtagagaggcataaaaaagaaattgggcaagcctatggcactgagtggacatatatttttaaaccatgaagaaaaggggtatcagttgtcaaatgtctgatgtggtaattgaagtgattgttcactagatggcgatagacaccctgagatcattaatcaattaaggattttattctgtgaacaatagtgaaggcaatttaatgagttaaatctgtccacattttagacttttattaattttggaactattaaagaaaagctaaaactggcccaaaggattgtaatactctagtgtttaaaataattatgattttttaatcattagttatattgataggaacagtaatttatcatagcaagttaattcttctatcgagtagctaaattctgatttctggccatggagacacgatacatgactccctcagtcacagtatcagaagctaatctaaagggaattggaaatgattttgatatatgattttgcctttttgaatttgtttttttattgcgaaattttttattttattttattttatttatttatttttgagatggaatctctctctgttgcccaggctggagtgcagtggtgccatctcggctcactgcaagctccgcctcccgggttcacgccattctactctccctcagcctcccgagtagctgggactacactacaggcgcccaccaccatgcccagctaattttttgtatttttagtagagacggggtttcactgtgttagccaggatggtctcgatctcctgacctccggatccacctgcctcggcctcccaaagtgctgggattacaggcatgagccaccacgccaggcctattttattttattttattttattttattttattttattttattttattttaagaaacagggtctcactttcttgcccaggctggagagcagtggtgtgatcatagttcactgcagcattgaattcctggactcagacaatcttctcccctcagcctccctagtagctaggactacaggcatatgccaccatccttggcaaatttatttttattttttgtagagatggagtcttggtgtattgcccaggctggtctccaactcctagcctcgagggatcctctcaccttggcctcccaaagctgtaggattatagataggagccactgtgcctggctttattggggaatttaaaactgactatgtacttataagtatactcattgcataactttagtttaacgggaatatttgtcttgatggaataattagtacttactgacattggtattattttatttctctactctcttatttctgtgtccttgagaaagccatttttggtctggattttttattgcattttaaaatgtatgctctgatgtttaggtatagagtccatgcattttcattttcctacctgataggctgaaataagctttgccagcctgcttgccagttggtcgtagactgcctggcttttagttgtgttggagctggaatttgtgcacattaaaagtgtatccaaatcattaatgcaaacattacaatcttggcaagcctttctgggattttcttggtgatgtggtagcacctatcaggatcccttgggaaatggcactaggacagagggctctagcctttgttgatgttggtgatgaaagagaatgagtgactatgaagaattttacaattaaatattaagagaagtctttcatctttacctgtaaataaccaaaaatttcacttttgcaatctttttctttctttctttctttttttttttgtggggggcaggggggcagagtttcactcttgttgcctaggctggagtgcaatggcgtgatctcggctcaccacaacctccacctcccgggttcaagcgattctcctgcctcagcctcccaagtagctgggattacaggcacgtgccaccacactcggctaattttgtatttttaatagagacggggtttctccgtggtcaggctggtcttgaactcctgacctcaggtgatccgcccacttcggcctcccaaagtgctgggactacaggcatgagccaccgcaccccgctgtgatctcttaatagcctagtttttctttaaaaaagtaaaagcaataaaatattatagagacaactaaagaccatttcctccccatcctctctcatttctttttctttttcggaggtaact
